United States Patent Application Publication US 2007/0054278 A1 - sequence listing, part 30

SEQ ID NO: 94119 - DNA, 54208 bp, Homo sapiens
  misc_feature (1)...(54208): n = A,T,C or G
acaacctcgcaatgaaggggaatgattactatccccatttaacaaataaagaaacaagctcaaagaagtgaagtcacttccccaaagtcatccaactggtagagctccaacttgaacccaaacttctctgactccaaaaccccaggaaggctggcagcaagcaagagccccctcctccccagggaacagcaaaggaaccgcaataccacacacaactgtccccagtaacttcctccttctcaagagctagtcggcggacttcggcccggaatggcacccctatcgcacctagctccagagagcaggaattggggaaaaccccctgcgatcctcctgggactcaacacccttcccaggaggctgcaggatccgggacctccccaaactaaacaaaaggctccacgcgaaaggccccgcacacagtaggtgctcggtttcccaaagccaccgagcaaatcgcattgctcccttcttttcctgtaaagtaaaaacaactccaagtatcttcaaagcaggaggaggagtggggcagaaggtcccaggggaagtgggtcgggatgcgaggctaggacaaacccggggtagctggggagggcgcagccgcgtggggaccgagagcgccagtgtgctgcctggctcacagtaggagccattcaaacgcggtgaatgaatgaatgagacgcgcggcaggcgtcagcgcagccgggagagactctggctgcgccgaccgcggaggcaaggtccaaggagaagcgcggcgcagaggagagggcgccccgaggcccggccgcccagacccgcactggtcaggcccggcgggggccgcaggcggcaggccccgaggcgcaggccggaccccctcttcccgcgcgcttgccgggcgggcagccccggaggccgcgctcctcccaggtcggccccggtagccaggtgcgtggcgaccggggcaaggtgaccgcgggcgcgggcccggcgcccaccttccgagcggtgggaatgttgtcctcgccgaacaggctgttgagctcggtgagaactactgcagtcgctcgatctctnnnnnnnnnnnnnnnnnnnnnnnnnnnnnnnnnnnnnnnnnnnnnnnnnnnnnnnnnnnnnnnnnnnnnnnnnnnnnnnnnnnnnnnnnnnnnnnnnnnnnnnnnnnnnnnnnnnnnnnnnnnnnnnnnnnnnnnnnnnnnnnnnnnnnnnnnnnnnnnnnnnnnnnnnnnnnnnnnnnnnnnnnnnnnnnnnnnnnnnnnnnnnnnnnnnnnnnnnnnnnnnnnnnnnnnnnnnnnnnnnnnnnnnnnnnnnnnnnnnnnnnnnnnnnnnnnnnnnnnnnnnnnnnnnnnnnnnnnnnnnnnnnnnnnnnnnnnnnnnnnnnnnnnnnnnnnnnnnnnnnnnnnnnnnnnnnnnnnnnnnnnnnnnnnnnnnnnnnnnnnnnnnnnnnnnnnnnnnnnnnnnnnnnnnnnnnnnnnnnnnnnnnnnnnnnnnnnnnnnnnnnnnnnnnnnnnnnnnnnnnnnnnnnnnnnnnnnnnnnnnnnnnnnnnnnnnnnnnnnnnnnnnnnnnnnnnnnnnnnnnnnnnnnnnnnnnnnnnnnnnnnnnnnnnnnnnnnnnnnnnnnnnnnnnnnnnnnnnnnnnnnnnnnnnnnnnnnnnnnnnnnnnnnnnnnnnnnnnnnnnnnnnnnnnnnnnnnnnnnnnnnnnnnnnnnnnnnnnnnnnnnnnnnnnnnnnnnnnnnnnnnnnnnnnnnnnnnnnnnnnnnnnnnnnnnnnnnnnnnnnnnnnnnnnnnnnnnnnnnnnnnnnnnnnnnnnnnnnnnnnnnnnnnnnnnnnnnnnnnnnnnnnnnnnnnnnnnnnnnnnnnnnnnnnnnnnnnnnnnnnnnnnnnnnnnnnnnnnnnnnnnnnnnnnnnnnnnnnnnnnnnnnnnnnnnnnnnnnnnnnnnnnnnnnnnnnnnnnnnnnnnnnnnnnnnnnnnnnnnnnnnnnnnnnnnnnnnnnnnnnnnnnnnnnnnnnnnnnnnnnnnnnnnnnnnnnnnnnnnnnnnnnnnnatggaggggctaagccgcgaagtcccggtcccgccaatcgatcttagtgccaggaagtaccagcgccacctgcgatggattcttgccaagacaagttgagcatgaacctgatggggcctctagatcaaacctacagtttacaggaaatatggcagataaggaaaacttagaagcagcagaagcaaccaaccaactccagcatgtggggcattctaccaaacaaacgacccagtttgttcaataaataattggtataaaaggtgagcgaagaggaggataattggttttaaagacttaagagccataataacccatgcaatgcaaggaccctgtttgcatcctaaatcaaacaaatcaagtctaaccaacattttttttagacaaccaagaaaataaaactcaatttttgccaatccaaagaatacaaaatgctcttatttttgaatttacattttctggattcctagtaagattttcatagatttattggccatttgaattacttctctgtgaattacctattcatatcctttgcacattttttcctgtattgtttatctttttaaaaacttttttgtaggtcgggtgcggtggttaacgcctgtgattccagcactttgggaggctgaggcgggtgacctgaggtcgggagttcgagaccagcttgaccaacatggagaaatccctccgtctctactaaaaatacaaaatgaggccaggcgccgtggctcacgcctgtaatcccagcactttgggaggccgaggcgggcggatcacaaggtcagcaatttgggaggccgaggcgggcggatcacgaggtcaggagatcgagaccatcctggctaacacagtgaaaccccgtctctactaaaaatacaatagccgggcgtggcggcgggcgccgtagtcccagctactcagagcctgaggcagaagaatggcgtgaacccgggaggcggaagttgcagtgagccgagatcgtgccactgcactccagcctgggcgacagagcgagactccgtctcaaaaaaaaaaaaaaaaaaaaaaaaaaatccaaaatgagccagttatggtggtgcctgcttgtgatcccagctactcgggaggctgaggcaggacaaccgcctaaacctgggaggcggaggttgcagtgagccgagactaagccactgcactccagcctgggcaacaagagtgaaactccgtcccaaaaacaaaacaaaacaaaacaaaaacctttttttacgccaggtgtagtggcacaagcttgttttgggaggccaaggcaggaggattgcttgaacacaggagttcgaggccagcctggccaacatagtgaaacctatctctataaaaaatgataataataataataataataaactttttaattaaggtataacatacagaaaaatacacaatcatataaatttttatgaattttcacaaactgaatacccaaggtaaccagcacccaaatcaagaaacgaaacattaccagttcccccacgaagcctccctttgtcccctcccattcactatgttcctcttaaaatttaggggattcatttgcctgtgtttgaagtttatgtaaatgaaccacacagtactctgggggttggcttcttttgttcaacttttttttttatttattttttattttttgagacggagtcttgctctgttgcccaggctggagtgcagtggcatgatctcggctcactgcaacctccgcctccggggttcaagcgattctcctgcctcagccttccgtgtagctgggactataggcacgcgccaccacacccggctaatgtttgtatttttagtggagacaggtttcgccatgttggccaggctggtctcaaactcctgacctcaggtgatccgcctgccttggcctcccaaagtgctggaattacaggcgtgagccaccacgcccagcttttgttcaactttatatttgtgagatccatccatgctgttatgtatctgccttcttcttgctgtctagaatggtctataccttctggaaggtaattcactgatatattatattttagaaggaaatataggcaagtgtactactacctacttaacattttttaaacgtttcttaaacttttaatttatttaaataaacatatttaaagaagaaactttagatcactatcatcctgagcaacaaaatccataaaaacacagatttgagcctgggtgcagtggctcaggcccgtaatctcatcattttgagaggccaaggtgggccgatcacttgatgtcaggagtttgagaccatcctggccaacatggtgagaccccatctctactaaaaatacaaaaattagatgggcatcttggtgggtgcctgtaatcccagctacttggaaggctgagacaggagaatcgcttgaacccgagaggtggaggttgcagtgagccgagactgctccactacactccagcctgggcgtcagagggagagttctgtctcaaaaaaacaaaaacaagcaaacaaacaaaaaaccccatagatttgatacgctaattatgatttttttaaacgtcattcattaaggccttcacagtggcttatgcctgtaattccggcactttgggaggccgagacaaacggatcccttgagcccagaattttgagaccagtctaagcaacatagggagacaccatctctacaaaaaaatagaaaaattagcccgtcgtggtggtgtgtgcctgtagtcctaactactcaggaggctgaggtgggaggacaggtcaaggctgcagcgagtggtgattgcaccactgcactctggcctggcccacagggcgagatctcatctcttaaaaaaaaaaaaaaaaaagtcgggcgcggtggctcatgcctgtaatcccagcactttgggaggcccaggcaggcagatcacgaggtcaggagtttgagaccagcctggccaacatggtgaaactccgtctctactaaaatacaaaaactagctgggggtggtggcgggcacctgtagtcccagctactcggaaggctgaggcaggagaatcgtttaaacccgggaggcagaggttgcagtgagccgagattgctccactacactccagcctgggcaacaaagccagaccttgtctcaataataataataatgcattgtttcccagtgtgttacaatgtgatgcggtaatgggaatttaaagttatgtaatagacaactttatttttttttttttgagacagagtctagctctgttgcccaggctgaagtgcagtggtgcagtctcggctcactgcaacgtccacctcccgggttcaatcaattctctgcctcagcctcccaagtagctgggattacagacgcctgccaccaggcctagctaaattttttttgtatttttggtagagacgggggtttcaccatcttggccaggctggtcttgaaatcctgacctcgtgatccgcccgcctcggcctccaaaagtgctgggattacaggcgtgagccaccgcgcccgtagaggcctccttttagatcttccatctatccctgtgatggaaatatttggtgcctttttaaaagtacacgactaatacgtttcttgtaggaatatcagaaaatacagatgcgcaaaccagggttggggggaagaagtttggagtactgggggcggggtatattttaaaaggtggcaaaacacttccactcccaagaagccaaattagtatcagtagatataattcatatttaaacccagactaccccaagcgagaacagcccaggacttaaactcgggcctccgctgggacctcaggccccgcctacttctctaaatagtcccgccccctgcccggcccggctccgcctctcctcttcgctgggtttctcttgcaaccccgcccctcagcggcaaagtcagttacagttctcgcgataacacaacccggaagtctcacggccggagttggtggtactgggaacccacgtgggctgggtttcggannnnnnnnnnnnnnnnnnnnnnnnnnnnnnnnnnnnnnnnnnnnnnnnnnnnnnnnnnnnnnnnnnnnnnnnnnnnnnnnnnnnnnnnnnnnnnnnnnnnnnnnnnnnnnnnnnnnnnnnnnnnnnnnnnnnnnnnnnnnnnnnnnnnnnnnnnnnnnnnnnnnnnnnnnnnnnnnnnnnnnnnnnnnnnnnnnnnnnnnnnnnnnnnnnnnnnnnnnnnnnnnnnnnnnnnnnnnnnnnnnnnnnnnnnnnnnnnnnnnnnnnnnnnnnnnnnnnnnnnnnnnnnnnnnnccattccagatgatccaaaggagaggggcttagtgacagcctagttttaacagtgtatatggaatacccgggatttctctcgccctcaaatagtaacatggagaatttggcaaaaaaaacaggagtagttccatcccttcccatgacttcgattataatctctttataatctccagcgacccccaaatgtgtattttcagcccagtcttgtctgctcagctccaggctggctgacatttctctcagacccctttttaggagtagcccttattacatgccaggcactattctaggcactggagacatagcagaaagggagatttttagaaaatccctgagtttacctgctgtataggaggagacaggcaaagaataaacatatagaaatttatgtggctayagtgagcagataaaacagaagaggccattgggtgggttgcagcatcccatagagttgctggagaagacatcactctgttagagtcaagatctgaaggagacctgagtggctgcctggagatgagagaaaaaacagggggccagggcaggtcgggcctggactgcagtcttggcgaggactggggctttttctctacgggagagggcagccatgggagcatttagagcagaggaggcgtggtggtgggcacctgtagtcccagctacttgggaggctgaggcaggagaatggcttgaacccaggatacggaggttgcagtgagccaagatcgcaccactgtactctagcctgggtgagagagcgagactccatctcaaaaaaaaaaaaaaaaaaaaaaagttccacagacaggctgggagttgaggcagatcccctaacatctctgtgccttcgttttcacatctgcagaatgggaccagtagcacacgttgagcagccttaatccaaaatactccaaaattcaaaagtttttgagtgtcaacatgacacttaaggaaatgctcattggagcattccagatttcaaatttttagattagggatgctcaaccagtgaatagaatacagatgttcctaaagctaaaacaggtctggttcctagcatttctggaaagggatatttaacctgtagtagccgtcttacctcctatcagagttttggagatggtaatttgggaaaatatgttgctttgaaaagtaaagaaaggttacagaggtggggtgtgtcccaggacaggtgacaaccgttatgatggcagtgacaattcaggatggcacctcaaagacagccgtagacactgggctgacacttggaactggaccacctgagcagaggggctgaggtctctcagacccagagatttggggaaagttgtttctcacatcagaacaggacatttccatgtatccctgcctttctcaggggccagaggaatctcataagaacatgactcagattaccttcttttatttatttatttatttgagatggagccttgctctgtcgcctaggctggagtgcagtggcgtgatctctgctcactgcaacctccacctcccgggttcaagcagttctcgtgcctcagcctcctgtgtagctgggattataggtgcatgccatcacacctggctaatttttgtatttttagtagagacagggtttcgccacataggccaggctggtctcgaactcctgacctcaagtgagccacctgcctcagcctcccaaagtgctgggattacaggcatgagcccctgcgccaagccttgagaacatcatagtattgttatgaaaatagatttgagctcacagatccccctgttcctgtgtgcagactcaggaggcccccatgcaagtcagggggcttgtgggaggcgggaccagagctacctcaaggagaatggggacttaataactgtgctctctcagacaaggacacgttgaagggagttgatgcaagcaacgcgctcgttctaccggggaagaagaaaaagaagaccaaagcccctcccctgtcgaagaaggagaagaagcctctgaccaagaaggagaagaaagtgctgcagaaaatcttagaacagaaggagaaaaagagccaggtacaccccactcgggcagggtctgcaagtggctctccagcatagagagagatggggggtctctctcctcctgagggtgtctctgtggtgcaactaatagaactttctggaatgaggaaaattccagtgcatggtccagtgcggtagccactaaccacatattgctgttgagcacttgaaatgcagctactatggcagaggaactgaactgaactgttccggagaatgtcaaacttttttccttgttttttcttctttttttttttttaatttaaatttaatttttttttcttttttgttttgttcccccacccccgacatcttttctggctctaccaaaccttaaaaaaattttttttttttgagatggagtcttgctctgttgcccaggctggagtgcagtgaaatgatcttgggttctcctggtatcaagtgattctcctgcctcagcctcctgtgtagctgggattacaggcgcgtgccaccacgtcaggctatttttttttttttttttgtatttttagtagaggcggggtttcatcatgttagccaggatgatcttgatatcctgacctcgtgatccgcccgcctcggcctcccaaagtgctgggattataggcgtgaaccaccatgcccagccaaccttaattttttcatagaggaaaaaagtttgtcatgggaaattcaaacatttgcaagggaaattcaaacatttgcaagagtaaagagaacagtatgatgaactcccatgtgcccatcgccagctccaacattgatcagcccctggtcaatcttggattatctccactgctggtcactttcccacctctgggtcattttgaagcaaatcccacatacagtgaatctgtactagtttcctggggatgtcatacaaatgaccacaaactgaggggcttaggacaatagaaatttgttccttcccagcttaggaggccagaagtccgagatcaaggtgttggcagggcggtgctcctcactgggctcaggggagggtcattcctggcctcttcctgctcctggcggctccaggcgttcccttggcttgtggctgcgtcactccaatctctgcctccctcttccctcggcctttcctccgtgtgtctcttcgaagggcgcttctcattggatttaggtcgcgctcagatactcaggatcatctcatcttgagatccttcacgtaattacgtaattacatctacaaaacctttttccaaatagggtcacgttcgcaagttctgggatacgaacacgtctttgagggaggctgccatttaacccactatacatagcattatatccataaatatttcaatttgtatctctataagtagagacttttaaaaatgaccagaataccattagcacacctaatcttttattttaatatcaaacatctagcaagtggttaaatttcctgttgtttcatggatactcctcacccttttcttgtttttttttcccattgtagtttatttgttgtttgtcttacagtttcctaccttctggatttttaaatttttattttattttattattttttgagatggagttttgctcttgttgcccaggctggagtgcaatggcatgatctcggcgcaccgcaacctccacctcccgggttcaagtgattctcctgcctcagcctcccgagtagctgggattacaggcatgcaccaccacgtccggctaactttgttatttttaatagagacagggtttctccatgttggtcaggctgrtcttgaactcccaacctgaagtgacccacctgcctcggcctccccgagtgcagggattataggcgtgagccactgcgcccagccttaaaattttattttaaacatgctcctctgccatctgagctttttgtacattagtatttggatctgtagcagtgactgtcatccggaacagttttgcgcgccgccccccgctgccccagggacatttggcagtgtcttgagacattttgggctgtgacaacttgggagtgctgctggcatctggcgggtggagccatgggatgctgttaacagcctataatgcacagaaaaacaaaaacttatttggccctaaatgtcaatagtgctgagattgaggaaccctgacctggagccttcatgagaatcaagtttgacttttggtgaggccactgcacgtgggagctgtgtcttcacatcaggaggcttgagggtctctctccagcagccgtggatgggcagtccccagagccttagtagggggaagacttactcacctgtgagcgtgttcttttttttttttttttttggagacaaggtcttgctctgttgcccaggctggagtgcagtggtatgatctcagctcactgcaacctctgcctcccaggttcaagccattgtcctgcctcagcctcccgggtagctggtaccacaagcatgcgccaccatgcccggctaatttttgtatttttagtagagacatggtttcaccatgttggttaggttggtcttgaactcctgacctcaggtgatccacccgcctctgcctcctaaagtgctgagattgcaggcgtgagccactgtgcctggtcagtgtgtcctttttaaatcctatttagggtgctttcccgctgtgctataccttgttctgtgtgtgtgtgtgtgtgtgtgtgtaatacacacatagaagtgtgtaggctgggcgcggtggctcacgcttgtaatcccagaactttgggaggccgaggcgggcagatcatgaggtcaggagatcgagaccacggtgaaaccccgtctctactaaaaatacaaaaaattagccaggcatggtggcgggcgcctgtagtcccagctacttggagaggctgaggcaggagaatggcgtgaacccaggaggcagagcttgcagtgagccgagatcgcaccactgcactccagcctgggtgacagagcgacactctgtctcaaaagaagtgtgtataaaacctatatgtacagttacaagaacaataaagtaaaaactcacgaaaccctcacccaactaaaagaagccaactgggtacaccccctgcacacagcattgctcagggtagctcggggaccaattcacatcagacacacaaagccgcctccttcctcagagcagctagggagcactgctgtacatgactgagctgtgctttattcatctcctgttgatggacatctggtgggccataatcttctactgtgataccctgctgcagagaacctcatttatacaaccccagattctgtaaaaggggttaaaaaagccagcttgctgtgtctgttgatggaagaacaccatgcaccagtagaattgcaatttgaccgccgattttaaagactccaggtgttaatgatgctgaaattttattagagtctcacttcccttcttaagagagggtcgtgatggcaaatgcataatacactcgtttcctttcccagcgagcagagatrctacagaagctgagtgaagtccaggcttccgaagctgagatgagactcttttataccacttccaagctaggcactgggaaccgcatgtatcacaccaaagagtgagttggccagtcctttgctaaccctgccctccctccagggccccctagggagggcgcacaggttatrgggtcctctgggggtggaacatttgagaaaatacctttatggtggcctgagtggctgaaaattcattgtcatcctaaatgcctctagtgggtaaaggccacagatgctgctgaaccttctgcgacacacaggacagcaaagtttctcgctccagtgatgtcggtgttttcctgtggtgtagagtcccttgttacagctcttccagcttttgtgcagctgattaggccagaaattgccattaggtggtcaagggctggatttggcccatcagcgggtttggtttggtttgtgtcgtgtttttttttgttttttttttttgagacagagtcttgctttgtcacccaggctggagtgcaatggcgtgatctcagcttaccrcaacctccacctcccaggttcaagcgattctcctgcctcagcctcccaagtagctgggattacaggcatgcaccaccaagcccggctaattttgtatttttagtagagacggggtttctccatgttggtcaggctggtctygaactcccaaccttgggtgatctgcccgcctcggcctcccaaagtgctgggattacaggcgtgagccaccgcgcccgactggtttgtgtcgttttttaaggcatgagtgctgtttgccaatatgttagcttcctggcgctgccataacaaattactgcaaacagcggtggcttagaacaaccaagccagaagggtgccgtggctcatacctgtaatcccagcactttgggaggccgaggcgggtggatcacctgaggtcaggagtttgagactagcatggccaacatggtgaaaccctgtctccactaaaaatacaaaaattagctgggcatggtggctcatgcctgtggtctcagctactctggcggctgaggtgggaggatcacctgagcctgggaggttgaagctacagtgagccgtgattgcaccactgcactccgtcctgggcgacaaggtgaattcatgttcccacctagtctcgactagttggacgatccggccacaccagcagtgtccccaccargctgctgrcccttaaatggcctgtgtgcccytcccacccagtcccaccccactctgtggtctcctcagcctgtgctgctcatttacatgaggcctgactggtgcctgtgagcactgtcagttagtgactgtttatcgagtgcagagactgtcccaggctctctgctaggccctggggatasagcagtgcacagaaataaagtcctttctcttaaggagcttcccagtgtcatggcgggagatgtaatcgtgggaagtcatcaggcgagtgcatctgtgtcccacgctgggaagcactgagcagaaaatgaagcagggaagagcgaggtggagggagaagggtgagatgtggggtctgtgtgtggtcagggagtctccctgacagctagtgcttaagcagaggcttaagtggagtgagaggaggtatctgcaggaagggcatttcagggagtggaacagcaggtgcaaagtccctgaggcagaaaggggtatggccttggagtcctgacctctgggattgaggtggggcctctgtgcctgaagtctctgctatctcaacaggaaggctgacgaggtggtagccccgggccaggagaagatcagtagcctcagcggtgcccaccggaagcgtcgccgctggccctcagctgaggaggaggaggaggaggaggaggagtcggaatcggagctggaggaggagtcggagctggacgaggacccagctgctgagccggctgaggctggtgtggggaccaccgtggcacctctgccgccagctccagcacccagcagtcagcccgtgccggctgggatgactgttcctcctcctccagctgcagccccaccactgcccagggccctggctaagcccgccgtcttcatccccgtgaaccgctccccggaaatgcaggttygccaccccrtgtttgtgattaagaatctaggttagcgggcaaggggcgcacagagggcgtcctggtgaagtggggcaagggcatcccttctctgtgcctccatgtccccatctgggaaaggggagagtgactgcgcctcccttgaggctgtggcagggattggtgcgcgaggaggatcacagtgcagggcgggtgtctggcggcacgcctggcaggctcggggccctggaggtcggcggcagtagcttcatcgccactgccctctgaccagcgggcctggcctgggctgccccgatccagacaagagtttgggctgtgaatcagttgacccgaaatcaagtgctgattcccctgctctccagctcacttcccgcgcatctgtaaaatgggaatattccggctactgaaggggctccccctctctgtkcctgtttccttcctggtacaatgagtgtctcactgggttgtgatgacaatgaaaggatttggggcatggaaagcccacagcccacgtaggaactctggatccctagaggagtaatgttggccgttgaatggaattgggatcctgcttctaagtacatttttctgcttttataagtcttcatcagggtaagctgaccgctctagcaaatgaccccaaagtgccagtggcttcacaccacaaacgtttgcttctaggtgatgtcatcacccagtgccatctggtggcaaggagggtgtggggttctgctccgcgcggtcactcaggggcttggcctcctccatcccgtgtccctgccatcccttgggacttcagttcctgcttttctttgtgaatttttccctattcgtatcctgtccatattcctaagcaatacataccgtaggtttgcctgtatttaaaagtggcatcatgtcctttacgttattccagtttgcttttttgttactcagcattatatcttgggatacatccatgttgatgcaggcagctgaggctcatttactttttccccactgctatcgagtattcacggtgtgaatatagcgcaggatgagtattctgttgctggatagttggttgttttagctttttgctgttatcttcactgctgtttttgttgtttgttcgtttgaaacagggtctcactctgtcacccaggctaaagtgcagaggtttgatctcagctgactgcaacctccgcctccgaggctcaagtgaccctcctgcctcaccctcccaaagagcctgggactgtgggcacacgctactacgcttggctaactttgtattttttttgtagagacggggttttgccatgttgcccaggctggtcttgaactcccaagctcaggcaactcccaaactcaggcaatctgcccactttggcctcctaaagtgctgggattacaggcatgagcacatgactagccttcactgctkttttaaacgttcttgtccctctcctatgagcgcatgtgcagaagtttctcttgggcagtgtttgcaaatgacgtgatagccatctttgggtcatgaattgagtagcttttaatcttttttttttttttgagacagtgtcttgttctgttacccaggctggagtgcagtggtgtgatcacagttcactgcagcctctacctcctgggctcaagcggtcctcccacctcagcctcctgagtagctggcactacagatatgtgccaccatgcctggctaacttttttatttttatttttttgtagagacagagtctggctatgttgcccaggctggtcttgaattcctgacctcaagcagtcctctgccttggcctctcaagtcgctgggattacaggcgtgagccatcatgcctggcctcatatttttaaaaaaaacaaatggaggccaggcacgatggctcacgcctgaaatcccagcgacttgagaggcaaaggcagattatattctgacggccccgaaataggcgcaaaaaagactcacacaaaagaagacgtggaagcaaaataaccactgtacgacaccgggacacagaaggggccgactacaagttaggccagcaaaagaggaataataaaaaaaatgcaagagcaacatcacatgacataagagcgggaagccaaacggatatcgagaaggaacaacggaatgccgtaccaccaagacgggaacacacagcatgagtggcaggggtatagaggcatctccggtgggccctgttatcgagggtatccccagcggacggggacgcgcgggggagtagcgagaagctaaggaggatacgggagcctataagtccaagcgaaggtagacttcaatagagcggaaggggagatggaggtgaagagaagagtagagcatggtcacatagctcgcttgatgagtattgaaaatgggcgcggatcgactgaccacggagcagcgcctggtggagcagannnnnnnnnnnnnnnnnnnntggagagttccattcacttcctgaaacgtgcacctgtttcaggtgcatgtttattcagtgtgcatggatatttaagatttgctggagcaggctgggcagggtggctcacccctataatcccaacactttgggaggccaaggcaggtggatcacctgaggtcaggagtttgagaccagcccggccaacagagtgaaaccccgtctctactaaaaatacaaaaattagccaggcatggtggtgggtgcctgtaatcccagctactcaggaggctgaggcaggagaatcacttgaacccaggaggtggaggttgcagtgagccaagatcacactattgcactccagcctggacaacaagagtgaaactctgtctcaaaaagtaaataaatacaacaagtggaatagaatagaatagaaatagaacaaaaattaagaatatgagcttgttggccaggcatggtggctcatgcctgtaatcccagcactttgggaggccgaggtgggcagatcacctgaggtcaggagttcaagaccagcctggccaacctggtgaaaccacatttccactaaaaatacaaaaattagctgggcgtggtggcatgtgcctgtaatcccagctactcaggaggctgaggcgggagaatcgcttgaacccgggaggcagaggttgcagtgagccgagatcgcgccattgcatacaccttagggtgagccatgtttcacagaactgttccttccatatacgatacatatatgtgcctgtgtgtgtactgagtcatgatrtaaaatgtgtttctttccatgagtcacaggaaaaaatgtagaaagcccctgctctggaatatgtacctaggagaggaactgcagggccacacatcttaactttgagaaaatttgcaccagattatttatcgaagtggctgggccgttaattgagactcctgccagcaacagccgagggttcccgtatctctgagagactgctctgccccaaccaagctgtgcctggggatgtcagtcctggtgtcctgaaggatgtgatccctgtctctgtctctcctggaccatggctcctggtcccctccccagctgtcagggcctctgttccccagcaggcacatctgttcagcacccatgtgtcagctgccaccttcctggaggtcccatcactgtctatagtcttgctgctccctaagtgctgacttcctctccttccaggaggaacggctgaagctcccaattctctccgaagaacaagtaatcatggaggctgtggccragcaccccatcgtcatcgtgtgtggtgagaccggcagcgggaagaccacacaggtgcctcagtttctctatgaagcaggcttcagcaggtaggggcyggacacagggttctctctgggtccctcagtgacactggagatgccctgaaaggtcgataagagcctgggctccccaggatccaatcctggatctgccctgtgcatgctgtgtgacttcagacaagctacttaacctctctgggccccagctgtgagatgggaataatagcgcctacttcacaaggttgtcgtgtggattaagtgagtgaacttgcgtagcacacttaattcctggcacgtagagctatgtgcttactattttcttttttcctttttttttttttttttgagacagcgtctcgctgtgtcaccccggctggagtacagtggtgtgatattggctcactgcaactccgcctcccgggttcaagtgattctcctgcctcagcctcctcaacagctgggattacaggcgcccgccaccacacccagctaatttttgtatttttagtagagacagggtttcttttttttttcttttttctttttattattattatttttgagacggagcctcactctgttgcccaggctggagtgtagtggcgcgatctcggctcactgcaagctgcgcctcccgggttcacgccattctcctgcctcagcctcccaagtagctgggactacaggcgcccaccaccacgcccagctaatttttttgtatttttagtagagacggggtttcaccatgttagccgggatggtctcgatctcctgacctcgtgatccgcctgcctcggcctcccaaagtgctgggattacaggcatgagccactgcacccrgccaagagacagagtttcaccgtgttggtcaggctggtcttgaactcctgacctcatgtgatccacccacctcgacctcccaaagtgctgggattacaggcgtgagccaccccgcccagcctgcgcttaccattttcactgtgtagcctgctattggcacttttgacccatgtgtgttggggtccccaagaccatgctcaggttcggtgattgaccggggactcccrggactcagcatgttatcctgcacatggctatggtatattacagcgaaggacgcgatcagcagagggcagtggtacctggggtgttctggggaaacccagctccagcttccagagtcccctcccggtggactcacacaggacgcactggattctccagtagccacctgtggccacacaggaactatcctccaccagggaagctwgttagagattcagggtccacggctgttactggggtcgcctaagcccaccctgcctggcaggaacgaaatcctagacgcctaaaaggaaagcaggtgtccggcataaaccaccctgtttgcacaaacaggctgggcacagtgggccccgcacttacagggaatggaaggagctctcctgttgtacaggttcaggcacccagcgagggccagccccgtcagcagcctttcgagggagagcagctgcaggtctgtggtgttaatgttcccacagagctgggaccagccacccrtcggcttggcgggttcctgtgtctggaggagcttgtgcttgactggggcaaacagagctcccagcctggttcccccaggccccgttccttctagcggctgcctggtgtccgctgcatggtgaatgtcgaaccgttttctatgtgttggcctttgggctgttccgtttgctgttaaaagtagtgcaacctggcactgtttcccaccgcccctgggtgagcgccaggtcagtatggcaaatcttgctgtggaactgcatgaggctttggcatgaacaggtggggccgcgcactgttgatggccatgttcttcctcccccagtgaagacagcatcatcggtgtcacggagccccgccgagtggccgccgtggccatgtcccagcgagtggccaaggagatgaatctgtcccagcggtgagggctctacttccctggggcggactatggggtggtcctgtggccttgcccagatgtgggaagcccaggaggaggtgagcagcatctgtgccgagggtgctgggtggagtgtcacctctgcatgtagcactgggaatcattgtgggagagaactttccaggacctgcccaagcagggggcctccaagcaagcttacgtcctgcacagtgtgccgaggggacagagtggcccatccaggggctcgagaacagagcagggggccagatgcaggcagtcacggagctagtacctagcattgccgggttaatctaaaactcaaggttctaaagtacaaaatcttggccgggtgtggtggctcacgcctgtaattccagcgctttgggaggccaaggcgggcagatcacctgaggtctggaattcgagaccaacctgaccaacatggagaaaccctgtctctactaaaaatacaagatgagccaggtgtggtggcacatgcctgtaatcccagctactcgggaggttaaggcaggagaatcacttgaacccgggaggcagaggttgccgtaagccaagatcgcaccattgcactccagcatgggcaacaagagtgaaactctgtctcaaaaaaaaaaaaaaatcttcaggcggtaagtctgtaggacttgctttggaaagcagccttgaacaggcagatatagcacttgctttacaatggctgggagcatatgtttataatgcagaggcctgtgtctaacatgtccagcatggtctaaaatccagaaggcacaaaagagcacagagtgagagcctgcctcatctgcccactcagcagatgttactaggcagcatctagtgtgccaggccyrtcctgggctctcaggacgtggtggtggaccagacagagccaccggccccccgggtcagcatgccagttgggggacttgttgtctttgtacgttaggctcrgaggacgctaaggcagggatggagtactgggggccccttctcacccaatgccctgcctcctctccaggagcagccaccactgaccatctcctgcacgtcctcctggacaattctgtgcatagttggcatgcgtctagraaaagctgcctcattctcttttaacttgttaaatattataaaaatttggggactgggtggccgggtgcggtggctcacgcctgtaatcccagcactttgggaggccgaggcaggtggatcatgaggtcaggagatcgagaccatcctggctaacacggtgaaaccccgtctcttgaaaaaaatacaaaaaattagtcatgcgcagtggcgggtgcctgtaatgccagctactcgggaggctgaggcaggagaatggcgtgaacccaggaggcagagcttgcagtgagccgagattgagatggcaccactgcagtctggcctgggcgaaagagcgagactccgtctcagaaaaaaaaaaaaaaaatttggggactgggcacggcggctcacgcctgtaatcccaggactttgggaggccgaggcaggtggatcaccagaggttgggagtttgtgactagcctgacaaacatgaagaaaacccatctctactaaaaatacaaaaaaattagctgggtgtggtggcacatgcctgtaatccagctattcaggaggctgaggcagaagaatcgcttgaacccgagaggcggaggttgccatgagccgagatcacgccattgcacttcagcctgggcaacaagagtgagactccatctcaaaaaaaaaaaaaaaaaaaaagggttgtggggggcgcatatacataagtagaaaggatagtataatgagcccccaggtacccaagacccagttgtaataattgtcaactcttgccctagcctgttgggtctgtactctcctcctggcccccctcccccccactgtttagaagcaaatcttaggtatcttattttatcctcaatattttgctgtacagatctgagagataagaactaattttttttttttcttttttgagacggagtttcactttgtcacccaggctggagttcagtggtgcgatcttggctcactgcaacctttgcctcctgggttcaaacgattctcctgcctcagcctcccgaatagctggaattgcaggtgcccggctaatttttgtatttagtagagatggggtttcaccatgttggccaggctggtcttgaactcctcacctcaggtgatccacccacctcagcctcccaaagtgttgggattacaggcgtgagccattttttgttttttgagatggctctattgcccaggctggagtgcagtggtgccatctttgctcagtgcagcctcaacctcttgggcacaagtaattctcccacctcagcctcctgagtagctgggactacaggtgcacaccaccacaccagattaatttttgaattaagataaggactttttgtgaaacacatacagctgcagtaccccgatgatagttgccaagtctgtgaagtctctggaacacactccagcccatgtgcaggtctccccggtgtctcctggcatagtcaccatccgaggagggctctggccgaggtgttcagggcctggctcctcagttgcccttaacagctccttcccttcccttcagaaaccaggattttggagggggagagtggactggggagatgtctgggacttgtttcaggttgccagcgggccctgccctcaagccgcctgcctgctccacggcctgccttgtagtggcccygtggcgacagccccagccaggcacggctctgccctaacccgaactctgcccrtacagggtcgtctcctaccagatccggtatgaaggaaacgtgacagaggagaccagaatcaagttcatgacggatggtgtgctgcttaaagaaatccagaaggttggttgtggatcctggctcacagagcaaggccagtgggcatgggggcgggatgctaggatgtcacctgggatatgagcagccggcaagccacctgttgatccagcactcccacggtgctgctgtgtgactttgggcgagttacttaacctctccaagctcagtttcttgatgagtatgttggtgcattccttagagaatcattttgaagcggaagttgtagagtgcatgctgacagcttagcacagtggcccgtacctagaaggtgctcgtgaaatgtgaacttgtatttttattgtgactgactcacagagttcacgccttgccgggggtgtactgaaagcctgtggtgtgcaggctctgccctgcggcgggtccagacacagccccctcttgggagcttcgagtccagttgcgtttggtgaggggcagcaccagactcggagtggggtaccagcctcaggctgagggaaaggggaggggccgctggggcttgcccttgagcgtcttcacrgtccctggcctcagaagctgcgtcccaagractttccatttgtaaatcggaaccccagctgctgcctccctagtcagcccacttgggccttggggaagcaccccatgcttcctagggagccggccattcggtcaagtgggtggcacgcgtgtccagagagcatgcagggcccgggtgggggactgctgtctggtgaagaagctgtgctccgtgctggctgtgacgtccccttgggcagggccaatctcccagggggatggcaaaggtgattccagccctcctggctttgaagccactgggactcctgggggtggcagtggatgcagtttgggtctgggtggcccctgtctgtgtggcacctgctgtccaactgcccacggccccaccccacatctcatgtccatttcccacctgccctcccactctgcgggcatctgagttgagcagctcacctctgatgaagagcagctgcccttcctctaacacwgtctcctcaagtgggagttctgggacgtgaagcggcccttgggkcttaggctggaagggtgggcctcaccccggacctccccccaggacttcctgctgctgcggtacaaggtggtgatcatcgacgaggcccacgagaggagcgtgtacacggacatcctcatcggcctcctgtcccgcattgtgactctccgggctaaggtagcgcaggaggcgggtgctggggagccccgagccctaggccccccccagctctgtcagaggcttgggcttccttcacctgttccccgttgtaccctgggctgctgccatgagcaggtaccccgagcacaaggtctccctgggcctaggtctaggcctagtgccagggctgtgaatcttggaacagcccctgtgtgatcccctccccaccgccccggtgccagcctcataaactggtgtccttctccccatccaaagcaagaggctcaggagaagtgttgatgcctcgccaggcgcaatggggctggttgatgaggcctctgggcctctgggatcagcagagcaggtgggcctgcccagccaagggccaggctcccggagctctgagaggggctccccagggcctctttctccatctccctgccccagcctgacacgggcctgctgagttggtgggtgccaccctggggcgcrgcttcatgcagtaggcctgtctcaccctcccggcggggagaggggcctgcgctccacatgtgccatgagcctggccacattcaaggccctgaaaatcaacagtgaacaagacgctgtcttgttctaacagttcctgccctcctggggcctccacttcagcaagggtggcaggcaggacgcagactcagagtatgtgagccagtgacagacaaagccgggggcagtggagggaggacacagggctagtgagggcttcacccgaaaagtgacctctgagctcaagtggaaggctgaatgagggagggagtgagyggcgtgcattgcagagcgaggagaagtctgactggaggagagcaatgcaaaggtcctgaggcgggcgtctgcctggtgccttttttcttttggtaacaagctttattgggctgtgattcacatttcatatcattcatctgttcaaatgtacaattcagtggtttttagtccgttcacagagtgtgcagccatcaccacagttttatattttgtcactcatcaatccaacaagaaaccctaggccgggcacggtggctcacgcctgtaatcccagcactgtgggatgctgaggcgggtggatcacttgaggtcaggagttcaagaccagcctggccaacatggtgaaaccctgtctctactaaaaaaacgaaaaattagccaggcctggtggcgcacacctgtaatctcaactactcgggaggctgaggcaggagaatcacttgaacccagcgggtggagcttgcagtgagccgcgatcgcgccactgcactccagcctgggtgagaaagcgagacttcatctgaaaaacaaaaacaaaaagaaacgctgtgccttttatggttttttgtggtggtggtttttgttttttttttcgaggcagggtctcattgtcactgaggctggagtgcagcagtgcaatcacagctcactgcaaccccgaccttctgggcttaaggaatccttttgcctcagcctcccaagaagctggaccatggtcactctgtgtgtaaccatttgcaaatgatttcccccagcggctgcagaattccatggtacttccccaccagcagtgtcagagcttccagtttctccacatcctgccagcacttgtcgttttccatttctgttattctagacatccctgtgggtggacagtgacacctcactgtggccttggtttatgtctttgggggccatcaggragtctagagtggccaagcagagagggtgaggtggggtccggaaggcacgggggtgaggcagacagggacggtcactgtggggcaagagaggggcctgtgctgggtgtcctgcctcccacagaggtkctttggccactccttagcttctgggtttggggtttcgtagcagcaaaggcagcaagagcttgaagcagagctcaccatgaggccattaggcattgctgagcggcctggggaccagggagctcccgggagctctctcccaccccccacagaccccagagaatcaggcagctcttccctgagcccccggcacagacactcagtcaatcttggtgtcaggtgggagctgggttgggtgggccccagtctcagcccacctgcctcatattctaccatcaaagcctgactctgaaagaccccctggaacaagccaccgccctgggagcggcaggtcccactattgactcactttctccaaggagcctttggcatccagaaaggggcagagggtgggggctggaaacggggtgggcagcagggcacccccatgccgatttcccaggcttcagacccacctgcggtcctggggcmayggtcactgagcctgtccttttgcagaggaacctgccactcaagctgctcatcatgtcggccacgctgcgggtggaggacttcacccagaacccacggctcttcgccaagccgccgccggtcatcaaggtaacacagggtcccatgtcctctgtgagcytggatggcacaaggacgccctggtgtcgggagccccctgagagacctcacttggtcacaggggggattgacagcagcttggagggggtgttagaaaccttgattyggaataatggggaaagggaaggcagccctgggccgaagctcktgycccccccactccccatgccttcctgggcgtcccacaggtggaatccaggcagttcccagtgactgtgcatttcaacaagcggacaccgctggaagactacagtggcgagtgcttccrgaaggtctgcaagatccaccggatgctgcccgcaggtgaggccctggccaggtcaggggaaagaagcctcccttcctaaaccctcgctgaaagcacgagtgtgggagggcccatctccgagtggctcagaaaagtcccttgaccctgccaggcctcggcttcctcacttattccagagtgttcatgacacctgtctggccttattccactccaaatactgtgaggcttcagcagctaccagatggtggagcttgccatctgtccccatctgataagcagaaaaacccacagggcccaggccagtgctggcaggtgaccatagacactgtaggggaacaggcacatccccccgagagtcacggatacccttcacagttctgccttgtccccatcatacctgctccgttacccacctcatgttactgaaatggatgtgacctttctgtgtgaatagattgtgatcgcttccagccagactattttttttttgagacggagttttactcttgttgcccaggctggagtgcagtggcagatcttggctcactgcaacctccacctcccgggttcaagtgattctcctgcctcagcctcccaagtagctgggattacaggtcccacactggtcgcacactgccacrcctggctaattttttgtattttagtagagatggggtttcatcatgttggccgggctggtctcgaactcctgacctcaggtgagctgcctgcctcagcctcccaaagtgctggaattacaagtgtgagccactgcacccagcctagccagagactcttgtgtgccgaatttgggcccaaggctggctttcttcatgttagggasgcaaggagccatgggggtgcttcccaacaagcttgacctcgtccttcaaggaagccgaggttgctgcttcrtgatgctctgtccttgctctgcttatggcctttcggggctcccatccattctctgggagactggggctggcaggaggtgaggctggagcttgggcagtgagccttcctgcagcctcaggtctcagggcagccrcggcgctgtcactgtcgtgagtgtggtgtgcagggttccgtgtgagcacgcttctcagggcttttgggtctgttcctgggagtgatgctgctgggctgtgcagtcgccgtgtttgttgaactccctggcggcagctgcttcagtctgggcgtgctgccccctgctcatctatgtctgtgtactcctgtcctcccccattatccctggaaccttgcctctcagagcatggcttggcaggtgcttttgctaagcaaatgtttgtgagtgactgatggataacagaggggcccattctttccayaggtggcatcctggtgttcctgacggggcaggctgaggtgcatgcgctgtgccgcaggctcaggaaggctttcccaccctccagagcccggccacaaggtaaagaggacgccccgaccagcactctgccctgagcagctgggcttggcctcgcgctccctggctggggtgcagctccygcctctgagcttctctctggaagcatcrgcacctttgccatcccccacytcaccccsgaataaatggccaccactgagtggccatgccttgarcaacaaagrgcagtgtgctggcgaccacgccggccacagacgcctttctccccaacctgcccctctcccagaaaaggacgacgatcagaamgactcggtggaggaaatgcggaagtttaagaagtcaagggccagggccaagaaggcgcgggctgaggtacgtggggggctggcagggactcctggagagtaaggctgcgttgtccrggatggcagctrccagccccatgtggctgcttaggtttaagtgtaattggaataaaatgaagttaaaaatccagttcctggtcaggcacagtggctcatgcctgtaattccagcactttgggaggcyaaggtgggaggatcgcttgaggcctagagtttgagaccagcttgggcaacatggtgagaccatgtctctacaaaaaattttttagattaatccagtgcagtggcgcatgcctgtggtcccagctgctcagaggctgaggtgggagaaccatctgagcccaggaggtcaaggctgcartgagctgtgatggtcccactgcactctagcctgggcaacagagtgagactctgtctcagaaatggaaaagaaggccaggcgtggtggctacgcctgtaatcccagcactttgggagactgaggcaggtggatcacctgaggtcaggagttcaagtmcaacctgaccaacatggcgaaaccctgtctctactaaaaatacaaaattagccaggcatggtggtgtgcacctgtactcccagctactctgggatggctgggctggcaggggctttcctctagcctctgcgtgaaggcaccgtgggtcttgtgctccrtgayggtagcgtaagcactcagccgtctctgacttgcctgttgcactaccgatgtgtcaggcagcgatccaggttcctcacgtgtgttcacacaaccctcccaccagcctgggagacaaggtctatgatagtccccaatgtttaggtggggaaattctggcaggaagagagaattatgtggcctgccccgggttgcatggcccatgggtgtggaccggggcttccatgcgagggcacctgtcttcctgcacgtgmcacgtcctcacacccaggatccctgcagcccaggtgtctatgtcttgttcgccgtaggtgctgccccagatcaacttggatcattactcggtgttaccggcaggcgaaggcgatgaggacagggaggcagaagtggatgaggaagagggggccctggactccgacctcgatctggacctgggggatggcgggcaagatggaggtgtggcccgagcaccgattcctgctcatgttcattatctctgccctgaggatgtgcccagagcccttgtgggccccccrggggccggggttctagcagctttgtccccgatgcttcctgagttcttgaaactgcctggcacgaggaggcctcaaacatttgccatgttgaatgtaatgggggctgccaaccccttgctgagggacgcaggccttcagagccyrggggtgttgcccagctccgtgtgctcgcaggggccccctgaatgcaggcagacccagtgccctgctgtgcccagccaggggctgagtggggcagcagagagtaccccagtacgggctcagcctgaccccaccacaatgctgccaggacacgaggagtggagtcaggctcscgggatccatgccaggggtttrgaggaggagattrtgcagcacaggggttcagatccggttcagggcagcagagacaagagagcccctgggaacctctcagcagttccyccaggcttggcctggctggtcccaaggggagcctctgcagcagggcaaagaaaggagctctggtggagcagcctgggggtgcagggccgctgtggccagytcctgcctgtgggcatctgtcccggcctgggtgccagtgacctctgctttccctccaggtgagcagccggatgcctccctcccgctccacgtgctcccgctgtactctctgctggccccagagaagcaagcacaggtaacygtgctgggccggtgcccagcttttggggcacttttaagggcattacagtggggttggtcaagcccttggtggtcctctccatctgctgtttgatcagcatccccagagttttgaggaatattggggtagttttggagaatagggaaccctcccccaaggcactgggccccagatgggatggcttgtccttgctacgtctccagcacaccagcctggctggctttgtccttgagcctccattccacgatttcttttctgattctggtgktttcctgccatcccttccccgaatcctaggtctttaagcctccaccggaggggactcggttgtgtgttgtggccaccaatgtggccgagacgtcgcttaccatccctggcatcaagtacgtggtggactgtgggaaggtcaagaaacgctactacgaccgcgtcactggygtatcctccttccgtgtcacctgggtctcccaggcatcagctgaccagcgagcgggcagagcaggacggacrgagcccggccactgctacaggtgggtcacccaggctcctcctcagggacgttggtgccgccttgcaatagccactgaggaacaagggaaggatgctgacccccacctccatctgtagtatgttccgtgtcctgccgggcccctgtgactttggggtgctccccagcccttttgctggctttcagatactcacactatttttttttttttttttttttttgagatggagtttcactcttgtcacccaggctggaatgcartggcgtgatctcgactcactgcaacctccacctcctacgttgaagcaattctcctgccttagcctcccaaatagctgggattactggtgtgcgccaccacgcccagctaatttttgtatttttattatatgtatttatttattttaatttttgtatttttagtagagacggggtttcagcatgttggccagactggtctcgaactcctgacttcaggtgagccaccatgcctggcctaytcgcactgtttctttttttttttttttttttttttttgagacgagtctcrctctgtcgcccaggctggagtgcagtggcgtgatcttggctcactggaagctccacctcccgggttcacgccattctcttgcctcagcctcccgagtrgctgggactacaggcacctgccaccacgcccggctaatttttttttttttttttgtrtttttagtagagatgggttttcaccgtgttagccaggatggtctcgatctcctgacctcgtgatccacccgcctcggcctcccaaagtgttgggatcacaggcgtgagccaccgtgcccggccactgtttctttattctgctactgaggtcaggggcagctcttgagtgctgtttgttaacagcttgatcaggatataattcacataccataaagtacataattttaaagcatacaatccaggagtttttaggacagtcacagagttgtgcaaccatcaccacaatcaatgtcagaacttcccatcaacccaaaaagaaaccccgtgaccactgcagtcaccccccttcttccccgccccagcctgtggcaagcatcagtccactagtttttgtctatagggatgtgcctgttgtgggcaattcagataaatgcaataaagtcatacaaggtgtggcccctcgtgtctggcctctgccgctcagcacggtgagttttcaaggctcaccccgggtggcaggtgtcagcaccccgttcctggccgtggctgaatgatatcacaccatatggatgtgccgagttttgtttgtctgttcatcagctggtggacgtttggttgttttcacctcttggctattgtggatagtgctgctctgaacactcaggtgcaaggatttgtctggctccggtttcattgctcttgcagtggaacctaagagaaccgctgggccgtatggtaactctgggtttaacttaccgaggagccaccaaactgttttccacagcagctgccccatttgacatgcctaccaacagtgaatgagggtttcagtttcttcacgtcctcaccagcactttttaatttttttttttttgagatggagtctcrctatgtcacccaggctggagtgcagtggtgcaatctcagctcactgcaacctctgcctcctgggttcaagcagttctcctgcctcagcctcccragtagctggaatgataggcatgcaccaccatgtgcatataatttgtttgtttgtttgtttgttttgtttttgagactgagtctcactgttgtcggcctgggctagaatgcaatggttcaatctcagctcactgcaacctccgcttccaggattccagcaattctcctgcctcagcctcccaagtagctgagattacaggtgcccaccaccacgcccagctaatttttgtatttttagtagagatgggggttcaccatgttgaccgggctggtctygaactcctgacctcaggtgatccacctgcctcagcctcccaaagtgctgggattgcaggcattagccacggcgcccggccaattyttagatttttagtagagacggggtttcaccatgttggccaggctggtcttgaacacctgcctcagcctcccaaagtgctgggattataggcatgaaccaccacgcctggccagcaccaacacttatttttaatatttttgttttgctggggttttttttgagagacaaagtctcactctgttgctcaggctggagttcagtggcccaagtakagctcactgcagcctccgcctcctgggctcaagcagtcttcgtgcctcagcctcccaagtagctgggagtagaggcacgtggcactgtgcctggcttcaggtgttttttttgttttgttttaatgtgtgactatttcctgtcacacacagccctgccctggtcctgagaacaggtgcccttacctcacccacccycactttttttttaatatgaaagyttcagtatttttgagcctagctctcctagtggatgtgaagtggtatcayattgtggattcggtttatgtttccctaatgactaatgaaggcytcttttcatgtacttattggccctttatgcatctttctagggaactgcctattcagatcttttgctcattttttaattaggttatttgtccttttattattgatctgtaagagttctttaggccaggcgccatggctcacgcctgtaatcccagcactttgggaggatgaggcgggcagatcacaagggtcaggagttcaagaccagcctggccaacatagtgaaaccctgtctctactaaaaatacaaaaattagctgggcatggtggcatgcacttgtaatcccagctacttgggaggctgaggcaggagaatcacttgaacctgggaggcagaggttgcagtgagccaagatcatgcccctgcactccagcttgggcgacagagcgagacttcatctcaaaaacaaaaaaagttctttatataatataatctggatattagatcctaatcaaatgtgtcattgacaaatattttctcctaatccgtgtgctgtaattgtgtgtgtgtgtgcgtgcacgtgtgtatgtaagtgtgtgtgcgtgcgtgcacgcgtgtaagtgtgtgcgtgcgtgcacgcgtgtatgtgtgtgtgcgtgcgtgtgcgtgcgtgcacacgtgtatgtgtgtgtgygtgcgtgcgcgcatgcgcgcgtgtatgtaagtgtgtgtgcgtgcgtgcacgcgtgtatgtaataaatagctttattgctgttccttttgtcagggctacatgttagttaaaaagtagaaaatttagaaaatttacaaagaaaaccagtaagaagtaactgtagttaaagtgtagagtgctatgcaccatcccctgttttaagtactctacatggaataataccttttcttttggttttgagacggagtctcgctctgtcgcccaggctggagtacagtggcrccatctggctcaccccaacctttgcctcctgggttcaagtgattctcctgcctcagcctcccgagtagctgggactacagatgcacgycaccgtgcctggctaatttttgtatttttagtagagatgggggtttccccrtgttggccaggctggtctygaactcctgacctcaagtgatccacccaccccagccttccaaagtgctgagattacaggtgtgtgccgccacacccagccagtggaataatagctaattaattttcaccaattccttacgaggcagctgcaatttgagctgcatttcacaggtgaggagaatgaggcaggaagcggtaaagcaccgtgcctgctgtcaggtsaagatccagtcccagtggcatgactgagttttgtttgttgtcccggtttctgtctgcccaggctgtattcatstgtggtttttggtgtgagttttgtgtttgttgtcccggtttctctccrtccaggctgtattcatctgcggtttttggtgacttcgagcagtttcctcctccagaaatcacccggaggcctgttgaagacttaatccttcaaatgaaggcgctcaacrttgaaaaggtcagttgctgcccccagccccgctctcagccaccccagtggaccacctccctttccctgaggcagggagcccagagctgggtctgctggtgcctggcctgcggcagctgcttacacaacagtgcatcagcaggtgctcccagggcttctgggctcctgtgaccgctgcctccccagtgctgcatcgcccgtggrcacccaggggatggctgtctggaatagaggcagcagggtcctgcacgctgttcatgtactatccgtccgtggggcgtgcagaacgtgctgccggctcttcctggctgcagccttctccgacccagtcctccagtggagggggggatccctctagggtcaccctccctccccctgctccagggcaggctaagccaggcagtgccccgtgccacgctgcgtgctgtcctgtgggcgttcagatccccatttaactgatgaggaaacggaggcagggaagtgaaggtttttgtccagggacacacatctagtaagtgacagaacccacatggtctcctagtgccttttaaacatctgtgctcactgatttttctggatgttaatatgttcaaaatcataaaaacttcagatacttgagatcatcagggagaaggtgaagcccgtcccactgtccgccatttgtgacctgtgtcccagttacgtttccaaacacataacatcctgtactttattcctgtggttttgtgaatattgtctgatatgttacacgctgctttgggggcttgattttttcacctaataaaaatcatgggtgctggccgggcctggtggctcacacctgtaatcctagcactttgggaggctgagacatgtggattagttgaggtcaggaatttgagaccagcctggctaacatggcaaaaccccgtctctactaaaaatacaaaaaaaaaaattagccagggaggctgggcgtggtggctcacgcctgtaatctcagcactttggaaggccgaggcaggtggatcacaaagtcaggagttcaagaccagcttggccaacaaggtgaaaccccgtctctagtaaagatacaaaaaattagctgagtgtggtggcacacgcctgtaatcccagctactcaggaggctgaggcaggataatcacttgaacccgggaggcggaggttgcaatgggccgagattgcgccattgcactccagcctgggtgacagggcgagactccgtctccaaaaaaaaaaaaaaaaaagccaggtgtggtgacaggtgcctataatcccagctacttgggaggctgaggcaggagaatcactggaacctgggaggcagaggttgcagtgagccaagatcatgccgttgcactccagactgggagacagagcaagactccgtcccaaaaaaaaaaaaaaaaagctgggtgcattggctcacagcactttgggaggccgaggcgggtggatcacaacatcaggagctcgagaccagcctggccaatatggtgaaactccgtctctactaaaaatataaaaattagccaggcgtgatggtgggcacctgtagttccagctactcgggaggctgaggcaggagaattcttgaacccaagaggcagaggttgcagtgagccgagatcacgccgttgcactctagcctgggcgatatagcaagactccatctcacaaaaaaaaagaaaaaaaagaatcatggatgccaagtatgtgctgggcgttcagcacgtgtgacctcaggttatcctcccagccactctaggagggagttactagtgttatcaccccattttccagatgaggagcctgagacactgagacaggcctgactgtgggtcacgtggataaaaagtgtcagggctgggctgggagctcagtgtggctgggagcactgtcgggagtgcctcccacaagtgacatcaagtccactctgtaggaactccgcagtggcttcccctggctcttgagtcagctccagagcaggccccctcctgccttcccccagacctgggttcctagcattgcctccttacctgcgtgcctgctgcaggctcaccaccccgcctctagctttattgagatagagttcaggcaccacacagtcacccattgaaagtgtgtgggtcagtagtttccagtgtgttcacaaagttgtgcagacatcaccaccgtggccattttcatcaccccagaaaggaagcatgtaccctttatctgtcaccacctcccagctccctggcccctgtgcccactcctctccatggatttgccagtttgggacatttcatgcagatggaatcctacaatgcgtggcctttgtgcccggcgtctttccctgagtatgatgttctcaagctccatccgtggtgtagcgcgtgtcgctgcttcactcctattcgcggctgaatcattgtccattttatgggtggcccacgttttgttcatgcactcctccattcagagacgcacaggttgcttccatcttttggctattgtgataaatttattcacgttattattactattttgagatggggtctcactctgtcacccaggctggagtacagtggtgtgatctcggctcactgaaacccccacctcccaggttcaaatgattctcctgtctcagcctcccaagtagctgggactacaggcgagcgccaccacacccggctaatttttgtatttttagtagagatgggggtttcaccatattggtcaggctggtctcgaactcctgacctcaggtgatctacccgcctcagcctcccaaagtgctgggattacaggcgtgagccaccgcaccaggccagtttattcatattatgcctcactgactacctgtggcccctcctggtcaaatgacgctcagtcctcatgagtataatagtctgttaaaaaccgaaaaaagcacccagcgggggcaaagcacagccctcagtgcctagccagtgcttgggacgtgtttttgagtgaatggatgaggtgagtgagtaaaggaggctttggggttccattgggacctggcctttgagagtgccccaggcccccgtgtccccactggcatgagctgagcccggagagaggggttggagggagtgcctgccacagacggagcaggagcaccrgacttgttcttggcattcaccctgtccctgccacgtctccttgtgtcccaggtcatcaacttccccttcccgacgcccccctccgtggaagcccttcttgccgccgaggagctgttgatcgcactgggtgccctgcaaccgccccagaaagcagaaaggtaaggccaagaratgcagagcccagttcctgmcccgttcagggccctctctcccttttgctgggcctgagctgcctcaagcgtggggcctcccagctgtggctccagagctcctstcasagcactgccaccaccacctccatctccagggtgaagcaactgcaggagaaccggctgagctgccccatcactgcgctgggccggacaatggccacrttccccgtggcrccccgctacgctaagatgctggcactgagccgacaacacggctgcctgccctatgccatcaccatcgtggccagcatgacggtgcgggagctgtttgaggagctggacaggtgcgaggttggcrgctgggcactcagggccaagctcagttccgacgggggctcygggctgagagtcccagctactcrggaggctgaggtagaagaatcatttgaacccaggaggtagaggttgcagtgagctgagattgtgcaactgcactctagcctgggcaacagagtgagacccttctctaaaaaaagaaaaagaaaagtgacactaagactgtgaaagtatgttgaaagyatgtttagtgcattgtgtatttaacaaaatttacttatagattatgactacrtgctaattcttagaatgaacaattatttaataatttcctggcatcctattgcgtagatctgcctttggcagcttaatgataaaaggggtcatttctgcagagatttctggaagcaacttgagtttctcaagggcttggtaagtcttcagcgttcacatcattcctcctgaaacygcctttcacgccatcagttttgaccatctctccctcagctgtgagccaggcttctgctgccaccatctctcgtccactgtgaatggtacaggcaggcccacaatgtcacttcatcgactctgtgagcctctgcatcttgtgcaaagcctgctgcttcycttagggtcaatctgcctgtgtttggaccatcttgtcagatgacagagcagacactagttgggaaggcagttaggtggacactggggaatctgttgagatctggatggtttttctttgtttatcctccaccacctcccctccccrgtcccacccaccctaaccaggaactttgctttaggccacrtcactgcatgggccattccayaccgcagccactaaccacaygtggcctcagcctgtgaaatgtggcagttacggcaacaaactgacttaaaaccttacttayttttaatagtttaaatttaaacagccacatgtggctagtggccactgtattggccagtgcagttccagacgtttccctgtgctctgcacggacagagttttaatttgaggaaatgagatcagatggtcctgtatcttttcagggtcagtgcatctgaacttcaaaagcagctttagccgggcatggtggctcacgcctgtaatcccagcacttgggaggccgaggcaggcagatcacttgagaggtcaggaatttgagaccagcctggccaacatggtgaaaccctgtctctactaaaaatcaaaaagcgggcatggtgatggacacctgtaatcccagctattcgtcagaatcccttgggggagaataatagggttctctggagaaacagaaagtggtgtcagtttcagttggggtctgaaggcccaagaaccaggagcatcgagggcagggaagacccagctcacgcagtcagcagagcccgaagtcacacctcctctgcctacttgggccctcagtggatcrgatgtggcccacacccacattgggggagggcagtagctttatgccagtcaccaattcaaagaaacacccagaaataaggcttaattagctatctgggcatccctttgcccagtcaagtggacacataattaaccattacatgtaaggtcttgaaaaccaggtgtcttggcctctgcccagatctcctggtcccagcatctctaagactcccacgtgatgctagtgtcaaggctctgtagcgtggtgactgagagctcaggtatggttcgaatctctctctgccattctgagctgtgtgaccttaggcaagtgactgtaccactctgagcttcattttctccatctggaaaatggggatgatgataatgataataattggattgttggtagaattaaatgagttaacacaagcaaagtgctttgagccgtgcctgacacatatgttaagtgttagtattattttcaggtttggaagccactggcatcattcatttattcagtccacccttggcagctatttaagcagtttgcagagttttttattacctaaaaatggtgcagtggccgggcacggtggctcatgcctgtaatcccagcactttgggaggccgagacgggcggatcacgaagtcaggagatcgagaccattctggctaacacggtgaaactctgtctctactaaacaaaaaatgcaaaaacttagccgggcctggtggtgggcacctgtagtcccagctactcgggaggctgagtcaggagaatggtgtgaacccggaaggcggaacttgcagtgaaccgagatcacaccacaccactgcactgggcgacagagcgagactctgtctcaaaaaaaagaaaaaaaaaagaacaacagtgcagcggtggctgccaatggtgaattttgagctggaccttaataccttaattacattcatcagtgaccccacaaggcctctgagcctgtcccgatgaataaaggagttccccccrctgaggccctgagcgcagccgaggccccagcccagacagtatgtatgtgtgtttgcagaccagcggccagtgacgaggagctcaccaggctgaagagcaagcgkgcccgggtggcccagatgaagaggacctgggcagggcagggggcttctctgaagctcggcgacctcatggtgctgctgggtttgtgccctgcccgktggagggtggcgggagggtcacccaggtctgggatgggtcagagagagagcatgccccctcttcgtyccccaggcgccgtgggagcctgtgartatgccrgctgcacaccccagttttgcgaagccaacgggctgcggtacaaagccatgatggagatccggcgcctgcggggccagctgaccaccgcaggtacggccccgygccggcacgccgctgcacccggcgggcaacctgacctgggcacttgaaatgtttaaaaaagtgatccatagagtccacgtttgcaaacttgctacgcaccaaaatgtatttataaccctaaatcaatacttggggagcttttccaggaacaagggaatgtgcacatgagcagggcactaacagattcgagctgccagcctgcaccctcccccaccaggtcgtcgctcggtttcaccttttccctggcgataccccctgccattttccatcaccrctgtggcctggacccctcttccctcccacatgtcccccagacccttctcatgcagaaggatgaggccttgccctggactctacctcagctcagcagcacaratacttcctgccaccaacacccagggaagcttgagaggaaggaaatgtcctccaacatatggcargaggacratgcgtagagagggcagcgtggacactgggtctcttctgggcaggccacgttcttgcacccaaggctagtggagaatttgccttccatttaagcagatcccaaggtttgatgccagaattgatggctctcttccggccgatccttctcccagcgccaggtgcatggtggtggccctgtcaccatgctctgtgtccttctggctgtggctttccagagcagccccattccaggtgcagcagcttagaattgcagtcagcctccagacagtgctggttayagtggcttggtgacattagacctttattgttgcaaggaagagaagtcacttgagtcagcagcccagggcrtttctctgctgccatcctcctgccattygctgtgccttccatcctaaggtcacctcttgggctgaggaggtagttggaggcttagtcacctctgccttccaggcaagagaagggaaggatgaggccagggcacccgccggctgtcctgttcccgtattgaacgttcccaggaattccagccgcaacttccttcttcacatcatggaccagaactgagtctgaggccacctgggtgttaggggagggctgtctcctcgaagaatgctctgctgcccaggcaggatgtggggctttgtcccaagggagaaggagggaatgsgggggyggctgcaatcctgcctgctgggggctttgggtcctgctggtggcctctggggaggggytgagacaagcaggtggctgaggctagagcactgagcatggttgggactttctaggaggtcagggcagagctggctyygggccttgccaccaccracctcactcttggttctcccctcagtcaatgccgtgtgccccgaggctgagctcttcgtggatcccaagatgcagcckcccaccgagagccaggtgacctacctgcgacagatcgtgacggcrggcctgggggaccacttggcccgcagggtccagagcgaggagatgctggaggacaagtggaggaacgcctacaaggtgcggcccccaccgcctccctgcccgggtagcttggggcacctggygaggggcaggcgggctgggccctcagggtctggggaggcttgttccytctcagctgtgggtccccactgaggaacaagtggggcttgcagtagaatcacatcttccttggttagtttctcccaacttttttttttwaataacagtttagtggagataaaattcacacagcatttaaactcttttggggttttttgtgttttctagaaacaaggtctcgctctgttgcccaggatagagtgcagtggcacaatcatagctcactgcagcctcgaattcccaggcacaaataaccttctcgccrcagcctcctgagtagttgggactgcagggggcacaccaccacctccgactaattttgttgttgttgttttcttttttgagacagagcctcactctgttgcccagattagagtrtagtggtgcgaactcagctcactgcaacctccacctcctgggttccagcaattttcctgcctcagcctcccaaatagctaggattacaggtgtgtgccaccatgcccagctaatttttgtatttttagtagagaaggggtttcaccattttggccaggctggtcttgaactcctggcctcaagtgatctgcccgcctcggcctcccaaaacgctgggcttacaagcagtgttacccaggctagtcttgaactcctggcctctaggaatccttccaccttggcctcccaaagtgttaggatgacaagtgtgacccactgcatctggcctgcatttaaacccatttaaagtgttcaattcagtgggttttagtattttcacagagttttgcaaccattatcatagttaactttagaacatttttattacccaacaaagaaaccccacatmtgtaagctgtgagtccccagttccccgtcacccccgttttcatgatcctgctttccatctgtggatctgcctgttctggacatttggcatgagtggaatcttaacatacatggcttttcatgtctggcctcttgcacttagtgtgatgctttcaagccccatccacgccatggcaggtgtcggtgcttcctttttttttttttttgagaaggagttttgctcttattgcccaagccggagtgcaatggcgtgatctcagctcactgcaacctccacctcccgggttcaagcaattctcctgcctcagcctcccragtagctgggattacaggtgtgtgccaccatgcccagttaattttttgtatttttagtagaaatggggtttcaccaacatggtgaaaccagccaggctggtctcgaactcttgacctcagatgatccaccctcctcggcctcccagagtgttgggattacaggcgtgagccattgcaccyggcacttccttccttttcacggctggatcagactccagcgtgtggatgggccgcatttcccggcagatggagcactctcccacttttgcggctggagtggataatcagattcttctcctgggttgaaagtatgcggagcccctgggcatgrgttcttccctgaccacatcactctccattctctgcagacccctctcctcgacgaccctgtcttcatccaccccagctccgtccttttcaaagagctccccgagtttgtggtctaccaggaaatcgtggagaccactaagatgtacatgaaaggtgccgaggcctgcggacagccccttgtcccccgatggtgacgctaatgggrgtgtggctgggaccctggggcagaggcatggcagcccctcccayggagggtgccgctgtaaccccagcttcctcccccggcccccaggcgtctctagcgtggaggtccagtggatcccggccctgctgccctcttactgccagtttgacaagcccctggaggaaccagcccctacatactgccccgagcgggggcgggtgctgtgtcaccgggccagcgtgttctgtgagttggggcagtgtcctgggcaacctgagcctcctgcagccgtgggcttctcggacacacggtcctgtcccctgcccccdgacgtgtgtgtctcgggtggggcagggatgggactcgggagggcagctgcaggagggtccctgtctcactggctcccaccttctagatcgcgtgggctggccgctccccgccatcgaggtggattttccagaggggattgaccgctacaagcactttgcycggttcctgctggaagggcaggtaggtggcacagcggctccagaccctcatctcgggtaccgtgggcagcagcagcccgggcctcaccccttcctgtggtctctcatcaggtcttccgcaagctggcctcataccrgagctgtctgctgtccagccccggcaccatgctgaagacgtgggccaggtactgccttcggtgggagcctygcagtgggcaggaggggtccgaggcctgaatgacctccccggggctgccaggacaaagcaccacacacagggagscttaaaacatcagaagtctgtgctcaggtctgaaggctctgcagagccacggtctgtgcagcggctctcggggagggtccgtcttgcctctgtcggcctcctgggcttgtggccacatcactccagtctctgcctccatcttcacgtggccatctctctgtgtgtctttagtctccytccctgtgttctccttataaggacaccagtcattgtattcagggcccaccctactccaggatgacctctccttaactcatgacatttgcagtgaccctctttccatataaggtcacacrctgatgttctgggtggacatgaatctgggataggggagacactgggcagctcccacagagccgccaggtgtcagtgggaggcatcctgccctcctggccctggggacttcyagctaagcagacccctgccccatcccgcccaccacctctgcttcagggctcacccttgccctctgcctcctgcttctgctctcctcctgcctgtggtccagacccacagacacctcccccttcctggggctggtggggcctatggtgcaggggcttggggcactggaggcaggcctgaaggtgcaggcaggtgccagggactcgagatggggcgtggggcacagcacccgctgctgggctgtcaggagccgtgtcagtcactcagctcacgttttccagtgtggccctgtcccaggcatgttctcggggctgggatacagacacgatctctgtcccacagcagcgttgctcggccccagagggacagagcaggacatgagtgaggcctcggtgggcagggggtggagtgcgactgggctggtcggggagagcctcactgggcagattcaaaggagccagggctgcagctgggcacaaatctggaggaaggttctagatgagacaagttgcatgcacagagcagccttggtgggcaaggaatgtggaccagaggcagccagggtggatgggaggaggtgggatctagagccttctgtcccgggatgattttttgcttttgagttttgtttgtttgcgacagagttttgttcttgttgcccaggctggagtgcaatggcgtgatcttggctcactgcagcctctgcctcctgggttcaagtgattctcctgcctcagcctcctgagtagctgggattacaggtgaccgccaccatgcccggcaaatatttttggatttttagtagagctagggtttcaccatgttagccaggctggtctcgaactcctggcctcaggtgatccacctgcctcagcttcccaaagtgctgggattacaggcgtgagccaccacgctcagccagtttgtttgtttttgagacaagttcttgccctgttgcccaggctggagtgcagtggtgcagtcatggttcactgcagcctccaactcccrggctcaaggratcctcctacttcagccccctgagtaactggggctacaggtgcatgtcaccatgcccagccagctcttcaccctcctgggtggggctggtggggtggtgatgcctgccctgctttcgggcccccagcagcagccggtctgtgccctggctgcctgccaccaacgtgcattcctgccccacaggctgcagccccgtacggagagccttctgcgagccctggttgcagagaaggctgactgccatgaagccttgctggctgcttggaagaaaaaccccaaatgtgagtttgacyagggccagggggtggragtagacaggatggggtcactgaggcaggggctttgtgctttgtgcacggtcagccctggcttggcagaaggatctggccccacggctgctggccagctttttgccacctgaggagagtccctgggcccagggtcaccctgacactgtcctccttccctcccctgcagacctgctggctgagtactgtgagtggcttccacaggccatgcaccccgatatcgagaaagcctggccccccaccactgtccactgaccagaaacctggctgcagggccgaggactggtttggggactggagggctggcagcagcctgtcaccgtgcgaccgtgaccacctggcatgggcttcgtggcctgctctcaggaagtgggtcaagccctgggaaccctcatccatgagagctcgatcccgtatgaagggtgctgccgcccgtgccatctggcccgggggtgactttttgaactgtttattatatggtggatgatgatttcatctcacgtgctrgacgctgttctgttcagtgtgctctttggactacattagtcccctgtggagcagcagggctggagatctctgcagtcccttccccgcccgccctgccagaaggccraggaggcacgtggagggcctccttcctgcaattcttccctctccagagtcagggagggctrcccagccctggcctcacagccgtcccagatgttaggtgagccacygagctctgtgttgaccttgaggggcctggctgggggcccccaggctccatgccttcttgggagggtggccgccaaygcctttcctgtgttatggcaacagggagtgggcatctcatctgcctgtggtcagctctcagacggcagggagcggagctgacgttggctgtgcttggtcaccgctgccatgccgcagaggatgcgcctagctgggctggggccacacgactattatgttggccttgaacggggactgcagagccctcagtttgtctcccttgttcctctgtggctgaggtgggagsgggagggtggggtaggtcccccagcaagaaagagggacaggagcaccccaggcaggaccaaggagtcgggaggcccctgccttctgtcctccatggtgagggcacagatgtctccccagagcccagcgctggcagaatggattytgctcctggctttgcttctgcggcttcggtggagacagttatggaataaaatgttccttgcacccagattgtgttgtggaatgcacttggggaaggacacccaggtggccagtgtgctgtcccgggacgtggcctggtggccgacctgccttcccagcactgctgtctgctttaaggaggcctctcctcactgggtttacttacctccctggctgctctcaaagcccaagcagcaacctctccccacctgccccagagccgagatggcagcccggcccttctcactctatgttcctccccaggagcccaaggcagggccatgagccagggcagcctgcagacacgtttcgcttgacccgcccggtgattgaggaggacttgaactcctcactaacatgtagaattgggctatttcccactcgaaagtactgacctccagctttcctaaaatcccaccgcacatgggctagcaattctgagatgaaagcggaagctgtcattcccaccagtgtctcaggcgccagggcagcctcctcagggacgtccctgcctcctcattgcactccacaaccacagcagagcatccacagttgtaattaggcaattcttcttaaaaaatgttatgtaattagcacaccataaaattccccattttaaggtatacagttgcttttagtgtatcacagttgtgcaaccgttaccatgacctgattccagagcatttttatagctctaaaaagataccctgtacccatcagcagtctgcccctatttctcccagttccccagctccaagccccacgaatccactttctgtctctggatttgcccgttctggacatttatctcttttgctgcttttgtttgtttgagacggagtctcgctctgttaccaggctggactgcagtggcgcaatctcggctcactgcaacctctgcctcccaggttcaagcgattcttctgcttcagcctcccgagtagccgggactataggcacatgccaccacacccagctaatttttgtatttttagtagagacggggtttcaccatgttggccaggatggtctcgagctcttgacctcgtgatccacctgcctccgcctcccaaagtgccgggattacaggtgtgagccaccgcgcctggtttgttgcttgttttttcaagaggatcttattctgtcattcaggctggagtgcagtggtgcgatcctagttcactgcagcctccatctcctgggttcaagtgatcctcctacctcccaaatagctgggactacaggcacactccaccatattgggctaaaatttttagtagcgacagctcttgctatgttgcccaggctggtcttgagctcctgaagtacttcattccttcctatggctggataataccccattgtatggatagaccacatttttatttgtttccgtcttttggctattgtgaatagagctgctgtgaacattgatgtacaggtttttgtttgtgtggatgtatattttccattctcttgggtatatacctaagagtaaaaaaaaaaaaaaaccaagagcaccattgcctggccaatgtcatttagcttttctttttttttttttttgagacaaagtctcaaaaaaaaaaaactttcatccaatttgaattaatttctgcatatatggtgtggtcaggtggtcaacattcttttgcatgtggttctcagtcccatcgccatttgtcaaagaggcagttctttccccccgaatggtcttgcgaccctaaaagaccctccctactgtctctaaaagagacattatctgtcacccaggctggagtgcagtggcacaatcatagttcactgcaacctcgaccacccaggatcaagcaatcctcccacctcaacctcctgaggagctgggactacaggcgcacaccatcacaccaagctaatttcaaaatttgtggtagaaagggtttcactatattgcccaggctggtcttttttggagatgaagtctcaactctcacccagctggagtgcagtggcactatctcagctcccgggttcaagtgattttcctgcctcagcctcctcagtagctggggctactggcgcccaccaccatgcccagctaatttttggtagagacagggtttcaccatgttgcccagggtggtctcgaactcctgagctcaggcaatacagctgcctcagccttccaaagtgctaggattacaggtgtgagccattgtgtccagtccctggatggtcttgaactccgtggctcaagcaatcctcctgcattggcctcccaaagtgcgggaattgcaggcgtgagccactgcacctggcctggcccgtcctttttatcagctgcagaacatttcacactaggtagcgctaccattgtttttaaaatcagtcccagcaatgggtacttcctaaccttgctataatgagcaaagatgtgttgagcatctttatagacaagtcatttcatacctgggtgtatatccacaagacaaatgccaagaagtgggattgccaggtcaagagacttggggattcttccctttgaaaaatggttaggtggccgagcgtggtggcttacacctgcaatcccagcattttgggaggccaaggtgggtggatcattttagggcacaagtttgaggccagcctgaccaacatggtgaaaccccatctctactaaaaatacaaaaattagccaggcgtggtggtggctgcctgtaatcccagctactcaggaggctgaggcagatccagcctggcgacagagcgagattccatctcaaaaaaaaaaaaagaaagaaatggatgaacccttccgcaggcaagcactgcctttttcttgctttcctggatgacaagagtgaaactccatctcaaaaaaaagataaaagagaaatggttaggttgtcctctgtgaaaatcgtgtcccagatcagatcacgtcaccagcctgctttattttttgttcgttttctttttctttttctttttttttttgagacagagtttcgctcttggtgtccaagcaggagtgcaatgatgtgatctcagctcactgcaacctccacctcccaggtttaagtgattctcctgcctcagcctctcgagtatctaggattataggtgagcgccaccacacccagctaattttttgtatttttagtagaaacagggtttcaccatgttagccaggcttgtctcgaactcctgacctcaggtgatatgcccgcctgggcctcctaaagtgctgggattacaggcgtgaactaccacgcccggccactgccctgctttaaagccctatgaagagtccccattacccaagggatcaaggccaactcaaacgtggcctctgagactggacctgcacggacactccactcacaccacacccaagggccaacctgctctccttccaccttccccgaagcagccctgttggcctccgcaggtgccgttccctctcctgtggtgctctgagcctaactcctgctccctctggtttctcatcttcagaggcaagcccctctagacgcctccctagggagggtggcctgcctgccacccactctggacagcaagcccagtgacagcagatcttctgtcttgcttaccatcctgggtccccaaaacatggtagggcaaatgttaaaaagtaaattgcagtgaatatttgtaagaacactggaaaaagcttccaaattaaacaaggccaggcatggtggctcatgcctataatcccagcactttgggaggccaagccaggcagatcgcttgaagccaggagttcaggaccagcctggccaacatggtgaaaccccgtctctactaaaaatacaaaaattagccagtgtggtggcaggcgcccgtaatcccagctacttgggaggctgaggcagaagaatcacttgaacccggaagacagatgttgcagcgagccaagatcgtgccactgcactccagcctgggcgacagagtgagaccctgtctctctcaaaaaacaaagcaaaacaaacaaaaacaaagttaaacaaacttcccagaaactataaaggaaaggggagacattttaccttatcgaaatcttacattgacatggtaaattgtataaacaaagttagaagatgaaagaatagatgaaaaatactgcaaaacatgataaacagcgtcatactattggatgagctattgcaatttggtgagaaaaacacaacgggcaaaggccatgaaaaaattagttgctacatctaggccgggcgtggtggttcatgcatgcctgtaatcccagcactttgggaggccgaggctggcagatcacgaggtcagacaagatcaggagttcgagaccagcctggccaacatggtgaaaccccgtctctactaaaaatgcaaaaattagccaggcgtggtggcaagcgcctgtaatcccagctactcgggaggctgaggcaggagaatcacttgaaaccagaaggcagaggttgcagtgagccgagattgtgccactgcactccagcctgggcaacaagagctaaactctctctcaaaaaaacaaacaaacaaaaaaaaactgcatctaaggtcgagtgcagtggctcacacctataatcccagcactttgggaggccgaggcaaataaatcacctgaggccaggagttcgagaccaacctggccaacatggccaaacaccgtcttgaatgaaaaaatacaaaaattagccaggcatggtggcgcgcaccggtaataccagctactcgagggcctgaggaatgagaatcatttgaacccaggaagtggaggttgtggagatttgagatcaaccactgcactccagcctggatgacagagtgagattcccatctggaaaaaaaaacacaaaaacctgcatctgcatggctggtagatacctgaaaacatgcacaccctagaaagtaggcaggaaaaaagcagagaaataattcagttctacttcctacccaacagattggaaaaattaataatcatggccatacccagtgctgagaatataaggaaaagagcaccttcatacattgttattgaatatgtaagttgccacagcctttagaaaaaaatccagcaatatttattgtttttatttattttttttttctgagacagagtcttgctctgttgcccaggctggagtgtagtggtgcaatctctgctcactgcaacctctgcctcctgggttcaagtgattctcctgcctcagcctcctgagtagctgagactacaagtgtgtgccaccacacccagctaattttttatatttttagtagagatgaagtttcaccatgttggccaggctggtctcaaactcctgacctcaggtgatctgcccacctcgcccttccaaagggctgggattacaagtgtgagccaccatgcctggcccaaaatctagcaatatttaaaataaaccaggcatggtgtttatgcgtgtaatcccagcactttggaaggctgaggtgagaggatcacttgaggccagatgttcgagaccagcctggacaacatagcgagacccctgtctctacaaaaaaaaaaaaaaagaaaaatatttgctggaggtggtgaagtatacctgtagtctcagcttttggggaggctgggaggtctcttgagccaaggatttcgaggctgcagtgagctatgatcgcaccactgcattccagcctgggcgacagagaagtacgtttgtaaaagtatccatgccctttgaccctgcattgctccctgtggacatctgccccatcgaggtaccggcgccagaaggcaaggaaaacgcatgcaccagatcactgactacaagacttcagtgagaggaaacaaaattacccgaatccctaggaggaatggtaataaagcgtgctacccctccgttaggaaatactatgcaaccacgtccagcatttgtcctgaactccatcaggctcgcacttcctctgcagcacccctggaggaagtctccagcagcttcctgggcggtggctgcacctccttcccgatctccccacgtcc

SEQ ID NO: 94120 - DNA, 13592 bp, Homo sapiens
ttttcatttgcactagaacagattatgtattttgtaggtgttgggtggactgcttataaatgtctattagttcaagtttgctaatattacatttcatgtgttttatatccttgttaatgttctgtctactttttaaattaacaagtgaggagtatgaatctccaactataaatgtgaaattatcttttttgcttcagttctctggtttcttatactgaaacctttttacacaggcatttaggatatttgtctttttaatggattgcccatttattataaaatgtcacctattttctctcataatatttcatgttttacagtcttttattaatagagtgatgcattttcttatgtatttgcattttgtatccttttaatcttttacttttaagctatatgtttatttatatttaaagtgtgtttcttatagctggcatatttaggtcttgtgtatgtcctgcatggtcatctttgccttttaattttagtgttcagaatatttatttatttgagatagtgtctcgctctgtcacccaggctggagtgcttcccaaagtgctggcattataggcgtgagccactgcacctggctggaatatttatttttactgcaattattgatatggctctgtttaagcctatttttgcttttcttttttttttatttcaatagcttttagggaacaggtggtatttggttacacggaataagttcttcagtggtgatttctgagattttggtgcactcatcacctgagcagtgtacactgtacccaatatgtagtcttttatcattcaccaccctcccagtcttctccctgagtcctaaaagttcatcatatcattcttattcctttgcatcctcatggcttagctgcttggctcctatttacaagttagaacataagatagttttccattcctgagttacttcacttaaaataatggcctccagctccattcaagttgctgcaaatgcattatttcattctgttttatggctgagtagtactccatgatatatatgtatatcaatatcacattttctttatccactcattggttgatgggcatttaggttggtttcatatttttccaagtataaattgtgctgctatagacacgcaggttcatctgtctttttcatataattctttttttttccttctgagtatatacccagtagtggattgctggaacaaatggtagttctacttttagttctttaaggaatctccatactgttttccatagtggttgtactaattaacattcccaccagcagtgtaaaagtgtttttttttttttttttttttttttaccacatccatgccaacatctattatttttttatttttaaattatggccattcttacaggaataaggtggtatctcattttcattttaatttccatttccctgattattagtcatgttgagcattttttcacatgttggccatttgtatatctttttttgagaatcgtctattcatgtcctttgcccactttttgatgggattgtttgtatttttcttgctgatttgtttgagttcctggtagattctggatattagtcctttgtcagatgcatagtgcacaaagattttctcccattgtgtggattgtctgtttactctgctgattatttctttttctgtgcagaagctttttagtttaattaggtcccatttatttacttttgtttttgttccatttgtttttgtgttcttggttatgaattctttgcctcagcaatgtctaaaagaattttccgatgttatcttctagaaattttagggcttaaggctctggatttaagtctttgtccatcttgtgttgatttttccataaggtgagagacgaggatccattttcatttttctacatgtggctagccaagtttcccagcactatttgttgaatgtggtggtcctttacccactttgttttggtatgctttgcagaatatcagttggcaataagcgtttggctttatttctgggttctgtattctgttccattggtctatgggcttattttaatattccagtatcatcctgttttggtaactatagccttgtagtatagtttgaagttgggtaaagtgatgtctcaagatttgttctttttgcttagtcttgctttggctaagtgggctcttttttggtttcatatgaattttaggtttgtttatttgtagttgttccatttgttttctcttcttttttcctcctttttctgtcttcttttagattaagttagtacattttaatattccactttatctctccttttggtttattagctattcctatttgcagtaattttagtggttgctgtatggtttacaatacgaatattcaacttatggtaactttcaaaaagtaatacaccatttccaaataatacaggaagtttagagcagtatgcttccatttactcctcctattcttgtaatattgtttttatattttttatttgtatatatggttatatagtcatattgattttatttttttcagtcaattatctcttaaacttagaaggaaaaaatacctttcatgttcatccacacatttaccatttccaataccttttattactttgtatgtattcattcatgtattcacttgacatcatttttctttctcattgatttgtgactttgtctttatcaccacttcagtaattcaatgatatgccttactgtactcttaaaaatgtgtttctctcacttggagttcactcattttatatatttaaaatttatcaaatgtgatgttgagtcattttcttcaaatattctttctgcttgccaccttctcctttgagactccaattaaccttatattagatcattttatgtagtcccacaggtcattaaagaactgctcatatatttcccgtctttttactcactgtactttaaatcttatgccagttatcataaaatgtctggaagcagaagtcctgctatgacttttagttttataaatttaaaatttaaatagttttctcaaattatgagtgtttgattttaattcatatgaggaagtaaaaataagaaaggaagaaaaatgtcacccaaacagaaaacagaacttctatacatactcacataattatttgaaccaaaacacttttgtattatgtatgcatgtcaattacctctcaataattgtattatataattatataaactaaatgtatacttatcatatgatataaattaaatattatcaaatagttgaggaaactcaatagaacaaaagaagtccaatatgaagtaataggacaaataccactgaaaaaattaaaaataactgagaaaaataattttaattggtatgttcagagcaatttaaaaggatacactgcattttcaactaaaaaggactgatctgaaaaggaagctttagaaaacaaaaagttttagaaaacagaacattggtgaagttaaaaaattcaacaaataagattaaaaattacagcttaactgctgtgaggtttatctcagcatgctagttaatgccagtaactttgcaaatgtggcaacatggtcacaacaggagagagattaagtgggcagctcagttaaatgtaaatttattgcctttttttctgtgaaaataatgacaaaactttcttggttgtccaaagcattactttgataaggaaaggacaacacatcgcaatatgttataaataaccagcctttctccttaaatccgtgcatgtgctgtatttcctatctgtgcattctttaagctatttttaatttcattctcttagaaaggagaaatcttctcaggacagtattagaatccatatattaaaggcaaagatgaagaagctagaatttaaccttaccttgaccaacattgctatattttgagtcagtagtttggaataatttgtatttaattttctgtgctttaggagtaagtttttagaagtaaaattgagcagcagatttggaactttacctaatatatgatacaattataaaattagagccagtccatttgtaaataattgtttaaaggctgacaatagaagcaagatgaatttgatttcctggaccaacttgagtgtggaaagtttgctttgggtaaaattaaattacataaacaaaacactgatgaattgttaacaccagccaatgtttacaccaaatcaaatcagttgtgctgctatagacttaagttaataaactagactggactttgtttttttagggtcactaataaaagaatgactatcatgttaaatctgactaatagttacttttcatgaatcaaagtaatgaacttaaatcatcaaaatgtctcagataatcatcattagcatgttgtcttttatacatccaagatactgtgcagtcaacatgttttttttcttcaaatcatgctcaaggcattttcatgtcttagtccaacttttaattattgctggttccaaatgcaaataagttatttttcacaggcttgtttagatgtcaagggtatgaaaatcagaaaaaaacgttcaaaatggtggttttatttatgatttttttcatcaccattatgggaataatatggccgaatactaaaaatgttattttctgtctccctgcgatactcaagattccagtgttctcttatctccctttgacctctcagagcagttctaaaaagaatcaggtagaagtcatttactccttttttttctgctgatccaattgcagaattctttttattctatgtgtacacgatattggccttggatcccaacaatggaatatgtggcatcaatgctcaggtctaatacatttcgggaaagccataaatttttataattgtgtttgaaacatgcacaaagatatttgaaatgtcaccaattaaaagaagtttgacttttgactctaattccatgaagaagggaaattgaaaaacatagttcatggaagtagaagttctaaaccaggtcgctgctgtgagtaatgcctgtaagacacagcctgagattctagtttgccctgcaagaggtccagctgctggccaagatccccttttcagtcctttctacaaaattttatctccctacactaaatttcttcatatttccttgtctttgatctcttttcatctcccttccctgagtttattttacatgagatcaagtatgtaatgattatcataatttcagcaatttgttgatattaatttatttcattctgaaacaaaaatctgaaagcataaatctcctctagctttttcattccctatctcacttccttctctgtccaaatcttctaaataccatggacaatgtgattcacagtgtcttctctttttcccattcattcccattcaatataactgaattgaaataagtctcaattcaggtatatttgcctgtgttgaatcttcctctagtcatatagtaaaaagcccatattaccattggaaagaatgaaaattggactaccaacacatgaatactaatcattcccagttgcatgagcaaagtgcttttactaccttgagtatttcatggttggtacctgttgtgctgaccaatcacaaaagagggcatgaagcagtcgacaacctccacttgggaataatcagccagaaagcaagttgagaagcataaagagcttaaatccaaatctacagtgggctaaagcacaaggtgggagagcctatggtgacttcaggcaattaggcagataggtgcagatttccaccttttaaaactgtaagctggcaggactgtgttatctcaaataacatgtgtgcttctatgcaaaacaccaaacctggtgccatagaggacaagataaatgatatttggaatctttatctgtgaaaagcatgtcatcttgttgaaacatagagacatttagccaaatagtacaacatactacataagaaaatgtctacctggccagtttggaggctgtagccacagagaagccgcttacactgcaacgatgctctcgtgtaatgtggttgccatggctrttgctggcacycttccttggtgagctggtctggtctccaaaaatgctctgggatcatctttcattgctgcaataaatgtccatggctctaacactcttcttcatgaatggcacggtggagatgtcctctatttttgaagagcatattgttagagataatacttctgctgaccttgaagagactcagcctgtcttaagtattggtggtggtattgcccaagtacatggactgacgaatgttcaagcagaagaagtagaagaattttcttcaggcttaaaggttatgtctctgaacttggaacctgaaaatgtttggaaatgacaaactgaaggaggagatattgtgaagaggacaggagccactgtagacattccagttggtaaggagctgttgggttgtgtagtagatactcttgatcatgtccttaattatgtgggtccagtgattccaaaacctatagacaagttggttagaaaaatcttggaattattcctcaaactttgttgcagaaactaagtagtctggcattaaggctttgggttgcttcgtgttagttagttgtggtccgtgtgaactgattattgacaaccgacagactggcaaaatttaaattgctattgacacaatcattatacactccaatgatctgatagaagaagccatattgtctctacattgcaacgagttaagagatsattttccagttggtgaagagacttacacatgtagatgtcatgaagtaagctattgtggttcagctgytatttctgatgttgccccacttcagtacctggcttcttattctggctgttctatgggagaatattttagagataatggcaaatgtacatttgccatctatgatgatctatccaaacaggctggtgattgctatcagatgtccctgctgctctgccgactccctgttgtgaggcctatcctggtgatatgtttcatttataatcctggctgttggagagggtagccaaaatgagtaattcctctggcagtagctccttgactgcttcaccggtcacagaaacacaagctggtaatatctgcttacatttcagcaaatggaatatccattgctgactaacagatcttcttagaaacagaatttctctacaaaagtacctgccctgtcattaatgttgttctgtgttctccattggatatgctgcccaaaccagggctgtaaagtaggaggcaggtactgtgaagctggaattggctcattattgtgaatgctgcttttgcccaatttgattctgactttaatgcagtcaaactcagcaactgtaaagctggtgtgtatctgcctaagttgctgatacaagcctggtattcttccatggctattgaaaacaagcagttgcaatctatactcatgtaagaaggctatcttgataaactggagcctagcaagatcacaaagtttgagaacgctttcttggcaaatgttatcagccaacaccaagccctgttcagcaatatcaaggctgatggaaagatcccttaacagtcaaatgcaaagctgatagagattataaccaacttcttggctggatttgaagcttttactataaattcacatcaagtatcagtttggttttgtcatttttttcctagtaatcagcttcacttataaaaggattctcatactcaaattgtatagaagtcatgttaaaaatatcagttccatgttgcttggtggcttaaaaaaataaaatgtcaaaatgcttctctggatagtaactattacattataaatcttcactgactacagaataagagaaaatggacacaaatgtaagccaatgggtttaattataaggagtaccttgtaaaacagaagatagtaacttttttcccttaaaatagcactggctctgctttcattatggaaaatagaaaaactattttatgttctttatcagtcttgtgttttagataataactataaattatttttatcatttttcttaattttatgtatttatgaggtacatgtaatataatgctgggaaaagtggggagtgaagagaggttggttaataagtacaaaaatacagtaaggagtaagctatattatttatatataatatataatcacatttatattcttatatttattgatattgatattatcatttttatttacagaaacacagtatatttcaatagtgacaaatacatggagtgaatgcactagtttcatcttttcaattttctgggtagtaaagacatgactgtcacaaaacaataaaatgtgaagcgtaagaattatatatgaagagaggttcataaatatataaatcataatattaaaatgaaatcatcagacaatatacatatttaatgacgtacaattatcacactataaaagaaaaaataggtgacctatagtccatgtaaatgtcaaattcacatttcttttatgtggccaaattattaaagcaacaacaatctatacatgctatacacactaacttgctagcaaaaacatcaagaactattgataataagctgttttctgttatttcatttgtttagacagatgtacttaatcctcatgattgtgcacttttaaacctagtttttaacaattgataaaattgtactgtatacaatataatgttttgaaatatatatattgcagaatgactacagcacgctaattcacatatgcattacctcacatagttatttcgtggtgagcttaccatctaatctcttagcattttcctagaatataacatattatctattgcacaatatggtaactattgttcttttgaacttattccttctatgtatctgaaattttgtttcctttgaccaaaatctccctaattctctccccacctgtcccagaccctggtaaccaccattctactctctacttctattgagttcaactttttagattccatatatgaatgagataatgcagtgtttgtctttctgtgcctggcttatttcacctaatgtaatgtcttccaggttcatccatgccgctgtaaatgacaagagttccttttttgttagggctgaatagtattccattgtgtatatatacggcattttaattatcctttcatttgttgatggtcacttaggttgattccatatcttgactattgtgaacaatgctgcaataaatataggggtgtagatatgtcttctaaatactgattttatatcctttggatgtatatcagtagtaggatttctgtagcatatggcatagtttcaattttttaaagaacctccatagtgtttctataacagctgtactaatttacatttctgtcaacaattgtgcaggggtcccgtttctctacatcttaactagcactttcatgttttcagtaatggcctttttagcaggcgtaaggtgatactttgttttaatttgcatttctctaataaagataagcactttttggatacctgttggccatttgtatggcttctttcaagaaatgtctatttatatcttttgcccaattttttttttttttttttttttttgagacggagtctcgctctgtcgccccaggctggagtgcagtggcgcgatcttggctcgctgcaagctccgcctcccgggttcacgccattctccgggcctcagcctcccaagtagctgggactacaggagccctccactgtgcctggctaatttttttgtttgtttgtttattgtatttttagtaaagacggggtttcactgtggtctccatctcctgacctcgtgatccgcccgcctaggcctcccaaagtgctgggattacaggcgtgagccaccgcgactggcctgcccatttttaaatcaggttatttggtcttttgctattgagttgttggagttccttatatattttagatattaacccattttcagatatatggtttataaatattttttcccattccataggttgtatcttcactctgatagtctttgtggctgtgtagaagctttttagtttgatgtaatcccactttattttttatttttttatttttatttatttatttttttggagggagggtcttgctctgttcttgggctggagtacagtggctcaatcctggctcactgcaacctccaccttctgggttcaagtgattctcccacctcagcctctagagtaattgggactacaggcacatgcaaccacacccagctaatttttgtattttcagtagagacagagtcttgctatgttgcccgggttggtcctgaactcctggcctcaagtgatcaacccaccttggcctcccaaagtgctgggattacaggcatgctccaccatgcccagccccatttgtctatttttacttttgttgctttgtgtttttggggtcccatccaaaaatcattgcccagataatgtcacagaggttttcccctaacagggaaacaaaatggatttatgtttgtaatccatgttgagatgatttttatatggtgtgagataaggatctaaatttattcttcttcatgtgggtatccagttgttccaacactgtttattgaagactgtctttttcccattgtgtgttcttggcatctttgtcaaaatcaactaattataaatgtgtgggttcatttctgggctgtattctgttccattgggctgtatgtctgtttttatgctagtgtcatactgctttgattactacagctttgtgtagtaggttttaaaggcaggcagtatgatgcctcaagctttgttctttttgcttaagattgctttggctattttgggtctttgctggttccatatgaattttaggattgtgtttttcctgtttctgtgaagaatgtcattggtatttttgtagagattttgtttaatctgtaagtcactttgagtattatggacattttaacaatatttttccaatccttcaacatggaatctttccttttatgtcttcagttttgtttatcagtgttttatagtttttagtatagagatattttacttccttcattaaatatattcctattttattttttgtaagctagatagttcactgttagtgtatataaatgcaatttattataagttgatttttgtatcctgaaattttactgaatttgtttattctaaccatttctggtagagcctttagggttttttaattgttgtctgtcggtaggggcaatttaatttcttcctttctggtttggatgccttttgtttcttttacttgcctaattgttctggctaagacttccagtcctatgttgaatagaagtggcaaaagtggacatccacgtcttacaggaatgtaggctcttaaaggataagccttcaacttttccccattgagaattatgttaactgttttttggtcatacatggccttttttcatattgcggtacattccttctaaatctaatttttttgatagtatttaggaaagaatgtcaaatcttgcaaataccttttttgcatctattgagttgatactatggtttttgtccttcatctgttaatatgatacgttacatttattgatttgtgtgtgttgaatcatcctggtatccctgggatgaatcccacttaatcatgatggatgatcttgttaatgtgctatagaattaggtataccaatattaggttttagatttttgcatctatgttcatcaggaatatttgcttgtagttttttccttccttccttccttccttctttccttccttccttccttccttccttccttccttccttccttccttccttctttccttccttccttccttccttccttttgtagtgttgttatctggttttggagaagaattgatagtagtttttcttcaaatgtttaatagaattcagcagtgggtttaccaggtcttggggttttctttgatgggaaacattaattactgaacaagtctcctcactttttttggtctgttcagattttctatgttttttttttttactctttaatcttggtatattgcatgtgtctaggagtttattcatctcttctagatgatccaagttgttggtatgtaattattcataatagtctcttataatcctttgtatttctctgctatcagttgtagagtctcccctttcatttctgtttttatttcattcttctttttccttagtctggctaaaagtttgttgtatatttttttaaaaataccaactcttagttttattaattttctatttttctagtgtctttcatttatttctgctctgacctttattatttattttcttaatttgggcttagtattttattttttgtgtgtccttttggtgcaacattgtttatttgagatcttattttttgatgtaggtatgtattgctataaagctcccccatagaactccttttgcatcatcccataagttttgataagttgtgttttcatttgtctcaataaatttttcaattttccatttaattccttaattggcccatttgttgttcaggggtatgttgtttaatttccatgtggttttgaattttccaatgctccttctgctattaatctctaattttataccgttgtgattaggaagatatctgatattattttaaactttttacatttgttaagacttattttgtggcctaacatatgatctatactggataattattcatgtgtaattgaataatgcatattttgctgcttttgcatggaatattctatatatgtctgttaagtccatttgatcaagagtgtattttaaggttaagattttcccttttttttttgtctggatgatctgtccactgctgaaagtgttgaggtcttctattactgtattgcaatctatctttccagtcagatttattaatatttgctttgtgtatttagatgctctgatgttgggtgtatatctatttgcaaatgtcatatccttttaatgaatcgactcctttatcaacatgtattattgattatagtcaaagaccttctttgtctttcttagcagtctgttttgtctgacataagtctagctattcctgctctcttttggtttctattagcatggaatatttgtccatcctttcactttcagtctttgtatatacttacaggtgaagcaagtctcttgtaggcatatttagttgtatcatgtttttaatctattctgccacaatatgtcattccattagataatttaattcattgatattcaaggtaattatcgacagtaaaaatatatgccattttgtcaactgttttctagttgttttctagagcctttgtttctttcttccttttcttgctatctttctttgtgacctagtaatttttctctagtggtaggttctgatttcttgcttttcattttttgagtatctattataggttttgctttgtggttaccatgatacgtacaaaaacatagttataacaggttattttaagctgataacaatttaactttgatcacaataaaaatgtacacttttactgtactcctcccccaatattctgaatattttattcacaatttacatcttttatattgcatataccttaattcttttcccattttcctgagatact

SEQ ID NO: 94121 - DNA, 48499 bp, Homo sapiens
  misc_feature (1)...(48499): n = A,T,C or G
aatcccagcgagggaggctgaggcaggagaatcgcttgaaccgggcagtagaggttgcagtgagccaagatcacaccactgcactccagcctgggcatcagagtaagaatttgtctcaaaaaaaaatttacatcattcctttggggtttttgtagggctggtaatggaccgtttactacgtttaaaaaaaattattaagtctttgaggaaatatttacgctttcagctcttccccaacctctcccataaagcaaacagaaatgtaaaaaggtcactttgtaaactcttaaagtgcccatagaaagctcactacctgacaccagcagttgtcctaagctgacataactcaatagaattagaaatcagtaacatgttttttcttttcttacagggaaagacaaattgagttttagcatggagttaagcaaataaatctgtagtggaggaaatacaatttctcctcaagcctcataagttcacagttgggacagatccctataacaaaagacagattaacaagagaaaaacaagtaattttattaatatatgcaacgtacatcacacaggagaaaactcaatgaaaaggtaaacacaagtagtggcttacaactctggactatatagcatcttccacaaagaatacatttcagagaagtgtgacaagacgaaggaaagcagttttaggcttccagaggcagaaactgtggaaggtaaatatatgttaagaaactaatagtttcttgtttgtagattcctctggtgctgtctcagctgattagagccatcttctcatcttggtatcaggaaagcatctttatcaaagaagtttgtatggcttgctacaggtaggaaaggacagttaaaatagccatttctgcaactactgttagtcaagcacctttagctcgaaataatcagtatgccaaatcggcatatttgggggtggcatgttcaaatttccttcagataaaaagaacagaaaggtcagaatctggcccttacatagtaactgcatgacagatgttgcacttgaaaaattgatacttggaggaacagctataaatatgtaaaaataattaaaacaagattccaaaatcatgccataaaagaaaacaaatttcagttggactaaacatctaaatgttaaaaacaaaaattttgtaacttttggaaggctgaataggactatttttatgacatttcctatacaaaaaccagaaaaagcaaatcattatgaaagattggtaaaattacgtttttaaaaattcaagatttcataaccaaaatatgaagacaaaccagactaaaaaagataattggaacatacataacagatcattagtattcaaaatatgtaatatctaaaaactgacaagtaaaaaaaacaacatagaaaaatgagcaaaaatgcctgtactcccagtgctttataggaggaggcgagatgggaggattgtttgagtccaagtctaaggttacagtgagctatgatcctgccaccacactccagcctgagcaatagagtgagatcttgtctcttaaaaaaaaaaaaaagagtaaaagatatggcctcagaaatcacacactgcatttgctcaatatcctggtagttacaaaagtcagcactgtaaaatgcaggagaaggctatactggggcatgaccaccaggaggccagggatcactggggccatctggaagctggctaccacatatataaaacaatattttgtagcgcttttaaaaaatatatttgtattaaaaatataaaaacacatgctatattatgccccctctagtggttacctctggggactctggggagggaggaacgggacaggatcaaacaggtaacaaagcaaacttcaaatgtatctaacatttgcaattacatgcatatgtgtgtctgaagaaaatatagccaaatgctaacatttattacatctgcatggtagaaatacacggattttcttgaaatcatttacctttcctatatctttgaaatatgtcaataaagttttaaggtaatgaatccaaacaaatggaaataaaatgtgcttttaataataatttatttttacacattttaaaaattgcaattttcaggagatgtaagaagaatatttttctaatactgaaataagcatatctttggtatagaaatcacaccctatgtgtttatctttaactaaaaaaactaatcaagaactatgacctaatatgttaaacaaaactattctttgcccatccatctgtcccctctcatagccccattgtggggcattagaatatagttctgtacctatctccatatctacaaagaattaagatgttgtatcaaaaatgtccagaagttatatatggtagagaattagttggcttaatcgttgacacacaacacaaaacaccaaaagcaacataagatacaggatgcaaaatagaacactgtcactaagatcaaataatacaaaaaaaatcacatcatttaaatttgatgcattgcaaacaaagtaacttctttagaattattatgtacacaacttgcaaagctcaaaaagtaatagcacagagccataaatctgataaggcactttaaagatagcaatcaaacatatacaaatatcaaatacaaacactgttaaactgcaaaagcagtaaccacagaaataaatagggaaaaaatatgcattctttctaaacagtctttccctttctgaagtaaagtctttaaaaaaaaaatcaaacaagtacaaaaaatatttatcatatatttttaaaacctatcatcaaagtccaaatctctgtaaaaaaagaatgtttttcttcaagtcaaaaaagttcagattcatacatttcctagagaaacaatgacagtcttcatgctaaatataggaagaaaaaaagctttcaattatgtttgttaactcttttattcaacaaacatttagtgaatgttgtgtgaccctgttttaggtgctggggatatagaataaagacacaatcattagctgtagacaacttagcctaacggagctggatccaccactggcaaccttaaagttacctcccttggtccttaagatgaaacgcaacttcaaagtctgccatgcttagcatcttgttgcaaaacaaataatggtctacctagtttgctactggtagcactgtggctctattaatattaaccgtctattgatgaagttaactttcataaaggattctatgaaagttcagaggcataaagtatttaaggacaaacaagtactggtccgcaacaaaaatagcatcggtattctgctttcacaaaaaccaagaaaaccaagaaaaatttcattctgagtatatacagaactgctggacagaggtcatcctatatgtgtggtacatgtacaaaatatgacataagaagtatgaattattgcagtcattattaaacaacgaagtatgccaaatcagtcatcaggtttcaaagaatcatagccttctttcaagaggtcccgccacgttttaaggaaacgtgcattttctgtacatttgaaggcaagttcttccacttgagctgatactgcagatgtggcttcaagaagtttggttaatgaaaaggctgcctaaaaaaaaaaagtcaaacataattttatttttaaaattctcatctcattttataagcaggctgaaaatagcttaaggctttgaatccaatgcccatgttattttctttcaaagtaatcagttttcaaactacagcactggctctttcacggaacctaagaaattctttaatattgagtagactttgaagaaacaggtctgctagaaaaatatccattatgtctgagatatgacaaatcagtatagttgttttctttttttttttttttttcttttttttttttttgagacggagtttcgctcgtttcccaggctggagtgcaatggcgcgatcttggttcactgcaacctccgcctcccgggttcaagtgattctcctgcctcagcctccttagtagctgggattacagtcatgcgccaccacgcacagctaattttgtatttttagtagaaacagggtttctccatgttggtcacgctggtctcgaactcctgacctcaggtgatccgcctgcctcagcctcccaaagtgctgggattacaggcgtgagccaccgtgcttggcccaggattgctgttttctatgaaaatacactagagtctcagctcaacaagatgacttggaccccttgacactaagcgccagatatatctgagagatttcatcataaataattcttactgctatttgggtaacatgggcattgacctgtgaacactttaaacaatgaaaatgtatagatcaaagaacagaaactctgagctctgacaaataacattaaaaaatcacacacaaatgcagaaaacactcagctcctggtggaaaattcacttttcagccaaacgttttcttcaccaatgatataaaataaaacagtgttcctcaataacacattagcacttcattctacatatttacttgcaatcagtttgttctgcaaaaataaaagctggttaagcactctagtcatccttaaaaaaaaatacttgcggagcaatgagataatctagttcatcccctagtttccaatctgcaggaaaggtcaggccacagaactctcccaggttacactctacatacctcattccacttgacccactcaagagaacataaaactccccttccctgtcttctcccctccagtggtgtgtgagttacggttgggaggtggggtgctagtttctggggattcgagatttaacagaaactatcctaagtatgcattctagcaatcatacaaagggaggagtcctgaactaaaccgtcaaagaagccaatccacgtgacctaaacccttcaagctgggtccagcgctaagcaggcctggggcagacaatggcattatcagctgtccctgggcaggtggccaactagaacagcaggctctaagtcccatggaaagaaatcacagcctgatctcaagtacccacagaaagccagcaaactcatgcagtgaaaactattctccgaaacccatgcaatgaaaactattctccgatgggaaaggaggaggcagagagccagcaacaggcagcgcagagctgcgtggcttcgggttactgcggatgattgaaaccagaaggcgagacaaaaagaaaccagtgaggggtggggcgggtggaaggaaaaccccttaagactcctcaccactaaatctaaagggggaaccctcagagaggggtggcactttagctgctggcatcccccccgcttcccgcccgcacgctctggggcgcagaagggccggtcgtcccgggtcatgggggttgggggaccgattccctagcctcgcgagccccgccgccgccggtcttcccagaggcgccgaggggggacgcggtcccgacaccacactcacgtctccgatctgcagctccacttcctccagctggtccaccgttgggccgctgctcctgctcggaactggccagcccaaactcactgggccgcccggggaagatgctgcagaggcgtctgaagaggagggagaagagggaggcggcgggggcggcgaagaaacctgcaactcctcagggtcggccatggggaagggttgggaccgcggaatccgacccgagaagccgaaccgacaccaactgtcttttaaccactcgcgcccaaagccgaaaggccccgcctcctaacgccagaaatcccgcccagtctcctcgtgggtctcagccccggaccacaaagacgtttcatttttcgggacagccaatcatatgagtcaattcaccttaggcaactcacggctcctgcgcgagcctccaatcgatctcgaagggcactcgtagagaaaactacacctcccaggaagccgtgtgcgtcgccccgccttctactgcctttcactgcgcgtgcgtcgtgctgtgggattcgcggacccctctggccgcgctgtggctgtttcaccgctccccggctgggacttggagtcccttatctttccctggtttggtacatgacccggaagcctcggctggccgttgcgtcatccatggcgccggcgcagagcgagaaggaggtgggaacgccgtgaagcaagagcggtcggcagagcggggaggcgaactgcagcagagttcttgctttccggcaggtgatggcgccccccgcggcctagaggtccagcgcccgccgcgagcagcggacagtcctcctgttgtgtccgaccgagagtcctggtgactttgaacatgctggtgccgctagccaagctgtcctgcctgggtgagaggaaacgggcggtggggataagtggaggagttagggcaaaagggacaaggccggtcctgggggctgtaggcacctctcgccccttctctcatcagctttctcaggctatctagggcaaaggtcacgcgctgtcagcctgttgggggaccctggcttcctccctctggggttgccccagttggtagaattaatatctaggctaaaggtcaagggcggggaaaacttgtcaacacgccctcggcatcaccaccacctgtcaacacacacacacctcggtggactcctgaactgaggcttcccaaatcctggttctaatcttcaaacctctgttggaaatggaaaaaaaaaaatcgtatttgcccagtttttctccctggtcctgacctgactttcgtcttcggagccattctagttcagtctaaagaaattgaagtctgatctgtcacatcatggttaacattcatatgttgaccaagtcacccaagtgtatctggagccagtttttctgcgttgtctaaaattaagggctgggcgtggggctcaagcctgtaatcccagnnnnnnnnnnnnnnnnnnnnnnnnnnnnnnnnnaaaaatacaaaaattagctgggcgttgtggcccactcctgtaatcccagctactcaggaggcttaggtaggagaatcacttgaacccggaggtggaggttgcagtgagctgagatcgcaccactgcactccagcctaggtgaaagagccagactccgtctcaaaaaaaaattaaattaaattaactctaagggctttatcgtgttatgggtattctgtgaaccatcgtgacagatgaagttggatggtctttttaaagttttacttaaatttttgttgttgtcgttaattcaaacagaaaagttccctaaaggatctcatattctgtcataactggcttaatttttttaaatctttagtttacttaagttttggtgatagaatcattaagtctaaatattccaaattcaaggatattcttatgaaatttcatgaaagtagaattttgttaaatttggcttccatatattaagaaattagaactttgtttaaatttcatgtcacccatgcattttttgctgcacttaatgtatggataagatggtgtttggaacgttaaagtagtcagatgctatctgccttagagcctaatttagatgcaatcagccttgggcccagtgctaaccaaattccactaccatttctgttttctttggatggcaattcattgccattttcgtagcctgctggcatgaaagaggtagacaccaatgtgccatcagtgtgactttgatatggtgatgctatgagttcagtggactttgtgacttctcttctcaaccacggagactgaatattccaatctctaaagtgagatatcagatgtgttttcagaaaaggggtaaaggttgtgacttttttttccaatcctttggagaaattcagactacacagttccaaatattctcaagaaaatcagtagctatacaagcagtagaaatagtttgtcatatgtcagtcatcagttttcagaagtaaataacttctatgcactaaactacaatgcattgaaaactaaatattttaaatattcgttatagtgtatttgaactcttgaactgagttctagaatatctttatgtatttaatatacttttttttttccaaaattgaggataggtgaatagttatctaaggcttaaaaagtgttgccaatatagtttttttgttttttggggtttttttgacacagtcttgctctgttgaccaggctggagggcagtgatgtaatctcagctcactgcaacctctgcctcccgggttcaagtgattctcgtgcctgagcttccgtagtacctgggatcacaggtgcccaccaccatgcctaattttgtatttttagtagagacggggttttgccatgttggccaggctggtctcaaactcctggcctcaagtgatcctcctacctcagcctcccaaagtgctgggattataggcatgagccaccatgcctggccccagtgctatagtttttagtatgcgtaagtaagttcatttctttgccactttaaaaaaaatgaccaaacacagatttttattgccttttcacagaaaattactctgaaaagcattaatcttttatagtaccatgtgtcaaggactatctaatatttagtcaacaaatatgtatacctaacattaggttttcacgtacaacaaggtcagtgcttttggagcatgctatctgctggagaatacagacaactaaagacatttatatttttacccttattttggtcacataaatggtttaaatttttagtctaatgannnnnnnnnnnnnnnnnnnngtctaatgatattgtaactttttagatttttatcattcttagaaaataactttgaaaaatcctagattctaaaaaaaaaattacctgttttcttcataatatttttgtgtgtggctgtaaatgctcttttttataacagctttaataaactttaataagatatgtcacaaatcatacaatatatactatttaaaatggacaattcaatggtttttagtatagtcagagttgtgaaaccatcactgcagtctattttagaacattttcatcaccccaaaaagaaactattcactcccaagccccttccagccttagacaacagttaatctactttctgtctctataaactagcctattctgaatatttcctgtacatggaagcatatactatgttgtctttttgtgactggcttctttcacatagcatattgttttcaaagttctatgtggtagcatatatcagtattcaatttcttcttattgctaaatatttcattatttggatatatcacttcttaccatttattgatcaacatttgggttgtttctactttttggctgttataaataattcagctgttggtcaggtgtggtggcttacacctggaatcccagcgttttgggaggctgagacgggcatattgctcgagcccaggatttcgagaccagcttacacaacccagtgagactgcttgtctacaaaaaaatagaaacaattatccgggcatggtggcatgcacctgtagccctagctactcaggaggctgaggtgggaggatcacttaagcctggaaagtcaaggcttcagtgagccatgatcacatcactgcattccacccttggtgacagagtgagaccctgtctcaaaaaaaaaaaaaaaaagtcagctaggaacattcatgtgcaagtttttgtgtagaagtatgttttcattatcttagggatagacttaggaatgggtcacatgaaaactctatgtttaaccttttgaggaactgccagactgtttttcaaagagactgcatcatttttgcattcccccaggagtgtatgaaggttccaatttttccacatccttgctaactcttgttattgaaaccgcccaacaggttctccttgcccactacccagacagagccaatttatcaaaacaggagaattagaatagagaaagagtttaattcacacagaggcggctgtacaggagaccatagttttattactcaaatcagtctccccgaaaacttggagactggggattttaaggataatttgatgagtaggggggtcagaaagtggggagtgccaattggtcaggtcagaggtgaaatcacagggagatgagtttgtcgtcttgcactgagtcagttccagggtgggagccaaacgaccagatgagctagttcatcgatctgggtggtgccagctgatccatcaagtgcaggatctgcaaaatatctcaagtagtgatcctagattttacaatagtgatgttatccccaggagcaatttgggaaggttcagaatannnnnnnnnnnnnnnnnnnnnnnnnnnnnnnnnnnnnnnnnnnnnnnnnnnnnnnnnnnnnnnnnnnnnnnnnnnnnnnnnnnnnnnnntttgttctgggaaagggctgtgattgtctttgtttcaaaattaaactataaactcccaaagttagttcagcctactcccaggaatgaacaaggactacttggaggttagaagcaagatggagtcagttaggtcagatctctttcactgtaataattttctcagttataatttttgcaaaggtggttttattattgcttgacttctcgactatagccatgctagtggatgtaatagtacctcatgtggctttggtttgcatttccctgatggctaatgctgctgagcatcttttcatgtacttattggccgtttgtatatcatctttgaagaagtgtctatccagatcctttgcccactttttaattggattatttgtcttttgttactagatataagagttctttctgtattctaaatataagtccattatcggatatatgatttgaaaatattttctcccattccacgggctatcttttcactttcttgatggtatcctttgatgcacaaaaggttttaattttgatgaagtgcagtttaactgtattttttgtygttgcttgtgtttttggttgttctatcaaagaaaccattgcctaaacccaagtgttgatgaaaaagccaaactccataaactatttgaagagattaattctgagccaaatgtgaggaccatgacccacgatacagcctcaggaggtcctgagaacatgtatccaaggtggctgggttacagcttgattttatacattttagggagaaaagttacaggcaaagacattaatcaatacgtgtaaggtttacattggcttggcctggaaaggcaggacatctcaaaagttcacgaatttgtgttgggccacatttaaaggcatcctgggcaacatgtggcccataggctgcaggttggacaagcttgccttaaaaggtatcagactcttagttaaatctctcctagatcaggaaaaggcctagaaagggaagagaattctccacagaatgtaaatgttcctcacaagagacagctttgcagggccaatccaaaaattatgtccaagaaatatattttggggtacaatacattgatttcctctagggcctgttgtcatgtgatgttataccagagtcaggttggagttggtatcttattgctacaaagagtctgttctgtcagtcttaggatttcaatattaatgttaatgctggtcagttatgtctaaactccaaaagggagagggtataatgaggcmtgtctgaccctctacttaccatcatggcatgaactacttttttgggtttctttggaatccccctggccaagaagagagtccattcagtggttgggggccttagaattttgtttttggtttacacaaggtcacaaagatttacactcatgtcttcaaagagttttatggttttagcaaatatagggtttgatctttcttgagttaactttttttatcaccataatctttttaactttttatcttgaaatagttttagatttacagataagttgcaaaaatagtactgagagttcccatatgccctttgcggagcttcatgtcttatgtaaccatagtataattatcaaaactaagaaattaacattgatgaaataaagttaattaaactacagattttattcagatcttctttttctgttccaggatccagtccagggcacaaggttgcctttagttggcaggtctccatagtctacttcaatttgacagttcctctgtcttttcttgtgtcccaagacctttacagttttgatatgtactggtcgagcattttgtagaatgtccctcaatctgagtttgtctgatcatttctcatgattagactgaggttaaagatttttggggataaataccacagagataaagaacccttttcaccacatcatatcagggatacatggtatcaatatgtcttattgctggtaacattaaacttgatcacttgcttaaagtgatatctgccatatttctctactgtaaagttaacatttttcactttccattctctacttgttagaagctactcaataagttcatcccacatcactcaaagggaggagagaattgaagaatttatggatatatcaccatctttttttttttttttttgagacaaggtgcttgttgcccaggttggagtacagtgacgtggtcctagctcactgtagcctcgaattactgggctctagtgatcatcgtacctcagcctcctgagtaggtgggactgcaggtgcataccaccacacctagctaatttttttactttttattttttatttctgtagagaagaggtcttgctatattgcctaggaggatcttgaactcctggcctcatgcagtcctcccgccttagctgagatttacagtcatgagccactgtgcccagccaaccatagtcttctatactttgaacctaccctaataaaatcttcgatcaaatataattcattttgacctagggagcagagtatactttttttctgaatggctttctagctatctctgcaccatttaatgagtaaccatttcttctccctaatttgaaatggtatctttattatataccatatacctatgtgtattctatttctgaactctttattctttttttaattattctatcccttctcctataacagacttctaatgaatatagcttcaaatataagtttctatatctgtcaagagtggtttcatgggaggattctttgtctttttttaatgatagggacgattatcaagatgaacagagcctgagaagggagtcaaaattgaagctcagaagggatggtatcagatggaggaatgtctctagacaacgggagagataagccttctcatccagctagaaagattaaccccagtggagaagaatatagtctgtttcactatattcattgagtacaatcaacgggagaaaagacatctcttctgctataaactgagataatgaacaaagtatgggcacaaatacagattatattagaagttactgccaaggagttgagaaaattcccatctaattgcttctgtctttatgaggtttgatgctagggtacctgccctggataaaggaaagaagaggtggagttgaaggtttgaggacaacagagaaggttcagtgaacatttttgcagataaatctttgcatatttctgttcatttccataaaatactttttgctgactcaaaaatgtatacatttttaaggatatcagaagatactgtggccaggtgcagtggctcacgcctatgatcccagcaattttagaggctgaggcaggcagatcacttgaggccaggagttcgagaccagcctggccaacatggcaaaaccgcatctctactaaaaaaaaaaaacaaaaatccaaaaattagctgggtgtggtggtgcacacctgtagtcccagatactctggaggctgaggcgtgagaatcgcttgaaaccaggaggcagaggttgtggtgagctgagattgcaccactgcactgcagcctgggtgacagagtgagactcttgtctcaaaaaaaaaaaaaaaaaaaaaaaaaaagaagaagaaaaagaagaagatactgccttaagaacctgaccataaaacaaagtttgtgcttaaagccattgacctaacacggtgattatactactccatattactctcaaagtgttcagctttcatgactaatccatagttaagcctgacatgagctaaattgaataaatttgcttattagttttaaaatatttaagatttgaaaacattgctttatgagaaaaagctattcaaagtgttcacctaggaaagattatagtatatttcactatactcattgagtatagtcattcacttatattttttcagtctactgaggaaaactaattttaaggaagataataattttcgtaatttttgtgcagcatatcagtgctttcatgccttaaaaattaagaaaaattatctacctctatgtgctayaagatggtcttcaacttctactgtgcctcgaattactacccattatactatttatccccgggataaggacaagagatgggaaggtaagtaataatttgtgtacaattcctgagacttttctggatactttgttttcattttgtggaggagagtattaatatttttcataatttaaaaacayctaataatattttgtggctttaccaagtcacatgctgcataatgacccttcagtcaacaacacgacaattataatggtaatcccttgacattataatggagctgaaaattcctatcacctagtgacatcttttagaacatagcttccagaccatcgtagctcaacacattactcaattatttgtggtgagtctgatgtaaacaaacatactctactgccagttctttaaaagtctaccatatacaattatgtacagtacatgatacttgataataaacgactgttactggtttatgtatttactgtattatacttttatcattattttagagtgtactcttaatttttttaaaaagttaactgtaaaacagacacaggcaggtccttcaggaggtattctggaagaagctaccatttgcataggagatgacagctccatgcgtgttattgtctttgatgaccttccagtgggagaaaatgtggaggtgaaagatattgatgatcctgaccctgtgtaggcctaactaatgtgtgtgtttgtgtcttaatttttaataaaagagtttaaaaggtaaaaggaaaaaaaattttaaaaagaaagaaacttatagaaaaatgatataaaaaccattttttgtacagctgtacaatgtgtttgtgttttagctaagtgttattacaagagagtcaaaaagtttaaaacatttaaaagcttataaaataaaaacattactgtaagctaagtttaatttactgacgaaaaaatttttttataaattgcgtgtaacctaagcatacagtgtttatgaagtctatagtagtgtaatgtccttgtccttcacattctcactgctcactcagtcactcaccaagaacagcttccagtcctgtaagttctattcatggtaagtaccctgtacagatataccatttttaaatattttatactgtatttttgctgtactttttctgtgtttagatgtgtttagttacatacatactattatagttgcctacagtgttcagtatagtcagtcacatgctatatagctttgtagcctaggagcaatagcctataccctgttgcctaggtgtatcataggctgtwcaattagtttgtgtaagtatactctatgatgtttgcaaaagggcaaaattgcctaacgatgcatttctcagaaagcatttctgtcattaagtgacttgtgactgtattttacacaagtaaatatttgctaaatgtataataataaatctcaaagccaagaattagtttatggaaactgaaataaagtatgtactggaacagaacctaagaatataatcatactaatacagtaatatgcttaatataattattgtgcaaaacacagggagaatttccataaataatactctaaagcacagtggatattttttaactgtcatgtgatttatcatgtgattattgggttatattaatcccagaatttttatttctcccaggagtgaacatggaaaggtttgcagaagaagcagatgttgtaatagttggtgcaggccctgcagggctctctgcagctgttcgtctaaaacagttggctgtggcacrtgaaaaggacatccgtgtgtgtctagtggagaaagctgcccagataggagctcatactctctcaggggcttgccttgatccaggtgcttttaaagaactcttcccagactggaaagagaagggggtatgaaaaattgttttttatacaaagtctaatcttttgtaattgtatttcagtaattgttcccaaattactggaatataggaaacccttttcatgtaactctatcttttttttttttctttttttgagatggagtttcactcttgttgcccaggctggagtgcaatggcgcgatcttggctcactgcaacctccacctcccaggttcaagtgattctcctgcctcagtctccctagtagctgggtttacaagcacctgccaacactcccagctaattttttgtatttttagtagagacagggtttcactgtattggccagactggtctcgaactcctgacctcaggcgatccacccaccttggcctcccaaagcactgggattacaggcatgagccaccacgcccagcccatgtaactctaagggaataattatatactttttaaattaaaaaaaaatttatatcagaattgtaatttatgatattaacaaatatttttgtgtaatgctttctacatgtatttatgtaatgggtatatgagaagataacttgagaagacctttgaatatttcttgggaggcattttgtattttgagggtatttttaaacttgttctttaagtctttgtatgattgttcttaataaagtaataattcctgggacaatgcaatatctaaagccaaagaggataacctaattttctgaagaaacatattaatatggcttcccataacctaagcagaaaaaccacaggtgtgatatacagaggaccaagtccaagttttattgtcttaaataaaatttgtatgaatttggttaaaatcttagattgtcaattttttcttctctaagatgggttatattatacctgtcctacctcctagattagattattcagtggttgtgaatatacttgcaaagatcaaaaattatataaatatctgtattttttccatatggaataaattgaattccaaaaatttcgtctgtctctcctttctgaaatatcaagctcccttaaactagaaatactttaattggnnnnnnnnnnnnnnnnnnnnnnnnnnnnnnnnnnnnnnnnnnnnnnnnnnnnnnnnnnnnnnnnnnnnnnnnnnnnnnnnnnnnnnnnnnnnnnnnnnnnnnnnnnnnnnnnnnnnnnnnnnnnnnnnnnnnnnnnnnnnnnnnnnnnnnnnnnnnnnnnnnnnnnnnnnnnnnnnnnnnnnnnnnnnnnnnnnnnnnnnnnnnnnnnnnnnnnnnnnnnnnnnnnnnnnnnnnnnnnnnnnnnnnnnnnnnnnnnnnnnnnnnnnnnnnnnnnnnnnnnnnnnnnnnnnnnnnnnnnnnnnnnnnnnnnnnnnnnnnnnnnnnnnnnnnnnnnnnnnnnnnnnnnnnnnnnnnnnnnnnnnnnnnnnnnnnnnnnnnnnnnnnnnnnnnnnnnnnnnnnnnnnnnnnnnnnnnnnnnnnnnnnnnnnnnnnnnnnnnnnnnnnnnnnnnnnnnnnnnnnnnnnnnnnnnnnnnnnnnnnnnnnnnnnnnnnnnnnnnnnnnnnnnnnnnnnnnnnnnnnnnnnnnnnnnnnnnnnnnnnnnnnnnnnnnnnnnnnnnnnnnnnnnnnnnnnnnnnnnnnnnnnnnnnnnnnnnnnnnnnnnnnnnnnnnnnnnnnnnnnnnnnnnnnnnnnnnnnnnnnnnnnnnnngggatgcaaaactggcaagaggtttatttagatttttaaaagattcccagctggccgggcgtgtaatcccaacactttgggaggccaaggcggatggatgacttgaggtcaggagttcgagaccagcctggccaacatggtaaaaccccctctctactaaaaatacaaaaattagcccagcatggtggcaggtgcctataagcccagccmcttgggaggctgaggcaggagaaacacttgaacccaggaggcagaggctacagtgagctgagattgcaccactgcactccagcctgggtgacagaaagagacactgtctcaaaaaaaaaaaaaaaaagatttctgtacatctcagacagagaaaggattcacagtgacaagttttataaaggaaatgccaaaagaaaattaggggggagttctttttttgtcatcagagtacattttatagtttttttgtatttatatttacacttgcaaatataaactaaaaacatttctttttcttcttttatttctaggctccacttaacactcctgtaacagaagacagatttggaattttaacagagaaatacagaattcctgtgccaattcttccaggtaaggtatagtgaatatgcatagaactatggaattccacagctggaaggaactacatttcatctgacgaaatttcctccttttacagacaagaactgagacccagatatttgaaggacttactcaaagctatacagctagctggtgggaaagcaggactagaactcagttcttttgtcttccagtctagaagaattgagatagccttgtaagccaagcaggaatttctaacttagtgctttaatgttgtttgtaatgtaataaattagaactctagaccaaaattgtagaaaataagttgaaagtgtgaccatcaatgtagcacttatgtagaaatacatattgattcgaaattttaaagtatttatgtttttgtaatgtcttatcaataaaaagtcagatttataaattaagcatatatttatagggcttccaatgaataatcatggcaattacattgtacgcttgggacatttagtgagctggatgggcgaacaagcagaagcccttggtgttgaagtataccctggttatgcagctgctgaggtttgtatagttttgttttgttttaatatttataggaactctctttttttaataagtggagaattttataaagttgaagaaataaatattttttaaaagccatgggattttagaattataagattagaaggaatctttaaagtatctaatccaaagagtacttgaattcctcatgttgtacccccatcaagtgattatccaacttatgattgatcaccataagggatgaaaaattgtagattgttggtaatctcttccttattttgaacagaacttacctatggttttatactatccagaacaaatctatgccctcttccaaggacaactttctaattataattattccctgctctctcttcctccctatctttactctggaatttttttttatttcccagtataggggtggtataggagttaagggaaaggtttgtctctgccctctgaaggttcaccagaaatgaactgacaatagacagagtaataggagaagaagcatagagatttatttaacatgcataagcacaagagaatgatgacccgataacccagtgaggtccaaatgcttatctacctttcakcagaagggaaggggaaattgggtgtttagcaatcttgaaaggaagtgaatgatttttagggaaaatgaatgcacccaagacacagaaattaacttgtaaatgattctctttggaatttgaatgagcctgagaggcaggcatgatcttatgaaaaagtgtttgtctaggtgtagttgcttttttctgttttcttttctgcaatagatattaacaataagatttcaggaatgggatggaagaccattgtgttctctttggcaggtccagtcttaaggtagagaatggaatatcagagaagagccgcatccagtgctttagaagagataggattgaaagacaggaggaggggaaggtcagagagaccttgaagctgctgctttggtttagcatgccagagtgccatattttagcctatcattttctgagccccaatagcagaaaggtgtgatacccttcctcacccatcataagggtcatagctgacactcctataacaaaagacagggtaacaagaaaaacataccgcatttgtttaatcaaagttttacatgatatgaaatccttcagaaataaaggccccaaagacccaggggaaaccatttttatgcttaggtacaataagaatggacagccatgttgaaatgtgattagacagaagggtatgatctaacggtagtagactgagagaggaannnnnnnnnnnnnnnnnnnnnnnnnnnnnnnnnnnnnnnnnnnnnnnnnnnnnnnnnnnnnnnnnnnnnnnnnnnnnnnnnnnnnnnnnnnnnnnnnnnnnnnnnnnnnnnnnnnnnnnnnnnnnnnnnnnnnnnnnnnnnnnnnnnnnnnnnnnnnnnnnnnnnnnnnnnnnnnnnnnnnnnnnnnnnnnnnnnnnnnnnnnnnnnnnnnnnnnnnnnnnnnnnnnnnnnnnnnnnnnnnnnnnnnnnnnnnnnnnnnnnnnnnnnntggggtacagttatatgcctttcttggtagggaaaatggagatggagaagtatggatgactttagggggatagtaggtgatttttaggggaattcagtgggcttgaagaacatacagcaacctgggacaaagtctcttgagcctgcagaggaaacaatggtttctgacagaagcctgtccaagtttattgacagacttcagtcattcttcctgcaatatgagttcagttcatgaaaactcaggaaagggaccagaagtaattgtttgcttctttggtaggcccgtattttaggaagataagggaacttcagagaacaacttcatcctgtgctttgggagagacagacgattaagagacagggacagttggccagggaaggtcagagagacattgaagcttcttcagttcagcatgtcaaagcaccatattttgggatatcggtttctgagcctcaacatcagcatgccagggacatactttttagggtattatcttaagagccccagcactagcttaaatattctcagtgctttcagccatgacggtacataatttgagttttgagttctttcagtattcttgctgcccacttctgaatggaacctcttcttaccccctttacaaagtggcacccagaatgaataaaccacttcatgtctagtgtagaactgttatcttctccattctagaaactggtcttccattaattccctcaaagtaattacttttttggcaactacatcacactattgattcttattatgcattactggggaaattattaaaaataaaatcttggccgggcgcagtggctcatgcctgtaatcccagcactttgggaggccaaggcaggcaggtcacgaggtcaggagatcaagaccatcctggataacatggtgaaaccccgtctctactaaaaatacgaaaaattagccgggcatggcggcacgtgcctgtaatcctagctacttgggaggctgaagcaggaaaattgcttgaacccagaaggcagaggttgcagtgggccgagatcatgccactgcactccagcctgggtgacagagcgagattccatctcaaaaaataaaaaataaaatcgcctgaggacccagaaaaattctcttcataaattataaaaaagaatgaaacaggccaggtgcagtgactcatgcctgttatcccagcactttgggaggcccaggtgggcggatcacgaggtcaagagatcgagaccatcctggccaacatggtgaaaccccctctctactaaaaatacaaaaattagctgggtgtggtggcaggcgcctgtagtcccatctactcaggaggctgaggcaggagaatcacttgaacccgggaggcagaggttgcagtgagccgagatggtgcaactgcactccagcstggcaacagagtgagactctgtctcaaaaaaaaaaaaaaaagggcacagtggctcacacctgtaatcccagcactttggaaggctgaggtgggcggatcacgaggtcaggagatcgagaccatggggaaaccctgtctctactaaaagtacaaaagattagctgggcgtggtggtgggcrcctgtagtcccagctacttgggaggctgaggcaggagaatgtcgtgaacccgggaggcagagcttgcagtaagtcgagatcacgccactgcactccagcctgggtgacagagcaagagtccatctcaaaaaaacaaaaaaaaagaacgaaacagttttattcttgaattaggcttaaaccaagactgatgcatatcacaggccaagacagaaatctcacccttttaaatagccaggtagatacaatccattcattacatacatgttaactgtttttacagatacaatctattcattacatacatgttaactgtttttactctaaggaaaaataaaatatctcgtttttttgttgttggtttttttgtttgttttgttttttgacaagcaggaagttacaacttagagccaaacacctacccaaattcccatagacacaggaagacaggaggcatccttcttggtgttccatttcaaagcaatggctccaaagccctaaaaaagacattcctggaatgcagtttaaaaagactgccatgtatctcagagagacaaataaaggatttacagttggaagtttgctaaaggaaatgctgaaagaaaagttattggcagcaaggaaaattcagttttttttatttgtttttacccttacagtttgtaagtcaaataaaacacgtaggtccctgtattatacttgctgctataaatttctgttttcctaacccatatacatgcatttggggtttttggacccaagtgtgggattttgcatttctccttgttaaacattgttgactggaatcggtgtcaaagtcacaggtaggtggtttgtagaatccatgattttcacttttggaatacatacatgaacacttatagtcacttgtatcacttttctttttctcgggtccttaatgattaccatcaacagattattgatctctttgccagggttttttgagggtacactgagccaaacttcagtttagtctgtagccatattctgctgttgatttgttcgttttcaggatctcaaataaaaccttcatatatatatatatatatatatatatatatatatatatatatatatattttgtgggggggtgggttcatatccattgctgctaatcttttcttgtacttctccatgcccatgctttcttacaatctgctgtgtaattgcattgtacattttgtactttactatccagcgagcattttcctccacagagaaaacagaaaccaagggttacagactattgctatttctcctcatcagaattacacttttgacctattttccccttttttcttgctccaaaaataaacttttatcatccttggtctgtcttcagcttctccctgttttgttttatttttgtttattgaatgaagtcttcactcatttgagatgtaagctttcctgacagtttctctccaccttcatgttcttcatgtgttacaggcctccatttcagattctttacacgatttgacatctgaagggcacttcttgtttaatcttactggtttccctagtaatctctctagtagtctcccccttttctttctcatcaaggttgtggcattgttttcatttcccattgtgcgagctctgttctttaatactctggaagggagtaccttaatacatgtctctttattacctgaacattttaaactctgtatttctataatctagagaagatgttcaccttctaagaaacctaaggctgtttactgtttttttcaagattattatgaattctaaggtattaataaatttgttttttatcatttttaggtcctttttcatgatgatggtagtgtaaaaggaattgccactaacgatgtagggatacaaaaggatggtgcaccaaaggtaaacctttttmatagttacgtgcttaataaagcgacaaacaacagaaagaactgtgtgggcatcaaagtgaaaccccatctctccaaaaaaagaaaacaaaattagctgggcttcgtggtatacacctgtagtcctagctactttggaggctgaaacaggaggatcacttgagcccaggagttcgaggctgcagtgagtcataatcacgccacttcatttcagcttgggtgagtgacagagcaaaaccctgtcttaaaaaaaaagaagaagaagaaagaaccaactttgacttaataaaggtcttgctacaaactgtacattaattatatgggtgttgggatgccaaggcagatagatcacttgaacccaggagtttgagaacttcctgagcaacatggtgagaccctgtctctatcaaaaatacaaaattagccagtcttataacctggtctcaaaataaataaataaataaataaataaaaatttttaaaatgtcaaaaaatgtgggtgttagaatacagtaattaatatggaatttttctttcattaaaaaatatagaagcaactttgagctaacaatggtttaggcaagtagttataatatgtttaaaaattttttaaaagataataacatacaaatatacaaacataagtcaaacacatgtcaaagattttatttcatttagttaaggagagaatcagtaagatgttacaaccagtgcaaggagaattcaaacatatacacatttataggccatcaatccactgcattaaccaaatacatcaaatgaaaatagtttccacagtttttatttctccacaattttcatttctttggacaagaatcattttgcattactatcagtaggtaaatagtgatatactttgacgtgtttgtttgtttgtttgtttgttttgagacggagtttcattctgttgcccaggctggagtgcagtggtgcaatcttggctcactgcaacctctgctttccaggttcaagtagttatcccgcctcagcctcccgagtagctgggattacaggcgtgcgccaccatacctggctactttttgtatttttattagagatggggttttgccatgttggccacgctggtcttgaactcctgtcctagtaatccacccacctcggcctcccaaattgctgggattacaggcgtgagccaccgtgcctggcctttatcacagtattcttaagcactttgacatgattttaacatcttttggtagatataaaactgattctccacctcccattcaaaatataaacctggataattttcaggttttcacatcttgtatttttgaatctgaaagcaaaaccgttagaacatagaattctcactctttggaaaagataaggaaaaaaatagcttgctgtcctataatatgaacaaaacacaaattaacatctcaatcaactaacctgcctattcaggtttatttattatccaatttcccaactagattataagctccctaaggatggagatcctggggttattctagtgcctggcataatgccaggtacctattaggtatcagtaaatatgtgtcaactgatagtttatcctcctctctgccactcttggaatagaattaggaatctacagtctcttccagcagattttctccttctcacatttcctgctttaaaagcaaatagcggcccgtcgcagtggctcacgcctgtaatcccagcactttgggaggctgaggcaggcagatcacgaggtcaggagatagagaccatcctggctaacacggtgaaaccctgtccctactgaaaaaaaaaatacaaaaaaattagccgggcgtagtggcgcacgcctgtaatcccagctgttcgggaggctgaggcaggagaatggcgtgaacccaggaggcggagcttgcagtgagccgagatcacaccactgcactccagcctgggctacagagcgagacaccgtctcaaaaaaaaaaaaaaaaaagcaaatggcaaatcctgtttgggactcctagtggtttaactgaccccatcagaatcatgtgacatcttggggctcagcctgtcctgcagtaaggcctaagaagctgttttttaacaagcctccagggattccgatgcatagccaggtttgtaaagaactgttatctcatactgcctctcagtaaaagaatatggtttttcatatattacggttcttttctatattatgactaattataaattatattttagtctaaatatttttatattttatattataacaaaattgaagcacacaaattctaccattctgatatttcatttttgtgtgttctcatttgttcaaatatgggcttatttcaggtggcagaggttgcagtgagccacgatcgcaccactgcactccagcctggacgacagagtgagactccatctaaaaaaaaaaaaaagattaaaaaaaaaaaaawatatatatatatatatggtttttaactttatgctttgcatttgtaaaaacgtttacattttgtatgttgtatttatacagatctaatagcatagaagagtacaatggagtcttagtaatttgagccccaaaatctaagtttttaaaaatagtactaccacaagattagagtggggaaaatcaaagattctgtttaaggtgttgttccattctctatttaacccactgtagctaagctttctccctgcgatttcactgaaacagctcttgttagagtcacaaatacctccattttgccaatctggtggacaggtctctgttttcccttacttgaccttctagtgggtagcacttgacacagttggattatgttttccttcttgaaacacttttttgacttggctctcttacagccttctcttggttcctatctccaatatgcatcttatcataagaattctgatttggacatttttaagttacagaggttaagtaacttggctggggtcagacacctggtaagtagtagggctgggatttgaatacaggctgtgtggctccacggcctgtcccttgaacactaaagggcatgttacctctaagaagaaacagaaatatgttcatgaatattttagttcatacagattgaattgttttataagtggtgctggggaaactatatccatctggaagcaaatagagttggaccccggtttgctggttgtttctttctggtgatttaaagatctaaaacaatacaaatcagaaatctaagagatgacagttaacaattttggtgtagggtaagccaccctaccgcaacaagatactaaaaacctgtgaaaaaacagacaaaccttttttaacttaatatataaaagttaaacacttctttataccaaagtatactataaagtctgtaaatgtttgactgtctgtaatatcaaggtgcacttaaacatcgacaagaaaaaagacaacacattggaaaaatgggtagagtctaaaaaattaacaattcatagaagaacaactccaatgaccactaatcataagtaaagatacttaaatatgtttttttcagagtccagaggttaaatgtcatttcttcaaaraggactttcctgatcactcaatctagaatagctggcttctattattctcccttgtaataccctctgctctctttcatagcacttaaacaatttgtaattatatactcatgtatttatttaatgtctgtctgtctatggctagtccaaagaaaaggaacgtatatttttttcaattcatccatgtattcccaatgcctagcacagaacctggcacattgtaggtattcattcactatttcttgaatcaaaaagaaaagatgctcaaaatagtaatcagggaaatgcaaattaaaatagtattgagggccaggcaccatggctcacacttgtaatcccagcactttgggaggccaaggtgggtggatcatctgaggtcaggagttcgagaccagcctggccaacatggtgaaaccctgtctctactaaaaatacaaaaagttagctgggcttggtggcgggtgcctgtaatcccagctactcaggaggctgaggcaggagcatagcttgaaccctggaggcggaggttgcagtgagccgagattgtgccattgcactccagcctgggcaacaagagcacaactctgtctcaaaaaaaaaaaaaaattaaaaaattaaaaaataaaatagttatcacacttgatacactagcaaaaatgtaaaaggaacagttatatctgtcactaactgtactatagggaaagggtcttatatactactgatggaaatatatgcattgcttcaggctttttggaaagtaatatgataatatcaattttaaaaaaatagatgtaccctttgatctaagagggccactcctgggaatctatcttataggaataaaagcaccaatattgtacgtgtatacaggtgtcccttggtgtgcacggtagactggctccatgaccctccaagtataccaaaattcatgcatactcaagtcccaaagttagccctgcagaactcacatatatgaaaaatcggtcttccatatattcgggtttcacatcyggtgaatattgtattttcaatcctcatttggttaaaaataartccttgtatatgtgaacccacacagttgaaacccatcttgttcaagggtcagctctatattaaatatatattcaagagtgtttrtatcttataacattgtttatgttcatgcgtaagctggaaacagtgaatggctattatccattggcagaggagctggataatctatcctgtctctctacatggactactacctagtcattaaagagaaagatttgagctatacagtgacttgaaaagatttccatgaggtattttaagtgagaagagtaagattatatgattctatatattatatatttactatgtgattctttataatattatacatttgcactgtctcttctacatctgaatcatagttcaatttaaatctgaccagaatgtgaatgtattttaaattgtcaaatgttgccatttaacatgtttttgcttttcaggcaacatttgagagaggactggaactacatgctaaagtcacaatttttgcagaaggttgccatggacatctagccaagcaactatataagaagtttgatttgagagcaaattgtgaacctcaaacctacgggattggactgaaggaggtatcctggtttgtttctgtaattttaattttgaaagatggaatttaaatttatttgtattatcaggtagtttataatactgatttaattttagttatattttttcattgtcttgaaatgttcattatgactaaaacttatttgcgatatttttcaaggggctagaagatattactgatcaaattatattactggttaagttagttttacatgttggaattgttgtatcaagtgttgcttgaagtgaatcttgaacttgtgaatatttgaatcttttttattttcattgtaatgccatctgccctgttaggattgttcttgttatccatatgctgtttgtaggatgaccacatcctacgaagaattatttttttcaaaattgtaatgtgaagttaattttctttatgaaagacacactcagccatagtatattaatctgcaacctaaaatttaattaggttatgcattgtacattttctcaatttatccattctctagtcttattttcccaaatcctaggcttattagaatgtaaatgtaaaattttcattataacccttttgcttaaatatttttgtggagctagcaatggtggcccacacccataaccccagcattttgagaggccaaggcaagatgattgcttgggtccaggagttcaagacctgcctgggcaatgtagtgagacctcatctctactgaaaatttaaaaattagccaggtgtggtggtgcacacctgtagtcccagctactctggaggctgaagcaggagaaccacttcactccaagagatcaagactgcagtgacctgtgatcataccactgcaccctaccctgggtgacagagtgagatcctatctctaaaaaaaaaaagaatatagtaattaacaacaaaaaatttattttaggttaaatctcagaaaggttcaaagtctatataaaactagattcattatattgtgaataagggtttgttttgatagattgcatatgtctgattgcacataatattatctgacttagataaaatttcagatagaaattgttcagaatttaaaatttaccagtctgaaaagagggtgaacaatttatttcaattgtkgggggcagggtagagggaataaattgctttgttggagaatacatgtccattatgaagagaccttaagtgtacagctacattaatttttacatggtgaacatatccatgtggctgtcacccagatgaagatagagaacactaccagtaccgcagaactttccctcagcctttcagtaggatttcctaatttcctataattgtataaaagtctttaccaatttgagaatctatttaatgtcttaaagagttcataagttttctgacctgtttctttaatctgactcatgctgcagtttgatataattttctttgttattcaaggtgatccacctgtattcttttttattatttttttattttttttttgagactgagtcatgctctctcacccaggctggagtgcagtggcatgatcttggctcaccgcaacttctgcctcccgggttcaagcaattctcacgcctcagcctcctgagtagctgggattacaggcatccgccaccatgcctagctaatttttgtagttttagtagagacagggttttaccatgttggccaggatggtctcgaactcctgacctcaagtgatctgcccacctcagcctcccaaagtgctaggattgcaggcgtgagccaccgtgcccagccttctttgatatttgaagtaattttgttgtattcttatatcacagtttttcacttgtaattttcataaataagacattaaacctggcaagttttatgcattgtggtgacataaaaacatttttaaaatactgcaggacttttttgtttgctttttttttttttagttatgggttattgatgaaaagaactggaaacctgggagagtagatcacactgttggttggcccttggacagacatacctatggaggatctttcctctatcatttgaatgaaggtgaacccctagtagctcttggtcttgtggtaagttatattcccattagggaaaattctgctgctagagttatattaccatcagtgttataaaataagggttttgaatctgaagactgtaaaatgctttttatttaaagctttctaattttatcaatatgtaaagtgcttatggctgctgtgtcattaagtctactaaacacacgtagcaatagcaatagtagctgctacactccaggcactgtgctggatgcttttctgagatttctaagtaagtttcataataactgtgaaataggtatatctttattttacagatgagaaaactgaagtccaaataagttaaacaacttacccatatacacccattaaataacaggcagaaatgcctgaccttgtctgacctcaaatcccatttccactgtggcatgctaccactgaaaatgaaatcagcactagatttgaacttagaactttttaaaaataccagcagtttctccttttttggcctcctacacatctttgcagtaaattacatgttgaacattacaaagaatggaaaaattagtttctgtaccttgcaactggtggcagctttatagttcagtgtcatgattagacctccatatgatacattgttaaatttatgtgttactggtgttttttgaccccccagtccaatgttcatcccatcacctttggatatttattcctgtgacttaattgtatcaaaggaaaaagatgcagttaattttaacactttggtaatgcattataaaatataaccttctatatttcttttcctctttttttctgagtgtagtttacatcctttttctttatttttgccccagttgtactgtagtatagattattagtttctttcaaattggtattgattaatgtataataaatcattacagctcctttcatagaaacataatctgagatgcttacctacagatattgttctaatttgttttttttgttgttgttcatttttattttctaatctcatgatagattgtttttctaatttggactttgagttccagagcacaaggatttcttaatatgttctaaattctcataattttgatgataataaacacatgctatccttttctttaccttttcttttccaaacagattttatacaatttttaatttacatttggattactgcacatagtgctccaaatacttttgagtamaagaaatttaacctacatgttttctgataaacattgcttacattttagcttgatttaatttgaaataaaaatgtctaattaaatataagtgtaaatttttaaggttggtctagactatcagaatccatacctgagtccatttagagagttccaaaggtggaaacaccatcctagcattcggccaaccttggaaggtggaaaaaggattgcatacggagccagagctctcaatgaaggtggctttcaggtaactcttccaacttttattttccttgtttctgtattataaattcagaattgaacatataatgtaacaaatttagataaagaataaaaacaatattggaataggaaaaagtatgtagagtttataaaactgtgtcacacaatacttcaattacaccatgaatttagttttaagaatatattaggctgggcacagtggctcatacatgtaatcccagcactttggaaggccgagttgggtagtctgcctgggcaacatggcgaaaccccatctctacaacaaatggaaagattagccaggcatggtgacgagcgcctgtggtcccagctactcaggaggctgagacaggagaatcacttgagcctaggaggtggaggttgcagtgagccaagattgtgccactgcactccagcctgagcagcagaataagactccatctcaaaaacaaaagcaaaaaataatatattgatctctagagataaattcatggacattttgtttgttagttgttttaaccagaaaataaaaactgtaatccataatatttctctgttccttaactgccaggaaactcaaaggcaaatttagttttcagcaaacataattcattcattccaactacctagtaacattcatgccttttaggttacctctgttaagcttttaccttaattgtcctatttttgtatacattcaaaatcttctcaaatataatgtattcagtatgtattaaacaatgaaataagacctagtagctaattgtcataaaagctgttaatactgttgtagaaatgttatcatacaggtaagatgatctaaaaatgtgctctaaagcttgtaccaaattatttggagcaagttctttaactttggccttaagagatcatctgtaaaataaagatgatccctctgtctctaatattctaggaatctaggactatcttagaaattggatttctttttaaaaatttattataaaagtaacagataataggaaaatttggggaggagaaattgccttatctttaaaagtgaggttctaaatactttattactgtaatagtatttcataaactcaaaaccatagctacattataaatataatcactagaatcttaaaataatgctgtccccaaagtctgtcatgagattacttctcatgagattgtttttgtttctagagtagtaattcctttggtagaaatatgtattgaattacataactgtattcaagcctattaaacttttaaaaataatgtccataatagttactgtcaatctaaccctactctaatttataaaggtttcagtatattcaatagtacacccagatttttattgaaaaccatctaccttgtgtacttaagcatgtcaaacatgtcaaatgatttgcaaattgacaggagatgactctcccctccccccaccacacacacacacacgcacacacacacacacacacacacttacttttcacctgaattttctgatttcattggccagagattcagaaacttatttccagttaaggtcttaaagaccttaagaggcaacaaagactatactttcagggatcatttctctagttcaatactacagaagtttctctgaaggtgtagcaagcaccagaaaccacgaggaaagtgcagtattctctcccaagtgtgatgccgcccgtctcttgatgttgctttgctcagctgccattcggcattgatgattgttttatccttccttaggaagagtgagagggaaaggatgcagtccaagtggctcccatttaggtaaagaaaaagaagaggcaacaattcgaaacattcagttttgtttattttgagctaacaaatactgtctaacttttttctccttcttcagctgactataccaaaaatcatcttcccctagtaggtttctaattacttgtagccctagtttaatgaatgtcccaaacaaggtgcgtagctgctagtaacccagcccacccaaggtaggatcctcctagaacttaaaaacatacattttccttgggcgtaatatttttattcttaggatttaagcacctattttggaagaacttgcactcatagtttatatccttttattaaatttcacattcttctggttcttgaatcgaacttggtgtcaacaaagccacagccttatttgagaaaagcattgtcatcatctaagtccctaatctttatctgttttcagctagtagcactccagatagcacctcctccccattgtctgctctgtggtcctgatttaatgctcttttatctaagtggtcctaatcctgagtttggtctgagaaccacagtcataaattcattccccacatatactgtgaaaggacctgggccctgatccttctctcttaccagcattccttctgccccctagttttgcttttcaccactattccctcacagaattgtatcactgatgagagctgtggcgacagagtgctcaccatgtctcttttgcagttggtgtcaatagttttcttgttagctccctcctctgagtccctcttaataccatcagccaaatgtaccactcaccattttctcaacaaagaccccatggcttactttaggaaatcctcagagaagaaaaaaatacagaatgtggaaagaacaacgctgcttggctctcttcttttcaaactataagagtacattttcccatgcaaacaatctatagttcagttgccatattgtgggctacatatggacatttattgtctaaactgaaaaatatcccacccttattacattgttttttttaatcagaaatgtataccaagatccaaagaattgtctttatctattttattttggaaattcagcttgtccttaatcaaaatctattgtttagggtagtagctagttgcagtggtgccatgattagagcataggtttctatccctagctgtcaaagtaaaataaagagggtgtatagtatcctttgtaagtcttgtattaccccgaatgcatgtaaaagcaaatcacaggttttttttttttatatgccctttgaaattttcaggtccacttaattttggggggagagaggatacaatgtgatatttccatacatgtgtataatgtttaatgatcaaatcagggtaattagtatacccatcacttcaaacctttgtcatttgtgttggtaatatttaaaatctttcttctatttgaaaaaaataacaaattattctttattatagtcactctacagtgctatagaacaatagaacttattcctcctatttagctgtatttctgtatacattaaccaatctccatatcccgcccccacgccccgcatccctttctaccattcccatcctctagtagccactgttctactctccacttccataagatcaactttttaagtttccatatatgagtgagaacatagggtgtttctctttctgtgcttgactgacttaacatgtcttccaggctcatccatgttgtcacagatgacaatatttcatttgttcttccagctgaatagtattccattgtgtatatatataccatgtttccttgatccattcatctgttgatggacacttagtttgattccgtatcttggcaattattgtgaatagtgctgcaataaatatgagagtgcagatatctcttccacatactgacttgctttcttttggatatatacccaatagtgggatggctgggtcatatgggtagttctatttgtagcttttttaaggaacctctatactgttttccataatggttgtactaatttacattcccaccaacartgtgtgagttttctttttcccacatcctcaccagtaagttttttgtctttttgataatagccattctaactagggtgaaatggtatctcattgtggttttgatttgcaagcaaatcacaatttagataacagcattcaggtttagagaatattttaactatgacatggatatgtgtaaataaaacattctatttaaaacatattgatgcttcagtcataaatctgtcccatgtagatcagttatgaggatggaaaaagaaaaactctcacagaaaaatagtaatagtcttaatcctcactcttagggcaggaagaagaaaactgcccttgctctgttttattcctttgctcaattcattttcatgtatttatttttcagcctttccctacagctctagaatactttaagactgatttggagtattctgttgttcttgtttaatatgaactaacaaatgtattctgaatctttgtttcctcagtctataccaaaactcacctttcctggtggtttactaattggttgtagtcctggttttatgaatgttcccaagatcaaaggtactcacacagcaatgaaaagtggaattttagcagcagaatctatttttaatcaactaactagtgaaaatctccaatcaaagacaataggtaagaaattcctgtgtaaagtatacaaaagaaaattgctgggttatgtgtatttcaattgacattaaaagatttgtattgcatctgtcactttatagaaagtattaataagcatgctatgcaaagaaaactacatggcttattctcaataattacagtcagtgattttttactgtaatgttctgttttattcacatcaaaaaagtagaaaagtaccagtggtagccagccacggtggctcacgcctgtaatcccagcactttggtaggctgaggcgggtggatcatctgaagtcaggagctcgagactagcctggcccacatggtgaaaccccgtctctactaaaaatacaaaaaaattagctgtgtgtggtggcgggtgcctgtaatcccagctacttgggaggctgaggcagaagaatcacttgaacctgggaggtggaggttgcagtgagctgagatcgtgccattgcactccagcctgggcaacaagagcaaaactccatcccccacacacaaaaaagaaaagaaccagtggtgtcccacctagttagaaactattacaaatatgacagtactgcatttatattgcatacatgtaatacacacaattaagatacctcccaaatacctaagtatcaatagaacaaacacctttacaaaaggcagaattagctacctattctttagcaagctttgtaagtataggcctatgactcttctgctgtggtggagagaaacagccagcacttatacctccrtaaagctttaatctaaaaagaccctttaccaactccagccacactggcttctttacagttcccagaacatgccaagcactcccacctcatggtctttgctcacggctggctcctttgttctctttccctttgtttaaatagcactcacagtggccctgccttgaccacaccaattaatgcacaacacacagcacacacccagttccccctgcatggccttttctagcgcattttccaccttttggtacattatattacttacttrtttatcaacttttgtcttctgccacttggatgaaaactccgagactagaggtattgcttagtgtgaatcctacatacctggcacacggtagcgactccatagatatttgataaatgagtcttaattcttagaatccccagtaaatgttcctctagttagaggtatgtaaccaggttatgccttcaaatctttgtaggaatggaggcctagcgtggggagatgaagtggaaaacagaaagggcaaagggtactacttcagggagaatggaatagccaagatggagtgcagtggctgggtagaagtttttttctaattttcttgtcaagtatcgttccttgttggaccaccagccatacttgaactgtatcatgtgtatatagtaccacacatagataatactggagccagtatatcaccaaagactagattgagggttaaagcctaaagaaaaggggagtggagccagaacaggaaacaatgactggaaaaagtagtcatgtggagtccaccaaaagccgtaagggaaccaatttgtcctctttattaagtgcatgcaccaagttttctctatgaagtggtgggtttgtttttgtttttagagacagggtctctctctgttgcccaagctggagtgcagtgctgcaatccttggtctctgcaatctcaaattccttggctcaagcagtcctcccactttggcctcccaagtagctggaaattacaggctagagccactgtgcccagttctgtcccttcttctaaggataccagccatattggattagagacccactgtactgtagtagacctcttcttaactaattatatctacagccactaataaggtcacagtctaaggtactggaggttaggacttcaaaacctattttggggggacatatttcaacccatagcaggtagaaatagtttgagttgtaaattatgaaatttcttcactcttacaggtagcatgaactttttatcttaaagcttctttctcggtttcactaaaatttgaaactaattttccatgctaccaatgtaagaaatcaaatgccttactgcctgttaataacatatctatatctaatggttgtctttttggaagatgccaacatttatacatgaaagagccttcactgtggaccatgttttaaaaaattacttaagattcactcatcagccaggtgcggtggctcatgcctgtgatcccagcactttgggaggctgaggcgggcatatcacttgagcccagcagttcaagaccagcctgggcaacatggcaaaaccctctttctaccaaaaacacaaaarttagtagggtgtggtggcgtgtgcctctggtcccacctactcaggaggctgaggtgggaggatggcttgaatctaggaggtggaggttgcagtgagccatgatyacaccactgtactccaacctgggtgacagagcaagaccttgtctcgaaaaaagaaaaacttcactcatcagctatcaaagtagcaaaatacttagcgtattttacacacatttgggcagtttcgcannnnnnnnnnnnnnnnnnnntttaataaaaggactccatgtaactgaatatgaggacaatttgaagaactcatgggtatggaaagagctatattctgttagaaatataagaccgtcctgccacggagtactgggtgtatatggagggatgatttacactggaatcttttactggatattgagaggaatggagccgtggactctgaaacataaaggtaattcaaacaagagtatgagtgacatgatcattaaaaattcatgaatgggatctgttaattagagaaagtgattgttttaatgttttcaacttggagaaattataaatttagtgtctaagaacagtatattattacttgagggctagtcatatttctttggtgtgataatattttgaagtttttatacaaataggcttaagaaaaagtacttcaaaatcatattttgttaagcatttccctcaaaattgttgaaggttctgactttgaacggctcaagccagccaaggattgcacacctattgagtatccaaaacccgatggacagatcagttttgacctcttgtcatctgtggctctgagtggtactaatcatgaacatgaccagccggcacacttaaccttaagggatgacagtatacctgtaaatagaaatctgtcgatatatgatgggcccgagcagcgattctgtcctgcaggtaataatttccatytattcctaaatatttgctttaaacattttaggaatgtgattttgttcttttaaaaaatgatttctgtatctccttccattccttagaaattgtaaatgacttcatccagcttcctttaggaaacatacttttaactactggttttgttaagcctagttcagataacatttctcaaaaaaaaaaaaaaagccctttgtctacactcagactaagatgaagattcttgaaaatgaaatacctctctttgcaggttcatgtgactatttaaagtcatttctgtcatggcagctcatctgtatgtatttgggtgcatgtactagaacagcacattatgattacattcagtccaaggaatgctctgaaactttaaattcaccatgaatattctttcagtgctgagctttcaactgaaattacagtaataggaaccaggtctcaaatgatatggtagaacaaaatagtattccgatactcgaaaagtagtacattcacaaaagaagatacactgtgacttggtcttttggcttttgtcattacagtgggttgaaaactccctgaggttaaatttggttttttagctgtaccgttaggctcctcttacccccagtcacccacggtctgaaaataagaaaattccagaaacaaataattcttgagtcttaaattgtgcacgttaagttttaaattgtgtaccattcgggcttgccccaccctgaatgtgaattatccctttgtccagcatattcacacctaacattcgttatgttacttggtagccatctaagttatcagatttactgtcacattatcatacttgtgtccagtaaccctttagaaatatccccacaacgcaagagtagtgatgctgacaattcagagatgccataaagtgcttcctttaagtgaaaggagaaagttctctataaagagaaaaaaatcctatgctgaggttgctaaggtctatggtaagactgtatcttctgtgaaagaggaaaaagaaatttgtgcgttttgctgttggacctcgaactgtagaagttatggccagagtgtggcaagtgcttccttaagatggaaaaggcatcacatttgtgggtgaaatacatgaacagaaacgtgttctgactgacaatstaagttgagtactacctgaggtttcaggcgtctactggggatcttggaacttgtcccctgtgaatgagaggatgactgtgaataagggaggacttcgaggttgtgtggaactcaracactcagtgtcgagtacccttgatagtgagacaactcagctgaataccgctgtacctccttttattatgtacatgtaatttacactcacatcaatagcaatgcaccaaggtcttcataatctctatgggtaagcattcagaaagcaacctttaaggtttctgtggctactctttccttaatttttacttttgaatttaaaaattttttaaagttaggcacttcaatattatttatttttacttttcaggagtttatgaatttgtacctgtggaacaaggtgatggatttcggttacagataaatgctcagaactgtgtacattgtaaaacatgtgatattaaagatccaagtcagaatattaactgggtggtacctgaaggtggaggaggacctgcttacaatggaatgtaaactgcagctagccagtttctttcaagtatggcaagctaacgttaaaatgtttagagattaacagatttcagaatgtctttctgcatattactgaacagaatagtcacaaaatgattatcaaataaaaattttatmctatatgtaagattgtcccataaagaaattacgggtattgcttttaaataacctttataagaatgcagcatcttcctacctcttcagttcttcagagattcagtaccaagagcaaaattcactactggactttacatttgacttgccaaagttaagtaatcaaatataaaaatgaatatatattctagactaaagttttattgaaacacagccatacccattggttacacattgtctatggctaattttgaattacaactgtgcaggtgagtgggtgtgacattacatggtctacaaagcctaaaaactttatgatctggcccttgcagaagaagtatgcccatccctgaacaagtttgtgtgtgtgtgtgtgtgtgtattatctataagtatgaaaacctagcatcatccaccatggatacatcaaagaatcgaaggaaacaatatacaaacttaagctctcatctctttattcaataagatgtgtctttacaagtttaaaaagactggacaccattattttttatgaataatgcacataaccattttaaaaaacattttacttggccgggcacggtggctcacacctgtaatcccagcactttgggaggccaaggcggggtggatcacaaggtcaggagttcaagaccaacgtgacgtgaccaatatggtgaaaccccatctctactaaaaatacaaaaattagctgggcgtggtggcacgtgcctgtaatcccagctacttgggaagctgaggcaggagaattgcttgaacccgggaggcagaggatgcagtgagccgagattgcgccaccgcactccagcctgggtgacagagcaagactccatctcaaagaaacaaacaaaaccactttacttactgtattgtgacatgtttattaagcatgaacccctatcagtactcctaaactgtaaacagtaaggaactaaggtgtcaaaagaaacacattagggatcatattcatagacaaaaacctttacattttcttattgcatttatacaatcaacacacaataagcaaaactgaatcctttctaagcaaacatttttgcatatactgccttctctttatctttctgtgcctttatcttttgtttgactttcagcaattctgcctggatagctgtaaaataaatatgcaatgtgagttatttctcaaaatatccaaaaaattatggtgactaacaaactattttaatgttaactaccccttgaaaaaacttctctacaaagtaactaagccctagtaacagaaaatctgagcaatcacacaaacacagaaatgaaacgtaattttagaggatgtcaactgagagaactcaagtacatcaagatttgccttctgcctctacattagagaacagtaattgcttcccttgtttcattttagtaataagagaccaaagacattttgtaatacccagatctagtgtcactattcatagttggtttatttgaaaaacaagcttatttttgtcatagtttcctaaaacatataaccagtacatcaatactaaggttatagccacattcaacttgaatggtcccaaatgttaaatttaccatgaatactgtgtcttacaatgctgagctctcgactagactaaccagaataggaacacagtctcaaaggataccataagacaaacagtatttagacatataaaaaactacagagatgataacttgaagaataaataacgtgaaaaactactatattcttgaatgggagtagaatgtaagctctttgagggcagggactttgactgtcttgttcattgctatatgataatgcctggcccaacagcaggcattctgtagtgtctgttgaacaaacatctaaaatctggcaaagtgaacaatggttcctgaggataagtatttaaataacaaaattaactttcactacaaaagctgccaacttacctttatcttctggtgctatcccctgagctttcttaagatcagcctttaattggaaaaaaacatttaagttaggtgtatgatttataaaggtagttgtctattttaaaaaattaaacatttggaacaaaatttaccaatgcttgatcatattcttttaatccttgccatccttgagctctgcggtacaatgctttggtatttgatgggtctagttcaagagcctacaaaaaagtataaagctagtatttatatcaaagtattaagcttatatgccagatttcaattcattgcctatcaactccaaacccatccttcactgctctgtgaaaatggagctgaaacatgcaaatagctctcctctgccagtgggcactaagttttgtcagcagagggcactgaatggacatggaggagaaagacatttctctagtttccaatatgctccccactgtggtttcaatctcccgaatgggcctgaactaacacttttaagataaaatcattttgaagaaacatttgtatacactttttacttgaattataagttttttaggaacattaataacttaataactcttaagttataaactcttaagtttttgttttttgtttttttaagacaaggtctcactctgtggcccaggctggagtgcagtggcctgatcacagctcactgctgcctcaaccccccaggctcaagtgctcctcccacctcagcctccaagtagctgggactacaggtatgtgccaccacaccagactaatttttttttttttttagagacagggtttcaccatgttgcccaggctggtttcaaactcctggaattaagcgatctgcccgccgccgtggcctccctaagtgctggaattacaggcatgaaccaccatacccaacctaggttcttacctacaacaggtcttttaacctaagagactttatgcatcaggtctctcccctagaacaaacattttaaaattatcttttgtttatgtaacatcttttaatggccaatactcagattttacctgcctcacaggtcaaaaagagatcgaggctgggcagagaggctcttaactataataccagcactttgtgaggccaaggcgggtggacagcttgagcccaggagttaagagaccagcctgggcaacacgtcaaaaacccatctctacaaaaaatttaaaaatcagctgggtatggtggcaagggcctgtagtcccagctacttaggaggctgaggtaggaggatcacccgagcccaggaggttgaggctgcagtgagctttgattgcatcactgcactccagcatgggtgacagagaacaaaaaaaaacccagagtgaagacccatcttttcttttgataagttttttcctctgttgtatgatcccttctaaatatattcctatcccttattccatctaccctacaaaattaggatctcattttagttctacttgctctgagcatagctagtctaggtgcctggcttaatatgtaaaattcttaaagtttcatttggaaaacttttcaaactatacaacagggaagagagtcataattgctctatttgaggaaggtaaaactgccacctttctagctttatcagttagcatacctggatgacctcctaaagataaatgacctgttccaatagaacccattctccatacacaagtcctgatgaacctaaattgaaactgaccccctcctatcctgaatcacttattaagcttcttgagggtatggatcttttaattaaaataactcgtctctgttaggtgcttaaaatgtgccaggcactacactaaatgccttacattgtgttatataactctctataactacttcacggtggctcacacctgtaatcctagcactttgggaggccaaggcgggtggatcacctgagatcaggagtttgagaccagcctggccaacatggtgaaaccctgtctctactaaaaatacaaaaattatctgggcatggtggcacatgcctgtaatcccagctacttgggaggatgaggcaggagaatcacttgaacccgggaggcagaggttgcagtaagccgagattgcgccactgcactccagcctgggcaacagagtaagactccgtctcaaaaaaaaaagaagaagaaaaaagccatgcctgactgactccataacccacatcttaatcatttctgactttgtcttctaatgcctaacacacaataggtgctcttaagtgaatacatgagctgatatatgtgctttgagaaaaaaaggcaaggatcttcatagctgttaagtgacacagagttataagcaaaatgaatgtagagaaagaactgagggtccaaaatatttagaaacaaaatgttttcttaagcctcattaggtcctatgcaataagatatattaatgtatataaaagttgctactattcaaactaagtcttaatccaacttattcaaaaagttcaaaatcaaacagacttacctctaaacaactgtcaattgctccctgccaatttgacatcttcagtttacaagcaccaatattcagtacacagcttaaagctataggttgcagcttggctctatctgctgtctcaataacagcctttgaactgtccacgtatctgcagaatgcattaataaaagcagtatgaaagaccacataaacaggaattactcttctctatgtccagaagtgttatgtcatttctgatataaaaagctctaaaaatgctattaataatcttaatgatcacactttttaaaatttttaagaaggcttaaaaaaaattgtttttgttccccaaagtgttcaaagaggccaatttaagagcaattcccaaatctaattatgcactagtaacacttttctatttttaaaactcaggtccccactatgtactttccaacataattatgtttggaaccaggattctcataataggagaagggaattcagtagaggaaagatgaaggagaactctattgtgttgattttgcattgtccctgaaaagggccccaaaactgagcacacctggcccccagaatttggtttctaaagttttctttctctaaaagaaatcagaggtccttggagaaactgccatatcagatctgaaagtaaggcaagatgagcttagagcaagcaagtgctcgcagactaataggaacatgccaaaggaaaggggccttccactgaacaaatttggaaccctttgggcatgaaaaagaatgacaataatagcgtactaacaaacggaattgaaaactacccataagatatcctctagtccctgctacttgggaaggtgaggagggaggattgcttgggcccaaaagttccagaccagcctgggcaatataaaggaggccttgtttctataaaaggaaaaaaaaagaaaagaaaaatatccacaggtctatagtgatacttaaaaaatatgcgggaggctctcgcaaacagaagaatgctagttaataactgtacgatgataaacttagaagttcagtataacagattcaggcatggattttcaatgatgctaagatccactgtgtgaaaagttgttggggactagaaattcatacaatttcacgataccacctcagactaacaaatgcttgtggctgacactactttaaccatgtgtgtgaactcaaacaggccaaagcgaaatgtgtcttcaggatgtgatatcataggtaatacaaaacaacacctaagtcttcttgccaaaatatttcacctcaaactaatcttaaggaaacaaacacatacagatggaagtctataaaaacaactgacttggactccacaaaaatgcaaatgaataaaaaaccaggggaggtaggaaacgtaagagatactaccactaaatataacacataatcttagtttggacccttgatttttctaagaaattgaaacaactggggaagttggaatatggattacttttttttttttttttgagacagaatctcactctgtcgcccaggctggagtgcagtggcataatctcggcttgctgcaacctccacctcctgggttcaagtaattcttgtgcctcagcctcccaagtagctgggattacaggcgtgcgccaccagcccagctaatttttgtatttttagtagagatggggtttcaccatattggccaggctggtctcgaactcccgacctcaggtgatccgcccagcttggcct

SEQ ID NO: 94122 - DNA, 478888 bp, Homo sapiens
  misc_feature (1)...(478888): n = A,T,C or G
ggcgttagtggagaaagatatggatggcgtgggactagtttagatggagagtgaggtcttggagccggaagtggatgagcagttcaaatgtggaagagaaaactggtgctgcatgttggctctagagggatcattaggatttagattcctttgaagccttcatatccaatatgagctgcccacttcagcttctcagcagaaactccctcttcagcagtctgacttgtagtgtcttgtgatagatgaccttgggcaagttgctcaacctttgtaagcctctgtttcttcagtaatagcccctatttactcatgtgggtggttaggaggaataatgacatagtctatgtgatgacctgggagcacagggctcagtgaatattgttgcagccttttctcccctttcgctataccctcttcttccacctctggatgcccatagcacttcatctgcccgtagtacagcatccagctctggcctagcacttggcaagtgctcagtagtcagtagatatttgttgagtgaagagttaaaagaagtcaggcaggcaaacggagggaaaatagtaagtagcagacaagtaataaagtaagttgaaacattttcccacctttggaaatgaactaatagcatcctttgatatgaaagttgaacaaacaatgattttgtatctgtaaaatgtagctgtaggtgatggtcagggtagggagctcagtaggcacttctgattgctggtttcctgtttgtgatcatctgtcaggtctacagtggaccacttcagttttccctttgatatgacagggtgaatttggaagagagagagtgtctgtatgtaatggcacctgttcctgccagagggtcaagtttcagagaggcttaaaggaatctaaatggcgaaagaaagaaaggaagaaagataggagaaaacaaatcttattagtaatgagagatgcagtaggcaggtaagggctgtcatcaccataattatataccaggtattaatcactgctattatagagcacaatgctagttgctgagattgtgaagtagaattccaggtttttgccctccagaggcttccaatctagaaaatggaattggttagaagatgaaggggtatcaaacattatctgtctgttgagtactgtgacaaatgcttaaaggtattttgtaagatataatcattctccaaggagaatctaaggttcagagagattaagaaactttcttcagctcatccatcaaacaatctgtagaactgggagaaggcccaagtctgtctggctctaatggcattgtactgtctgtaggcctctgagtaagagcatcagggcaagcatgtgaaaaagagaattaacttgacaagctatcctaggttcaaggccatgtaagtaatatttgatgattgttgcaggaatcctacaagaaaagagatttattgagatagaaggaggaactttacagaggaggtacatcctcaactagatactgatggcagaatatgaatccaataagaatgaagggagaggcattttaggtggaagtaggcatggtatgtgcaaaggtgggaagtgggaaaattttcaccttccgggtttctgttatgcagcacggagtaccagagagagcacaacctgctccaaacttactaatagtgcttccctagcccagtcrcccaatttccataaacctcggtttccctatctgtacaatagttgtgataataggcacttcatagagttgttgagaccagaaacaatgtgtgtaatgttatctgcctcttcaaaatccccactctaaattaaacttcaatcaaaatcagcttccctctcttacagttttctgttttcctttctacttgcacttgaatcaactacatatttgtgtgtttatttctttaatgtgtttcctgactgtaagttccatgaggacaaggaaaatatctgttcatctcaaacactatctctttaatgcctagaacagtactcaataaatctttgttgaatgaatgaatacataaatgtaggaatgaataaatgaataataagatctatttctgtgctatgattctaagaatcttagggaaaatatctcttttctctggtaatgggcaggttgctaatgcaggaaaagctttcatagaatgcagttagagcattacagggcctccacagcttaccagagaagctccgtgtctcctctctgtctactatatggaaccatctctgagcaggaaggaaattacacaaactttcagctcagctggttccagagtttcacaacccagctctgtcttgcttacatctgacgtgctacttcactggtgtgacctccagtgtgcttagtggataatgacactgcataatccccatgctgccccacaatgaccctgagtgatgtctagactttccagtaatcaagtcttataattcaatgcaatgcaataaccttttatgtattgttggggagaatagggaatatatagatgcactgataattactaggcatttgatatatggcctgtgatagagataagggcaggaaactaaagggtacagaggaagctatgtggcccagcctgatgtgaaacaatggatgtatggttggataacatttatatattttcaaagtgtgattatatatttcatcccttagtctccctgtagtcacggggaagtatagatagcatttgcattatttgttcttattatatagagagagaaattgaggcaaatgagggtggtccgggacatagatctggtttcagtggctgtcttagtctgttctgtgctgctataacagaatgccagaggctgggtaacttataaagaaaaaaaatttatttctcacgtttctaaaggcaggaagtccaatatcaagttgctggcatctggggagtgtcttcttcctgtgtcatcccatggcagaaggtgagagggtgagaaagaggggttgggaaatcaaacttgcccttttataatgaactaattcctgtgacaatggtattaatccattcatgagggtgaagcctgcatggcctaaccacctctcattaggcctcacctcccaacactgttgcattggggattaagtttccaatacatgctttcttggggacacattcaaatcgtagcaatggcagatatgaactcatggccgtcagtttagggatcttctgaaccacactgtcattagcccttatgttggacagcagtatgagcatgcttgcaatttcacaatgtcacagaaggtgggggaccttctataatatgtcctctatgcacttttgtgatggaacatcagaatacaataaattagtgatacagaagtgctgggaagtgaagggtgtgtccctttaaatgatagggaagggggcagggacatgcgtatgtgtgcccaaggacctaggtgaggacaggcataattttgttttcctgcccaaatattgcatttcccaagacaaccctggcctgccacacccccatcctgtgctataaaaaccatgagaccctagcaggtagacaaacaggcggctggacgtcgagaggagcacatcagcggaggaacacgcgggcagctggacgttgagagaacacacttacgccagcaggccaccaactggcagaatgacatggagtttggctggggcagtgggaggagagcctgggccgccaagcggcccgacaccaggggaaaaccatctcccttttggctcctccacctgctgagagctactttcactccataaaaccttgcaatcattctccaagcccacgtgtgatccaattcttctgctacaccaaggcaagaaccccgagatacagaaagccctctgtccttgcaataaggcaggggtttaattgagctggctaacacaagccacccacggacggctaaactaaaagagcaccctgctacatgtgcccactggggctttggctgtaaacagtcacccctagacactgccgtggggtcagatctccacagcctacctgtctgtatgcttccctagaggtttgtgcagtggggactgaagaagtgagtcacacccacatcgcacgccctgtgaaggggacaagggaacttttcccatttcattaggggttggcaaactaaggctcatgggccacattgtccattgcctgcttgtgtaagtaaagttttattgaaacatagtcatacctactcatttactattgtctatggctgcttttacattacaaagttgagtagttgcaacagagactgtattgctcacaaagtctaaaatatttactatcggtcctttacagaaaaagtgtcactccctggaataaatgaatcaaatggaagtaaatggaaaaaaaaaaaaggattcattcattcgtaataggcagtgtatcataactgaaaaagatagtgaaaattggtttcagacaaacccaggtaagaatctcaccttcgccacttggctggaaaactctgaacaaattatttttactctttgggcctgtttctgcatctatcaccttataaggttgctgtctgagaattctactatacaatgtaatgtatctgttagagtgtaatatatctgttattaggtttgacctcatacaatagaaacacaaaataaaagtgtcttacacaggacagcagtttttttctttcatgtggaggtctggagggcagtgggtattgattggttcagtgcctcctgcattaggaatccacgcttctttcactttgttgctttgctgtgtgtgggtttcattcctgaggtcctttcatggttcaacacggctgctggagcaaataaaaaatcaaatacacaaaagcccagagaaagagccatccacagaggccaggcaacaaatccacttattcaagtctagccaagatgagacccccttgccacagtgcatgaaaccagcatattccacttattccattcttggggtacgttgaaacagatctggaagcaatgtcttctgtgtattaagcatctaacactttacaaagcattttcatatgtcttaccacatttgttcttcataatgttctgaaaaggtaagatgaatacatcttattattcctattgaacacttgattcacacagctgctaagtaacagattccaacgagtctatagctaggtctttgggtatgttgctggtaatgaaaaggtgaacaatcatggtgcagaagaaagaaaatgagccaaaccaggatccctggtagagttgtagtgcaaagactggggttaattgtgtggcctcagcctcactgggctgttctcctcacctgtaagaccaagataagagcacttatttacttcggggttgttgtgaagatagcagacaatcttagtgcacctgccacttaagatccgttcagtgaaattattacctttcacaggtgtgtctttggaaaatcacttccctttcctggatctcagttttcttttctaggaaaacaacatgtttggactcagcgactgctaaactgtctcccaaacctcgaactccctcagcctgggatcctgccttttatgaaaatagttcggattggagctcaggttggaattctcgctttagttgcttgctagctgtgtgtcccagtaaaagctaaaaatttcggattccccacatctgtagaatagggatacataacatgcagcttattagaaagggaaggcatgtgagaattaaattaggtccgtgtccagtacccactaaattgtaaaaacttctcaaaggcagggacccatctgttttgtagatttacagaatgtcatacgttgaagtacgggggttcgccacgggattagaaaatttctgtagagtaaggaacaagacacaaggtaagcattcaagaattgtaaccatgcaatattcttatttcttacagtcgcctacaacagtcctggtgtttagtaaacggtctgacacacacacccatcaggggctgcggagagtccgcctgggtaagctccgcaaggtgagtccccagagccgggaactcgcagcctgagcagacgcagcgtagccgatcttgggtccgcgctcctcccgccttgcccagccctgcccgcggttggctaggccccagggaacgctgcagccgcggggtgggcaggcgacggccaatcccacgcccggttcaaagggccaatcaggccgcgctttacaggggccgcgctttacaggggccgcgctttacaggggccgcgctttacaggggccgcgctttacaggggccgcgctttacaggggccgcgccggcgggggcgggatcgcgcgcraggcggggctgtagccgccccgggaccgccctgctcaggcgccgtggggttcggcgcggctacgtgcagaatccgtctagctaaaatgtaatttcagattggacaagtactgtaagtgaccctcctctcagtcccacgtgggcgctgggggcttttgctggtgcgcaggctcttagcgcgcacgcccagaaagaggcttctccaacccggcccggcccttccttcccctttcccgcagtcgttgcctcctcctcccctgcctcctcctccccttcctcctcctggccgcttagtctcacacccgccgggccgttgttcccgagacgttgttgagtcccctgtgtcctcttctgggtgaggcgtccggccacttaagggaagggaagggaagggtcggccttgactgcatccccaaggctgcctattaggtgtctggaacccgtgctgcttcctctccgatcagtgcccacttatctgtattcagtaytctttctctcctccccttacccttgtaggacattttcctggcatttgaggagcctttaattcacgtctggctaccgaaggcatttttaggctagtgttgcttgtagatttaaacgcttccagcacttgtgataatgtttgaggcacagctgagtttagatgagataatgctgtttggttacagttatcctgagtagaaaggcctagggatatcttttcatttttagccgtttcctttttatttaaagattgacaaggggccgggcgcggtggctcacgcctgtaatcccagcactttgggaggccaaggcgggtggatcacgaggtcaggagatcgagaccatccaggctaacacggtgaaacccccgtctctactaaaaatacaaaaaattagccgggcgtggtggcgggcgcctgcagtcccagcttctcgggaggctgaggcaggagaatagcgtgaacccaggaggcggagcttgcagtgagctgagatcgtgccactgcactccagcctgggggacagagcgtctcagaaaaaaaaaaaaaaaattgacaaggtgcaaaatggtgaatttccctcatcatgggctgttttccactaaagcacttctgtgtcttaacacaaatttcttccccgaagagtcagtcatgacatgaccaaagtctgaaaagcagttaatccttaggttaaattttaaagtatgagaccaggaggggtgaggtgcttattcttttgacttgtaaatcagaatgaaagaagggaaagtcttttattttgtggctgttatttaaatggtagagttttgctttgtatagtttttgcttgcttttcctcttttttttctatgatccaccacgtgtatgtcctgatttttttcctttttaacttgcttgctggattttccagccagatgactgccgcttggtcttctgggagtctcctgttaatggggccctcatgcttggctcttgacctgatggccactggcctggctcttggaggacctcctagtgggaggcccagagcactgttattaaggatgattgggggaacagatcagagggggtcagctgggcctggagatcaattttgagggggagggaggttgggagcctgcctggctggatttggaagtcaaaacatgtgtgctgggagaagggcataaccccagagggtggagagccatgtctttctggataaaattaataagtttactgggaggaggctgggccttccaggctgtgttagtttttgttgtgggccttggcttttcctggaatttggttccctttccctaacctttcacttattagtttaaatagttccctttacctaacctttcacttattgatttaaatagtttaaatcacagtcaattaccagctggtttttaaaataatttgaggtaatgaatcttgcccttaatctcctagccagagtggaaccccctacctccacccccagggggatttgaaatgattattttaccagaacgtgctacagagatcacttaccttctcacccgcccacctttttataatggagggacatagaatcaacccaggtggtgtcagagatcatccaaatcagttcttcatgtattcatttgttcactcatcttgtccacatactttgggcccagaactgtggtagtctctgggaaagtgcagatgagtaagacttggtctctgctttcaagctttcatccagtttgcttcaatccactttgatgagggagattatgtgatagtgagatgagtacattgaaaaggtatgccgaagactcccaggagttgagagaagggcaaatggctcaacatggggaagccatttggggaggacttcccagaagggaatactggagccgagttccaaagcctaagtatgagtgggctggagaaagagcgagggattatatgaaccgggaacagcatgtgcagaactacacaagcatggcacatggttgattaggatggctgtgcaggaaaggataagttggaaaaaatcacctgacaggaggctggggagggtgaaggccaggtcaggaagggtctggtgaatcatcttaggggagtttgaaatatatctccagggcaaacagtgatacatactctcaggtttatgttatagaaaattaattctggctgcagtttggagaatgaattggattggcgaagcccggagagaggtaattgtagtaatataggtgagagacgtgttagggtaatagttatgggagtggagagagattaggaaaatagaatggttaggaatgttataaaggttcagtgccacaaaagaaatagcacttgaatatcaaattttcttttttcttctcagcaaggccatttacttctatagaagggtgcgccctcacagatggagcaatggtgagcgcacacctggacaagggtgggggggcgggtcttatgcctgacgcacgtggcccctgttgctgtgtcgttcccctattggctagggttagactgcacaggctaaactaattccaattggctaatttaaagagagtgacgrtgtgagtggtttggcgggaaaaatggttatggcagagcaggaaatcggaatgagtcagggtggagaatgagcaggtaatcggaatgagtcagtgagtctgggtggagcaggtgatcgaaaaagcttgctttatgaggacgttaaatttaaaagtagaaaagaattgaacatactgacatattgattctttgaagagaaatttagagctcatatctaatggaaattaattactgactgaatgtagggataagaaggaatgtagtcatcagtaggtgttcttgagtgggctatwttgtagcagctttagtgaggaataactgacatccagtaaactacgtattgagagtgtctaattggagaagttttgttatatgcatatatctatgaaaaccatcatgaccatcaaaagaacatacctaataaccccaaagattgcttgtgccctttttaattcctctttgtataccccctaaggtaaagtatgtattcaatctttcgtccattttaaaaaatgagccttttattttctttttattgagctttgagaattctttattcttatcataagttctttatcacgtgtaacttgcagatattttcttattttgatgcttgtctcaacagtgtcttttgaaagcagagttcttaattttgatgaagtctaatttataatttggttaaataaatgttaccaatctgaattataatggatcatgctttttgtgttttatctaagatatctttgcttaacctaaggtctcaaatattcttcctatttttaaaagaagttttgtcatttttggttttrtattaaatctgtgatcattttaaggtaatttttgtataggacatgaaatatggaatcaagttttttttttgcatatggctatccagttccagcactgtttgctgaaaagcctatcttcattgaattgcctttgcacctttgttcaaaaatcaatttaccatgtatacattggcccaattttgtgttttattttgttcagttgatctcttgtctattttaatgcgaacaccacatagtcttataaatacagctttgtaataagtactgaaatcaggtagtataagtcctttaattttgttctttttaaaatttgttttgattattctaggttctatttccatatgaattttataatcactttgtccatttcaaaataaggcctatttagattttaactggaattgtattgaatgtatacattaatttggggggagaattgacatttgaaataccaagtcttctgacccgtggacacagtatatctgttcatttatttaagtcttccttatttctctaggcaatgttttgtagctctcaatatgtaggtcttacacatctttgttggattatctgtaggtatttcctattttttgatgatattgtaaatgatattaaaattttatgtatttwaaaaatttattttccagttgttttcttgttactggtatattgattgtgtatcctgaaatcttgctcatgtgcttattatttctaagagcatttttgtagatgccatcagattttctatttaggtgatcctgtcatctgtaaataaagatagttttacttcctttccgatgagattgccttttatttttcttgctgtattccactagccagaaccattgctttgcatagaactgatgagagctgacatcttgccttcttcctgatctgagggagatgcattcattttttcattattaagtatgatgcatgatgctagttgtatatcttttgtagatatgctttattaggtttaggaagtttcattgtattcctactttactgagaatttttttaaaggaataatggaagttgtaattttgttgtttttcctataactgttgtgatcattctttttttttttttttttttttttgagatggagtttcgctcttgttgcccaggctggagtgaagtggcgtgatctcggctcactgcaacctccacctcccaggttcaagcgattctcctgcctcagcttcccgagcagctgggattacaggcacgcaccaccacacccrgctgattttgkatttttctttctttcttttttttttttttaagtagagatggggtttctccatgttggtcaggctggtcttgatctcctgaccttaggtgatctgccctccttggcctcccaaagtgttgggattacaggcgtgagccactgcgcccagctgatcatttatatttttaaaaaagattcttaatgtggtgaattacatttattggtttttttttccaatgttaaatcttgtgttcctgagataaaccctattggtcagggcatattatcctttttttatattgctgaattttattagctgaagtttgaagaatttttgtatccatccttatgatggatattgatctatagttttcttgtatcagctaaatacctgacctctcggtaaatctggcctcgtagaatgaattaggaagtatttcttccattttgattttttctggaagagattatgtagaattggtatttttgtttcttaaatgttattgcagcactattcacaatagcaaagacatggaatcagtctaaatgccggtcaatggtagattggataaagaaaatgtggtacatatgcaccatggaatactatgcagccataaaaaagaacatgatcatgtcctttacagcagcatggatggagcaagctggagaacattatcctgagccagctaacacagaaacagaaaaccaaaaatactgcatgttctcacttataagtgagagctaaacaatgagaacaaatggacacaaagaggggaacaacagacactgagatctacttgagggttagatctacttgagggggtaggaggaaagaggattagaaaaaaaaataatttattaatataaaaaatgcaaacctaaagtatttaaataaaattgaactttattcagtttgttgaaagtttaattgaatcttattaaataagttttaaaaaataaagccattcacaattccaaaaaaaaccccaaaaaaccctgtttagtaggattcactagtgaagccatcagggcctggagttgttgttttgggggcaggaggttaaatacaaagtcgtttgattacatagatataggattgttcaggttatctatttcctttttcccccagctttattgaggtatgactgatgagtaaaaattgtacatgctcaaggtgtgcaacgcaatttgatatacattgtgaaatgattaccacaatcaagctaattatatccatcacctcatgtactctttcttggtgtggtgagaacacttaagatttactctcttagcacattttaagtatacagtaaattatcaactgtaatcactatgttgtacattagatctccagaatttttctaataactgaaagtttgtattctttggccaacatttccccatttcctcaatccctggtaaccaccattctcctctctgctttaatgagttggacttttttagattcttcatataaggaatatcatgcagtgtttgtctttctgtttttggcttatttcaataggatgttgtactcttaagttcatccgtattgtggcaaatggcaggaatctttaagactgaataatattccattgtgtatatatgtatgacattttcattatccattcacccatctgtggacattaaggttgttttcatatcttagttattgtgagtaatgctgcaatgaacatgggagtacagctattacaccaagtagtgatttcatttcttttggatatatatccagaagtaagattactatatcatatggtagttctatttttattattttgaggaacttctgtactgtttgccataatgctgtaccaatttacattcctaccaacagtgtacaatggttcccttttctccatattctcatcaatacttattctttgacttttgataatagctatcctaataggtatgaagtgatttctcattgtgcttttgatttacactttgctgatgattagtcatgggtgagcacgttttcatatacctattaggcatttgtatgtcatctttgggaaaatgtctattcgagttctttgcccattaaaaaaaattaagttacttgagttgtatacatttttaaaaatatattttggattttaagcccttattgggatatatgatttgtaaatattttctcttttagaggttgctttttcattttctcgattgtttcctttgctgtgcagaaactttgatgtagcctcacttgtttatttttgcttttattgctcatgcttttgatgtcatatccaaaaaatcatagccaagaccamtgtcgaggagttttttgtcgttttcttctaggagttttaatgttgcaggtcttatgtttacaactgtaatccattttgagttgatttttgtgtatagtataagggttcaatttcattctttcgcatgtgactatccagtttttcyaacaccatttattcaagagacttccttttccccattgtgtttttgttgcttttgtcaaagggtagttgattgtatatgagtagtttatttctgggttttctattggttccattagtgtatatgtctctttttattccagcaccatattgttatgattattatagctttgtaatataatttgaaattgggaagtgtgatgtctccagctttgttctttcccaagattgctttagctatttggagttttttgtggttccatatgaattttaggattgtttttctctattttttttttaaatgccattggtattttgatagaaattactttgaatctgcagatcactttgagtagtatggttattttagcaatattatttctaccagtctgtgaacatggatatgtttccatttatttgtgtcttcttcagtttctttcatcataggtttatagttttcaatatacaaatctttcacctccttggtaaattttttcctaagtactttttcctttttgatgcccttctaagtgagattgttaatttctttttggggtagttcattgttagtgaatagaaatgcggctgctttttgttatgttgattttttattctacagctttattgatttaatttattagttctaacagttttttggagtctttgggtggttttctatatataatatcatgtcatctgtaaacagacaatgttatcccttcctttccaatctggatgcctttcatttagttttcttttgtaattgctctagctaggacttccaatactgtgctgaatagtagtggtaagagtgggcattctctcttgttcctgatcttaaaggaaaagctttcggctttttgatgttgagtatcatattggctttgggcttgtmatatatagtctgtataatgttgaggtggattccttctatatctaatttgtgatagtttttattgtgaaagtatgttgaattttgtcaaatgcttttgcagaatctattgagatgatagtatttttatcctttgttctgtgaatgtagtgtatcacatttattgatttgcatatgttgaaccatccttgcattacaaggatagttacttacttgatcatggtgaatgatcttcttaatgtgctgttgaatttggtttgctagtattttattggggatttttgcatctgtgttcattgtggatattggcctgtaattatcttttctcataatgtccttgtctagctttagtttaagggtaatggtaatgctggcctcataaaatgagtgtggaagtattccttcctctttaattttttataagagttcaagaagaattttattaattgtttaaatgcttggtagaatttatactctacccaattccctctgagttatgaggctttctactctggctgttatgaatagaactattcctggccttatgtgaagcccactgatttgttctctctaatcctttttggtgcttctgcctcagattgttttcacatatagatgcattagtacggatgattagtactctcctgaatacttggggagtacctttgcaattctctggcattcttcttctgtgcagctctctcctctcttgcccaagattctagcctttttgttctccacagactttcagctctgtctcctcaactcagggagactgctgggcttggcctgtgttcatcctttttgtgccacaatctgcagacatatcccagggattaaacttgagccattgaaggacttatctcattttttcccatctctgtgtgattactctgttgcctgatgtccaatgtcatgagaatctttgttttctatttttttccccattgttttaagcagggaggtaaatatggttcctgtcactacatcttggctggaattggaagcattcaactagaatttttgaggaaaatataaataagggactatctaaagatgtgaggaggggatttttgaggtactcagataccaataataaaggggaacttttaccacttcaaggtgctaagagcatggtgaaggaagtatatcagagggaaaaacataagctataactaaattaggataattttcaataaaagaactattgagtaagtgagggcagcctgaatgcctgggtctagtaacagtaagactgttacatccttagacccaaaggggtgagggaaggactggttaccagaacccaaaaggagaaatcgtgtggagaagcctgcctggagaggatctgttattttagcccaagagaagcagctggcccaggccaactctacaggaaargaggcctgaccttactcttctccttcctttgaggcttcagctagagctctccattgctcaaacccaactagaagacagaggattagagagtcttggagatccagattattgtccccaggacagatagcagggagggaaggtagagaatggatatgtagttggggargaatatacagtgacatatgtatagagtgcacttaggaaggataggaaaatcaaataaaaattgttcaggctaaatatattaccagtcccttaaccatctagatttggggctgagctacactgaaatccattgcagattatgctgagagctgaatagcttggattctgctaaacaggctatgggagagagattaagaaaggactcggttgctgactggatattgcaagatgaaaattgagaagaagacaaagtctataaaatgaagaatgaggccaagcacggtggctcatgtctgtaatctcagaactttgggaggccgaggtgggaggatagcttgagcccaggaattcgagaccagcctggccaacatggcaaaacaccatctctataaaaaatctaaaattattgtgtcatgatggtgcatgcctgtagtcccagctactcgtgaggctgttatgggagaatggcttgagcccaggaggtcgaggccacaatgagctataattgcatcactacactccagcctgggtgatagagtgagaccctgtctcaaaaaaaaaaaaaaaaaaaaaaaaatcgagtgatttagacagatcaaactcaatctagttaaccaaatattgggattgtagaattatgtggcagctttgacatttgaataaggctattgttaggatctttaaaaaattgtcatgtgacatagtagaaagaacataggattgaaatccttctctgttattcactgactctatgaccctgacaggtgacctaactgctcagaaccttggtttcccatctaaaagttgcagaaaagattagcaaggccatctggtaagtcactggcaccacatcttgcacagagtaaatgttcataagaaatttattgatgtaagatgagggttggctcaaaatataagtaagtctaaaaagcatttggattcatgtgaagctacatattgataaaacacagataacactaattctagtgaacccttaagggaagaatagtgtatttgacaaggattacctcaaaattccccttcaaagacagtttgtgaagaagccccagctccctttcccttctcccttaaaaagcagattattttttatgttagttagaacaaactatagatagtttgttcctatcaagaacaacttatccttgtcagagattggatgctgggctggatgggccagtgatgtgtcccagcatgtgttgcatccagggggtctccaggaagggagagggaaaaggaagacttcctgtgtgcttaccgtgtgcagctagcccagcttacctcatctccatgcagtgtcatgtagaaacatgggtgactgaagatcattctagttaagtatggtcagtgcctcttaatgctgctgcttctctttttattttagaaaaccatgtcatggaggaaaattacaggaacttaaaatgtatagcatggagaaaagaagacccaacaggaggtcatgagagtcatcttaaaacatttgaaagggtagcccatgtataagggtaaaaaaggctgtttggatgatcctttgggataaaaattaggactagagggtaggagctatactaagcacagttcaactcaatacagagaaggtcttccttcctattactgtaatagctgctcattgagaacattcagacagcacagagagggacaggtaaatggcctccaaacctccactatatttctttttgctggatgtcattgcagtaagcaggttttgtgtgtgtttcctgaaatcttttatgataggtctttatacaatacagtggttctcaaactctagcatccatcggaatcacctggaggcctttttaaagcacagactgctgaaccccaccccagtgtttctgagtcactggagctggaagggggcctgactttgaatttctaccaagttccctggtgatactaatgctgctgctcttctagagaccacgaatggccctgttaaaatttgagaaaataaaastttgagaaccactgtattgcatgaagaaaatagagcttttgctctattctttattaaaaaataatacaaatggcatcatactgtatcatccaagaacttgcttttttagttaataatatataattagcagctttctttttttctcattcaacagctactgatgtatcaattttagaagtcccctattaataatcatttaatttgcttctagagtgtttgtggatatgttcttgcctttacaaaaaaaggttgtggtggattttttttgtatctttttgatgagtcagtgcataaattcttagaagataaattcttagaagttaaactgttgggtaaaagacttgattttaaaaatggatagatagtactaaattattctatcaaagatagaatcacttttctatgaaaagtgtatgaaacagcctgtttcccacacttttgccaagtgggtattatcaaaattttccagttcctgtttgttaggtgtaaaattatatcttagtgttgttttgatttatattcctacactatttgtcagttgaaagattcctatgtatttatttttctatgaactataagtttgtattctttgcattacaggtagagggaacagtatgaacaaaagcaccaagccttcctttgaatagtttctagtagttttgtagcattgaagtacgaaggttgaggttagggagagaggcagggagctaaggttagaaagtcaggcaggggcctgagcttagaggtccttttgggtcaaataaagatattgggctttattttgggcagaagaagcattggtgctgtttaagcttgtactttggttcgtggtacttttgacagagccatgtttgtggaatggtcaagtctaatgtttaatcttcaaataattcattctttagtcctttcaccttcggccttaaagctaccagaccagggccaagcgtggtggctcttgcctgtaatcccagcactttgggaggccaaggtgggcagatcacttaaggccaggaattcgagaccattytgagcaacatggcaaaaccctgtctctactaaaaatacaaaaacaaattagctgggtgtggtggtgtgtgcctctaatcccagctacttgggagtctgaggcaagagaattgcttgaaacccaagaggcagaggctgcggtgagtggagattgcactactgcactccagcatgggtgacagagtgaggaaaaaaaaaaaaaaaagctaccagaccaggcttcataaactggtaaacataagaatgggccaaagacttcaacccatctgtgacttggcattgtctctgaggggggaaattttgcatgatcgcatggagaatggattttgttgctttatctgatattgtcctcagctcctcctgaatttgccgagatcttacagcagtcagtaaggttggtgagttctttcgttgttttaatttgagtgactttctgggaaaaactgtggatttcggccaatatgctgatgataatagcattgctttgaaggtcttgttctgtagaaaatcatttcatagttaattatgtcagcaaatcaacagcaacctcttgaagaagaaagcagtgaggggagaaactgtgtatatgtttaaattattcagaactcaaagagaggtcaggaattcacatttcaaaaggaggagtctatgtaagaacaaatcattaaatttgcatatcttttccccattatgggcctagttttgtaattggcatattagggattaaaatgaaataaccctgcatttagaattaggaaatgactccccctgtcccccgactatctccctttctgtctccagggtcctggcacaggagtaagaaactatcacatttaaatgtctgcatttagagaactcagggtgtccgttgggtttgtagaagatggactgactctgttgattcacttgtcgggtggaccstttctccatcgtccttctctcctcagtgtgtgttcctatttaaatggagccccctgcttgggagggagactgctccaaagaggagcatggtgcttcagccacaagccacatagaaggcttgctcataatgctgctagaactctgcagaggaagaaagttttttagggtctttttattttaagagatatttgactattttatatattaataatcctctcctccttcacaacccagtaattccccttattactacattacaatacattgtgctcatacaaggaaggtagggagcagagcattttcagttaatatctaatgtttcccacagtaggatttatcgtgacrtcaggtagtctgtattaactggatcatggagaaggcatttctaatgatcatctgaaaaggcttcacaggattaacagatttgaaacttcattctctgtgtgcccaggacacaggcagcttggttagtgtggaaagccaagtcatttcagggatggtagaaagagttcagctctggctgataacaaacctgaaattttttttttttttaaagattcttttttttcaatattttactgtaagttccaggatacatgtgtagaacctgcaggtttgttacataggtatacgtgtgccatggtgatttactgcacctattgactggtcctctaagttccctcccctcgtccccccaccccacaacaggccctagtgtgtgttgttcccttccctgtgtccatgtgatctcattgttcagctcccacttatgagtgagaacatgcggtgtttggttttctgttcctgtgttagtttgctgaggttgttggcttccagcttcattcatatccctgtgaaggacatgatctcattcctttttatggctgygtagtattctatggtatatatgtaccacattttctttatccagtctatcattgataagtatttgggttggttctatgactttgctattgtaaacagtgctgcaataaacatatgtgtgcatgtgtctttacagtagagtgatttatattcctttgggtatatacccagtaatgggattgctgggtcaagtggtatttctggttctagatccttgaggaatcgccatactgccttctactcttccacaatggttgaactaatttgcattcccactaacagtgtaaaagcattcctgtttctacatagccttgccagcatctattgtttcttgactttttaataatcgccattctgactggcatgagatagtatctcgttttggttttgatttgcatttctctaatgatcagtgatgttgagctttttaaaatatatttgttggctgcgtaaatggtcttcttttgagaagtgtctgcttatatcctttgcccactttttgatggggttgtttctttttgtcttgcaaatttgtttaagttccttgtaaattctggatattagttctttgtcagatgggtagattgcaaaaattttctcccgttctgtaagttgcctgttcactctgctgatagtttcttttgctctgcagaaactctttagtttaattagttcccatctgtcaattttggcatttttttgcaattgcttctggcaaacctgaactttaatatggctttgtccctctaagggctttgtgactatcaacaggatattgactctttcaacatttcagtttcctcatgtagatgggagaaacaacatatactttggtaggtgttataaatgtggattctcctctccttttctctgtaaagggaatggcttggtaggtcaacagaagaaggcattataaacaagtaaatgtgctttattggaacacaagggttgaacagaacccttgggagggtgtaagcagggttttatggaagatggtatgggagatctgaagtttaatttctttaaggggatgtttgttggtggagtttggggatgtcatttgatgagtcagattttttcatccatgatatctttaggacctgttctgtgcatttggcttcagccaagtttgggttttatgtttcccttgtgactgctgttggacattacctgtgtggctcttggaaggttatggtttttggccaccattcaagatggttcaccatccaaaactggctcagtttggattcttgtggctgccacattgtgaggcacacatggggatttggtaggttctgtcttttctgccttttggaatccaactttaaatttaaaaggatagccaacttttctactgtctttctgatttaataccatgtccctcttccaatcatctgttagtctttacaaatgggctcagtaaagagcataaggatccccaaaaccctgaaaaatactgagtttctgacctagttggtcagaactgttggaacagtaatgagagcagtaaactggtacctccattaactgctgacttgttgctgtgtcctcacatggtagaaggggcaagagtcttccttgggcctcttttatgaggatactaatcccgttcatgaggactcctttttcatgacctcatcatctcccaaaggtcccactttttaataccatcaccttaggggttaggtttcaacacatacatttttggaggacacaagcattcagaccataacattagactgtcagtttgttaaaattagagataatgtatttttcagccccttattcctagcatcctggcatagtgaaagcacttaatatttgtttgtttactggaaatcaagctgttagatatggcgagaatgcctaggtatagataacacatattaaaagatgtgggtgtcagcaattgcaaaaatgtgaaaacaacctaaatgcccatcaatcaataagtgggtaaagaaactgtgatatatgtatcacacacacacacacgcacgcacacacacacacacatgatggaatactactcagccataaaaaggaatgaattaatggcattctcagcaacctggatgggactggagactattattctaagtgaagtaactcaggaatggaaaaccaaacattgtatgttctcactcataagtgggagctaagctatgaggatgcaaaggcataagaatgacacaatggacattggggactcagtgggaaagagcgggaagggagtgagggatataagactgcaaacaaagttcattgtatactgcttgggtgatgggtatatccagatctcacatatcaccaytcaagaacttactcatgtaaccgaacaccacctgttccccaaaaacctacggaaattttttttttctttttttttttgagacagaatctcgctttgttgtgttgcccaggctagagtgcggtagcgcaatctcgctcactgcaagctctgcctcccaggttcaygccattctcctgtctcagcctcccgagtagctgggactatcggtgcctgccaccacactcggctaattttttgtatttttagtagagacggggtttcaccgtgttagccaggatggtctcgatctcctgaccttgtgatccgcccgtcttggcctcccaaagtgctgggattacaggcgtgagccaccgcacctggcctaataaaaaawtttttttaaaagatgtgggtttcaagaggtgattcagtgttggaggtgaaggttgatttgaggcccacactttgagtaagaaggctgtagagtgtctttggtgatgctatactgttacacccaaattttccttctgtgcctcccagtgccattgattctttctggttataaaggaattgcccttttaaagggctctctgtgctcattatttcctttaatcttcacaacaatcccttggagtagttgtatagaattcatgagtctcatacctgtgaagagagacatcagtgaagagacttaccccaagtgagtcagtggtagacacagatgggacaagcatctggtttcctattctgaatagaatatggtgaccctgatattgatttattttttagtgttgtggagaagaattgtcttcatttctcccaaatgcagtgactatttgttagtccattcttcagctccttattgagtacctactgcataccaaatttatttgtgtgtgtatgcactggggatacagaggtggataagatagacgcagcttatgtcttcagttgtcaagacacagtcctgcattgcttagcaggatgacttctgcactccgtcttggagcttcttttgagaacttctgggctcagagactatgtgtgtgatgttgttttctcatgttctatggtgtctgggatcttcagagcctgttagccagctggctccaggaacctatgtgtcatgggttccacakgtgaacttcttggtactggggctcttgaggtctctccagttggtgacaggaaacattccaggtgtgagtggctgaccctcagagtagagaaagggttttgttggtttgtgttttgtttctttggatttacctctgggtttctgagaaytgacattttcataatctgttccttctctgcattatgttaatagacttttctggggcaggaagaatttagtggatgtcatttgttagccaaggtatatgtctgcttttttttttccttctcccctcctcccatcaatcaaaggatttcttagtttcttatctgtgaatcactcaggcttccacttaactgccagttcagtttcctccttgcccatcctcccttctcttttctcctctccttcccccacttctttcccccatttcccttttttccctctccccaccacacttccctttcctttccccctcttttccttttcctcagattcttttgaatttttcttgatctgcaacaagccaggtcctttgttaggcattagtgttagacatcagtgatgcataaaagattgttctgctcttccaggagctagataagggcctggttccacttctcagtattcagggaatggattccctgcttactcccttccttcctttggatgccacaaaatgagcacttgactgaaaatatgcttatacgcgtttttacagactacgccaagccacaggtatgtctagatgaaaaatgtgttgtgccattgctacagactctaaaagtttggggaaccatggaagtgtttgggtttcttttgagccagtcttggcaaccttaaaacttttagaactgtctccccttggagggaaaggcgaaaaagaactgaagaggaggccttaagaaattttcatgtttagaggtaaagttttggttagcaagctggtcttttcttcctatktattgttggtagagcccatagagaaacaactattattgccaaatcagctctttccttctcatttcaaatttttccaccatcttagagcatgtaaaaattgttgaaagtggtattcagtcatttctattaagactgaggtgggcaagcttaactcattgttcatcttttttcttcccaatcttagcaaatccctgattgcagtataactaactaaataaattgcacaggacttgtgtacatcaactcccagcaaagtccaaagatcaaagttgaaagaggatactgaattccttcccagatttctgggacactgcttctgtgcactgtcaccaaataaatcctggaggagtggcgccttaagaaatagggtaagctcatccgctyctgggagattgtcatcataggcagcaatcttaatgctctgagatgcttcagagggaaagaaggggaaaagtataaaagaacaatccccacattatcggtttttagctcagtatttgtagcttgtacccccttcttaggaytgctaaaacccgtttgcaaaggacagccctctatttccaggtccccttttccttttttcacactgcatttgagcagtttgcacatttgttgaagaatcagccacaaagtctgtggtttcctgtggcacatttctaacaatatttatacaggctattatttaatgaactgtataaatatttatacagaacagtcttttgatcataaataggggctaaaagtcagtccagtccatgctgaggacttggacaggaggctgtttctgtgctttgaaatgtcttgtagactgagaagttaggtatgtcccaggacttgtacgcagcacagcttgaatttctgttatttttctttctcttggccgtccacagtccgtgccctcatttctttccgcctgaccaccctccccatatccctaacagctgttttctttttagagtatttatctttgcctaagaagaatgaaatgaaaccccagttccgactctcaccattcataatgcggtctttggagtcacactgacttagcctcaaaccccagcccctgtgcttctgtaccatgcaactttaaacagcttcctgtctgagaacctcactttccttagctgggaaatggggctcatactgcctacctcacagggttgctataaggattaaatgaaatcatggagtcacatggtgatctgcagctcagagctcaatagatatttcttgctgcatttgttgttcttattgaagaagtaatcaaagggtttggctttcagttttagctggatgttgtggaaggagccctaaacttgccgcaagagactgtggttcaaatcctgatgccatttgctgtttgtggcactttgggcaaattactccacccttctgaggtataataaagtggtgataggtttaccaaactgattgggtttctgtgaatgagattaacattgtgtgggaataagtgacacgatgatgatccttatccttgtttactttacaaactagaaaaaggaataatgctttccactttacagttactttactttttgaggccaaggggtactggttgcataagattaggagtctaggacgcagcagatcatattcatgacccaggaacaaagggcatagagggggaagagcaggggacctatgatgcagaaartcctttgctggagctcacaggtcgaatttcagggaagctgcccaagggcttgaacatccctgctttcaggttccaggtatggaaataatcacagagatcagttaaaactataataatgggaaaagtggtgaacctgaaatatgcaagtaggatctatttcatagaaaaacatgaactgggtgatgtgtgtgaatgacgctgggatggtttgactctttgctgcatggtgccctggtaataagttatagaaatccatattttgctagaagcaggccacctggtgttgtggaagggtcagtctctgaagatgaacagcctgggttctgagtcagccaaccttaggcacagcaggcagaggcccccagcagagtccttgacaaatgggcatttagtaaatagaggaatagcaggaggcagtggagcatcctgagaaaggttagggctgatggaacyggagggaatggattactgtcaattgtattactgcctagtaatatggcatactggagcaagttactttacctatctaggacttattttcctcatcagtaaaatgggagtgatcatagttattgtcttcaagaattgtggtcaggcattgtaatcaagctgcttagcagaatatcagatatgtggtaaacatggtacctttttttatttccccagtgatgaattttaaagacatccattcactgagttacaaggacttactgagctcctgctgtatgccaggcactgggcttacagctgtgacacaggcggcagctggaattaactgtaatcataccgctccattctccatgtgaagggtgggctcctgccagaaaccagaactggagcaagcccagggctaactgtagagtggaaatctgcctctttgggttttactggaaaggaatcagaatgtgggtagggtggtaagatgatgtattttatcatattactctcttcatcagagagggagtcaaaagtgaggaacccaagcctgagcacgtgggccagccccatggggaatctgtcttgtcatcggggctggctggagtagagacaagtctggatgctggctggccaggtctgtgtaagccagggtattgmatagatttttcatttcctatttatttctttgtttcttcctaagcgtttatagtagtcttgcaaaagtcttgccaagggcaaagagttgttagcatgctaggatcagtgttaaggagcagcaccccgggggcctttgcagtagagacagtgggaagcccagagaggggattccaagtaaagtaagcagctgtgagaggttggtagagggaaggtagagtggctagcttcaatcttcttcctgtttgcagctaataaaattgaggaaactcagcgaaggcattgcccctattttgtcaatcagtgtatcctcagcaggcttcctggtgttactgtcttctgcatttcttctgagtctcagatgtcactgattgcaagatgcaccattatttattattaccatgaagtaagaaaggaaatgataccaattaattgtaacataccattgattgtaaggttctcactggttttagagaagctaaatatggaaaaatgagtgccgtagaatgaataaaatgtggttgtaaaatgaataaaacaggcatggacctgttcatccttgtttctgttaattcattgattcagttgttcattcagtaaacatttactgaaaacctattatgtgccagacactgtgcaaggagcttgggatacagaaatcaataagttcatttttttcagattcagttaggaagacagacatggaaagaaaaataaaattgtgattccagagtggtaagttttaaaagaaagcagggagaagataccatgttggcatcctttgtatgtatgcaaggggagaaagggaaggaagccttttccaaggagaattgatggctgacctgggtcttaaaatataattcagtggtcaccaggcagacaaggaaaggagagaattaggaagggatgagcaaaggattggggcagcctttagcagctgggggcaattgagagcttatgaggagtttgaggatgtctgtagcctggagtgagaatgagcaggactgtattaggcggggctggatggcaggcagagggagcctgtggagggtgtgagatcccgtgctgaggccctggggtatatcacagctcaaagctggtggttttcagttgtcctgagagagggcctagcagagggactgctggggggaagggctggagggtggggcaagggcgatctttgcttcagagcagctctgtttttatctgttttgttttcttcaaataatggcttgaagaaaaggtatcactgttgaatgaatgaaggaatgaatgatttgaaaactggtgctaatggtcatatggaggtccccaaggggaatgtaagcaagggagagaagttgaggttacacaccagtggaggtctgaygaagctcctatgaacggagcaaatgttactwctgcagcttctccattttatttttcacctgctcatgagccacagagccaaaagggggacaattctgttgggaaatcattgtgattaagacagaagcaattacttttaatgaagtttttattgttttatttgttttttactggagtaaatatctaggaagcagtaactgaacatctgctggttgattttctttcagaatmtccatgtttgacttggctagggaaacattttctttctgaagttgaaggatgcagaaggttgcccaggttgaaattagactctgggtggtaaaactgccttgagctcacctggagagttgtagggcatccacctgctcagttgtgttgggggcttgttcttattctttcaaagccaatctggaaaataaaagcctctatgagattccatgtcatgtgggctaatctgaccaaagggacttagagcagccatgaaggccaaggaattcctgaatgttctctggtcagatttccttgtaactcacaaggggtctgtaaggaaaacagattgtctaactaattsctgatcttgtctcctcggggttccttcccaattcccagtcacttcatgacaaagctgcaatatatttgcctcttctccaaacctatacagaaagcttttaagaaacaaaggaaagagcatgaaacttgggattgcacaaatatgggactttaggtccaggctgcccctgaatgaagctgattaaattccttaacttctcatagacttgcttcttaatcagtgtagtgtgtatcattataataatgtacatttactgtttgaatttatgagtagacctagctagcattaagcaaaaagttacttatctcttggaatctcaccttgaccacctgtaaaacagagatgtaaatagcctcaccttctagagtcatagtgaggagtaaaggggacataagcacttttcacagtgcttgcgtgtaagaggtacttagtaggtaattgttgaatgaatgactgactaggaggacaaggttccttttcagtaccttggcttctgttcttgttgattgaaattcactgagaagaaactcatctccattgcctccagattctaagttctcctaccaccctgtacttgcccttacagcactcatcacaactttgcctaaataattatgtatttaaatcctgactctctctcaagagtggaaatgccatgtctgaggccatatctgtgctgttcacccaccatgtagctcaatgtttattagtatactgttatcactaaaaatgtttgttggatgaataaataacaaatggctaccggttwggtagcggtacctcttttatttctacttttgagatgttttgtgactgtctttgcagatccacttggtcttcatatggtttttacacttgcttactayaggtggaggaactgcaatgtctggtggagaacagaaaccagagaggtactatgtgggtgtggacgttggaacaggcagtgtccgtgcagctctggtggaccagagtggggtcctgttggcttttgcagaccagccaattaagaaktgggagccccagttcaaccaccatgagcagtcctccgaggacatctgggctgcgtgctgtgttgtcacaaaggtatgggcaaaactggtgttctctccttgttcatattcctacctgctgagtgtcgtgtgtcaatctggtgccgtaaacaatgttggggtaactttagatgcagaggtaagcaagacataggccttgcccttcaggagctcacagtctactggcagagactgataaacagctaatatatggtaagagctgggatcaaagtaactatagctggagctggggaaagagctaaccggagggggctcagggaagacaggacagcttgaggtgtgaccacatgtggaagaattcactgatcaccttattaacatttaccacgcctttaatgtgtgccaaaggctgtgtaaaatgtgttaacttgcactgtgtagttscatcttcacatgaccctataaaggtaatactgtcactacccctattttattgagggagaaatgtaggcacagaaaagttaggtaacttactcaagttcacacagtaagtagcagaggcaggactagaacaaagcagtctgactccagaggtgcgctcttttttttttttttttttaattaaaaaaagttcaatgggtttttggggaacaggtggtgwttggttacgtaagttctttagtggtgatttctgagattttggtgcactcatcacccaagcagtgtacactgtacccaatgtgtagtcttttattcctcaccaccccccagcgctttcctccgagttcccaaagtccaattgtatcattcctatacctttgcctccgaggtgcactcttaaccattggactctgctgccttccaagtggacaaatgaggatgagaggaactgcattttgggcagagggaatagcatatgcaaaggcatggtggcacgaaaacatggtgtgttctgataaagcaaaggagtcagattagagtgtctcccatatatgccaggcatatgttcaccctgagtggccttggattggatgcagcctgctggcttgggaaggaaagcaatgcttcacaattcttgtttgtttttaaagtttcacttgactgtttgattttatgtcttggtgatcagtaatgacagaggtccttttgtctttttttccatggggaaaaataaagtcctggattccttcttttccctgttcctagtttagttccttaaatattcatgaggtgcttggtaatttgcagatggacaattcaccattctgtccctattgatcagtctgtttaaactttaatgaattctgggctgctgttagtgcccccggagaagaaggcagagagaggagggagtgggtaggcagtaccagagcattatacaggaataaaagagggatgcatcttctcttttgcccatttaattttcctctcctctcccctcctttcagcccccaatctggtaagaatcttctactctttgcacttgggccttctttcttcttttaacatacagccttgcttgccgttaaggaaattatcaagaagaaaatataatcccctgatgaaaagctactttaaaaaaggtctactctaagtacagctggtttaatggtagatttttaatcatctcccagtggtggccaacttatcatctgtttgagccctgttagctgcataagtaccatggacatctgtcgatagcaatgctattgcactatagcaaacctaaatgaagcccttgggtcttaggcgattctcctcagatggagtatggatatgtgggcatgtgccagaagccacaggataagcatgttacatctatatggaacatcattgctggtgtgaggcttagggagggaagcatttttatgttagagagataataacaccataggaatgagagaggtaggtgacctgttatagagcacagattctgcagccagactgcctagattgacatcccacttacaacgtttattaggttgtgatcttggacaagttacctaatgtttcttgcttcagtttccttatctgtaaaatggaaatgacattagtacctacttccataggattgttgtgaggattaaatgaattaatgcacataggatgtcataacattgcctagaaatgtgtatgggttgtttcctatggtggtgctgatggtgacagaaaatgagcagattatagaagatagtgaatttctaagacaaaatactgaaaagtcaaagtctacggcgggggaggcgcttcttgggaatattcattcactctcctggttagggttcttactgtgtaacactttgagaaacactggtctagggcaaagggtggcatcagatatgtcctggtctgtcttttcttcctcatggactccaggaagttgagagcttcagagcagttgttctaattccttttccctaagtcattcacattgcctgagatgactttcctcttagttaaagcaacagtaaggataatgtggtgtcaatgatgatgacaaagacagctaacagttcttgggcacactggtccaggtactatactgaagagcttttacccatcacttcattttatccttataataactacttttttttttttttttttttttttttttgagacggagtctcgctctgtcgcccaggctggagtgcagtggtgggatctcggctcactgcaagctccgcctcccgggttcacgccattctcctgcctcagcctcccaagtagctgggactacaggcgcccgccactacgcccggctaattttttgtatttttagtagagacggggtttcaccgttttagccgggatggtctcgatctcctgacctcgtgatccgcccgcctcggcctcccaaagtgctgggattacaggcgtgagccaccgcgcccggccaataactactttttaaggtagttttgattgttctctctgttttgaagatagaaaaacaatgagctttgaagaggttcagtaagcagcctaaggtctcctgaataagaagaaggggacgctgtccctgccactgctactgctctcatgctctgtcccttgtctctctccagccatatctccctccacatgaccctacctggaactgataagaagtagcctgaaatttttagattttctacacatggggcatcatgaggttacccaggattacgagtgcctttacctggttgcctgctcatctgggaagtgtgtgccccctcagcaggggttatatctagtttatctgtatttctctagaattctttgcttgtagtgtgttcaattaatgtttgttgagtacataaatgaatgatatatctctgttgtttacattgtctggaatactcttctcttaacttcctcacctgcccaactcccaccttataaagtaagcttaggcggggcgtgttggctcacgcctgtaatcccagcactttgggaggccaaggcgggcggatcacgaggtcaggagattgagaccatcctggttaacatggtgaaaccctgtctctactaaaaatacaaaaaaaaaattaaccaggtgtggtggcgggygcctgtagtcccagctacttgggaggctgaggcaggagaatggcgtgaacctgggaggcggagcttgcagtgagccgagatygcgccattgcactccagcctgggagacagagtgggactccgtgtccaacaacarcaacaacaacaacaacaacaaaaacagtaagcttaaacattcctgtctcctgagtgtcttccttggtgacttctgacagtctatgcccttttttaccaacctcagcagaaagagagggtgagaagcccctctctactgtccagagcccaccatcttcacccagatcactttctactccttatctttgcattttacttgttggcttgtttacccccttttaaactatgagctgagctcttagagagattcatctttatgtctccagtatctaacacattgcctggcacaaattaggtgctcaattaatggctgttgaatgaatgttacttagagctaaaaacaaagagacaaaatccaatctagcattccttatcttgtttcagtgtcactgtggggcaggaaggacaactattcttcctatttgaaatatgaggaaattgaggctctggaactaacaagtattggagacaagaccagaaccctggtgagayggctccaaatcttcctctctgtcttcctccctacattccctaaatttggcaggttttattgggctggtaagccgcacacctaagaggttttatggaaactcacaagtcatagaggttatatgcagtccacgattttaaaggttcctttatggagccacaaatcttaatcattccaaaaaggtgagaacatttcaaattagtgcatgattcatactaaacttctcttaggaagaaggagaagataagctggaggaatcatttagccaacaggtgtttgttgagtatcattctttcatttagtctgcaaacatttattgagcacttaactatgtgctatgctctttgctaagcattggagcatatagaggagacgtatacaagaagtctgctgcttttaaagatgaaacagcttaattgtatgagaaaaataaacaacacatatgaagccagtaaagtaccattttgttctgtcttggtgctatctatatgagtagtggttgtggggagggggacagaagaaagagtagccacatgtcgggttgagcaataatgttaaccttatattcatagaaccattatagtttacagtgcatcttcattttcatttgattgctattgcagggtgaagtagggaagaagttgttattcccatttacatttgaaaaactgagggccagagagttaagtgattttcctaaggtcacccaggtggtatgtgataaggcagaactcagatgggtcaaacctatgcattctctctatctctagcaccatatacctttatattttgcatggaatattattccaagaacctaactgatgtcttgatattcatttttcttttctctattcttgcatttgaagtgttttttttttcctctagtgctaactgatcatgtcactcttttgctacagcccttcaacatctatcactctactacaggcataatgataaattcagttccagamcaccataatgaggtgaatattgcaacaaagctcacatgaatttttgagtttctcagtgcatatgaaagttatgtttacattatattgcagtctattaaatgtgtaatagcattagtctaaaaaaagtatataacttaatttttaaaaattgccaaaaaatgtgttaatgatcatcgaagcctgcagtgagttgtagtctttttcctggtggagggttttaccttgatgttgatagctgcttactaattagggtggtggttgctgaaggttaggtggctgtggtaatttttttaagtaaggcaattttttaagtaaggtttgctgcactgattgactctttctttcacaaaagatttctctgtagcatgcaatgttgtttgatagcatcttatccatggcaggacttctttcaaaactggagtyagttctttcagaccttagccttatcagttaagtttatgtactattctaaattgtttgttgtcatttcaacattgttcatatcatctttatcagargtagattccatctcaagaaatcatttcctttgttcatccataagaagcagcccctcatcggttcatattctatcatgagattacagcaattcaatttcatcttcagggtccacttctaattctagttcgtttggtatttccactacctctgcagtaacttcctccacttaagtcttgagccactcaaagtcattcatgagggttggaattaacctcttccaaattcctgttaatgttgatattttgacctcccatgaatcatgaatgttcttaatggcatctagagtggtaaatcctttccagaatgttttcaatttactttatctagatcaattagaggaatcactatctatggcagctatatccttacaaaatgtaattcttaaataataatacttgaaagctgaaatttctcyttgatccatgggctgcagaatggatgttgtgttagcaggtrtgagaacaacattcatctccttgtacatcttcatcagaactctttggtgactcggtgcattgtcaatgaggagtaacactttgaaaggaatctcttttctttgagcagtaagtctcaacagcagggttaaaatattcagtaaaccatgctgtaaatagatgtgctgtcatccaggctttgttgttccatttctagagcacaggcagagtagatttagcataattcttaagggccctaggatttttggaatagtaaatgagcattggcttcaacttaagtcaccagctgcatttgcccctaacaagagagccagcttgtcctttgaagctttgaggccaggcattggctttttgtctctagctgtgaaagtcctagatggtatcttcttccaatataaggctgttttgcctaccttaaaaatatgttgtttagtgtagacaccttcattgattgtcttacccaaatcatctgtataacttgctggagtttctacatcagcacttgctgcttcaccttgtgtttttatattatggaaatggcttgtttacttaaacctcctgaaccaacttctggtagcttcaaacttttcattctgtagcttcctcacctgtctcagcctttacagaattgaagagttaggactgtgctctggattaagctttgacttaaagaatgttgtggctggtttgatcttctatctagaccactcaaattttctccatatcagcaataagactgtttcactttcttattcaggtgttcactggagtagcgcttttagttttccttacgaactttcttttgcattcacagcttgactatttggtgcaagaggcctrtctttttgccagtcttggctttccctatgcctacttgactaagcttaatcatttctagctttacatttaaagtgagagactatgactccttctttcacttgaacatttggagaccattgtagggttattaattggcctaatttcaaagttgtgtctcgggggtagggatccctaaggagagggagagagatgaggaatagctagtctgtggagcagtgagaacacacaccacatttatctattaagtttgcccgtcttatatgggtgcagtttgtggtgccccaaaacaaatgcaatagtaacatcaaatattatcatagcagatataatattaatgaaagtttgaaatattrttaagaattaccagaatgtgacacagacatgaggtgacatgagctattggaaaaatgacactgayagacttgctctttgcagagctgctacacaccttcaatttgtaaaaaacrcaatctgcaagatgcggtaaagcaaagcacaatgataccagatatgcctgaggcatacctcaaactgcggttttagttccagaccactgccacaaagcaaatatctcaataaagcaagtcacatgaattttttgattccccagcatacataaatgttttgtttgtgctgtaccgtagtctattaagtgtgcaatagcactgtatctaaaaaaaaggtaccttaattaaaaaatactttattgctaaaaatgctaatgaagtgagcacatgctgttggaaaaatggcagcaatggacttgcttactgcagggttgccacagacgttcaatttgtaaaaaatgtaatatctgcaaagtgcaataaagtgaagcacgataaaatgaggtatgcctgtatttgggtagaactcaatccttaacatggccttcagggccctacatggcctgtctcgacttgcattcctggctcatctcatgatgcttctcctggctctctgcattccagccacaccttccttctgtcatgtcctcaaacatgcaatgctccctttagcgtaagaattgttacccagattctttcttctggctgcatatccttcctaccttccaccagcatatctaactcctgttcatccttagacctaagctatccaatccaatagttgctgaacccacaatgccatttaaatttatagtaattacaattaaatataattaaacattcacttcctcttttgctccagccaaatttcaagtgctcaatagccacatggtggctattatactgaacagcacagatatagcacattttcattattgtagaaagttccattggatagtgctgccccaaaccttaattcaaaagttagttcttcaaggaaggagcattttctctaccaataccacctccaactaagtcttatttcacttattaaatgttttcacagtgccttgtacgtctctttcatagaactccatgtggttcgtgaatcattcattttttgttatcaaataataaaatcattctataaatcaagaataaaataccataaaatgaaacaaaataataagatatttcactttttggattaatgtatgtcttccctactagattttatgtttcaggagggcaggagctatgttttgcttacccagagcctgggttatattagacccaggaagtgtaaaaaaaatgaagggtcaaaagaaattgagagcactttgggaggcccaggtgggcagatcatgaggtcaggagtttgagacccgcctggtcaacatggcaaaaccttgtttttactaaaaatacaaaaattagctgggcgtggtggtgtgcgcctgtaatcccaactactgaggaggctgaggcaggagaatcacttgaacccgggaggcggaggttgcaataagccgagatcgcagcactgccctccagcctgggcgacaaagcaagactccatctcaaaaaaaaaaaaaagaaaagaaaagaaatggagacctccctacttctacccactggagaaaacttgagaaaggatgtagggcaaaaagtgactcttgaactcttaagagaagacaattggaactggaggaatagaatggtcagaagcgctgagatgggaacatcaaggatcgaatcctagctgtaataggtggtttctaataggaagaaggaaagggaggctagaattgacgatacaggggtaggtgagacagctggctcagaccaatggggagctcctctagaatcatcctgagtttgagattgaccagtcttgcaacagattcagaatggctggcagagaagaaactaaatttaaggatgtcaggaggcagacatcctgatgagtttcagaggctgagatttttttttttttaaactataaactttgggaagactgggaccacgtctctcttgaccaggatatgttctctgtgtctggcacatataggtgcttaatatttttaataataaatggctagattagactattggcagaggaataaataggagggctgagactgagasgytttaggaaggcaggcgtaactggacttggyaacaatggagaggaaggaggtagaggctatttgagtttcagttcttggcagaatgttggggtcactgatataaatgagagtatttggcctttatttcatcatcttatcatcaaatggcaataccatacctaagctgggatgctacgtaggtaaaggattaggactgggtttatttacttcactggtcactagagtagcttttacaaaattgactgccttcaagggccttccaggtaatgcacgccccaacacaagctgtatttgtcttcttgctgttcyccctcccaggacctctgcgctcgctgttcccctgcctggaacactcttcccccagatttccatgaggtccactcctcatgtctttcaggtgtatcctcaaatttcacttgcatcttgcataggaaccacctcctccttgcattcctaatccccctgagtaatcacttkctagtatactatatctacactatgtaatttatttgatttattgggtattgtctatccctactaaaatgtaatctccaaaagagcaaggattaaaaaaaaaagtttttctctccattgtttttccaatacctagaagagaaaattctgcacagcctgaccctagaaggggcttgattattttcgctaaggacttatggctaagtgagtgattgaactgtgtaaccaacaggtagtgatggagcctgagggaactggtgattgcataactcctcgyacgcccccaaagctgacaaaggcattcaaatcaagatttaaaagaatacagtacctgccactcagaactctactgcaagctggattatgtctatgaagccccaggctttgacccttgctctaaatagagctaaggataaaaccaggtatgcatctgaccctccagttctcagtttggagggtttctaagaaacaccatctccccacccaatatggcagatcttgctgatttaaaacacatgcagaattgaaccatttcccacaataagaagaaagtgatacacaatcccttccccaaatatttgtttgctgccccatagctacgagttgacagttgttagacatggaacaggttaccaaatgaggttgcagaaatctctttctctggaaattctttagaagagcaatgtgctttctctctagctagggaaattctcttgattccaagctgttacaatgagattactgggctgctttcttcttccattaataagaatataaaaaagaattcttaggtcaccaggtcaagccccagaggccttctgggtagtgtgactctgacagtcatctttctgggatggtttagatggtgtggggtgaggggttgggaatggcgatgttcctcagctgtggatgagcatgatcataaggcatttccttrtaaggctggggaaatagtagtggctacctagctagatcaggtttaaatgcatgccacagttactcttccagtttcttgtgagaggtctctgtttgaaagatagagacgctgagtctttgtgactgaaggccatgattgtaatattgagcactctgtaggtctgttgaggggattcataacatacattgaagaaaatattttccttgctcctactaggttactcccgccatgattcttagaaagatttgagtctatccaattttttctattcctactctttttgcttgtcatttttatatgtgcttacgtgacacagagagcaagcatgctgtgctttgtacataaaaacattccatgaacacaataaggcattgagtgcatttcctatcctattttctataaaggtttactggtttcaaagtaatttcagactccactgatcccattcaaagcctttgattcttacttgggaggtatctctcactcaggaaactgaggctcagaaagttgatggagttagtgcaggattacctgacctagaagtggtggagttggcaccagaaggaagttctttggacaccacatcctgtgtttgtttctactcccaaactgccktgtggtatggagtttgagtcatctatattttctcacccaagtcctcttttgactaactgcagacctgtgtgagatgggcttacccaagtcagacatgcactttctgggcacagaagccaattgggccacatagcaagtagaagttagggctgggtgattgattgattggtatcccacatggaaagatttgaagcaactaatttgctctaatataaactgctacttactgtgcactgatgccagatgttgagctcatcacaccttattttgctgaattctcatatcattgggagatgcaggtttaggtaatagttttgtactgccaaggaagctgcttatctgacttcacaaagttatataactcggaaatagtagaaccagatttcagactcaggtcttctgcccccaaagtcgctgatttaactactatccagtgatttccaagccaagttgtaaggacattccaggcagaaatagccatacctgtaaatgctatagaaacatgaaccagcaaagcaagagaggagttgcaatggctagaattgtgtaacttgccttcagccacgtagccatggtggcagagctaggatttgaattcaagtctttgtgactcattgtcatgaggccatactgcctgtcaggaaatgggtttggtcctcacactgtaagtctagatwgatcagtgtggtgaaggcatctgggtattcacttggtactgtgggtcaaggtactaccagcagtyacagatgggtcagcagcaagtgttctctagatcacatgtcctttccacaggatgagtctcttgggcaacaggaaattatctgatgacagaggtgagcagtatggtataatggaaagaaaatagacactgagtttgaattctggctctgcaatctactggctgtgtgacaagtgcaagttccttaacctctctgtgcctgctgttcaccctttccctcsccaatcatccacttcttttattttgttttattttttttgagatggagtctcattctgtcgcccaggctggagtacagttgcatggtcttgggtcactgcaacctttgcctcctgggttgaagcagttctcctgcctcagcctccctagtatttgggactacaggcacatggcaccacacctggctagtttttgtattttttagtagagatggggtttcatcgtgttggccaggctggtctcaaactcctgacctcaagtgatcttcccgtcttggcctcccaaagtgttgggattacaggygtgagccattgcacccggcccccacttgtttttcatgaaaaactaatattaaatgtttcttttggagggctttgtaaggattaaataatatgtatgtcaaacatatggcacatagtagatgttcaatatatggcaatgctttattaatatgacttgaaaaaaattactgcttttcttttttggacatttctcataattatgtgaagctcttgtttgaggaacatgttaaatagtaagaaatggaattctaaattataaatctggtatttccaaacaggaaaaaaataattatatattttaaggtgaatttcactaaatgaggatggacatttttgagttgacttttatgggatttaaaaggttgtagtcatgttttaagttaatagaaactggtcgctcatgctttttctataaaggaaaccatagaaacaaaaataaaaaatagaattaatcgataaatctattattctacaactttaaaaattatacaaacaagtgtaaaatctatatcctcctcctgcagttccaccctcaggagcaaccactattaacaatttgttgcatattcttttttttaaaaccttactaatatatcatggatgtctttccattttatctttcatagctcaactcgttttaaaagtatttaacagcttgatgtatgatttatatatcataaaatccagccattgtaaatgtataatgctgttattttgtaaatttatacagtggtgcaatcatcacctactccagttttagaacacttattactccaaaagtttccttacacctgtttgcagtcaaccccaagccccagtcagaggcgctttctgtctttataggtgttctttttagaaattttatataaatagaatcacatagcgtgctttcttttatatcyggctcttttcacttagcataatgtttttaaggatcatccatgttgttacatatatcagtagttcctttttcttgctgagtagtattctgttatatggatatacaatactttatttaacagttggttaaactatgatggatatttggttggttttcagcttgggaatatcaataatgctgctatgaatattcacatacaattctttgtgttgatgtatgtttttattttattttatttggtttgttaatattttgtattgaagttgccgggttgtgtggtaagatgtggctgtattttacatttccatcagcaatgtataagggcatcactttctccacaattctctaacacttgrtattgtcagtctttgtgataatattctagtaagtgtgcagtagtatcttattgtgattttaatttgcatttccttagtgactaatgatttgagcactttttcatgtgtacattggccatttgtatattttctttgcagaagtgtccacatcttttgccaatgttatcattgggttgtttttcctcttattatttgagttttaaaatatattttatatgcaagtatattatcagatgtgttgtttgcaaatattttcttccagtctgtagcttgtcttttcgttttctaattgtttcttttgaagaaaaagatttttaaattttgatgaagtcaaaattttttctttygtgggtcttgcttgctttttataaaatcttcatctaatgcaaggttgcaacaatgttctcctgttttcttctacacattttatatttttagtcttacatttagggatgtgatatgttttsagttaagttttgtgtatggtgtgaggtaagagtctaagttcttttttgcatatagtcatatagttctagcatcactgtcaaatagtctgtcctttcccccattaaattatataggcacatttaccaaagccaattgccataaatgggtttacttcttatatctctgttctattgatttataaatttatccttataccaataccacataaacttaggaatgctagttttatagtaagttttgaagtcagatagcatatattttccaagttctttctattcaattttgtcagtttctacaaataagtagataaataaataaataaaacctgctagtttttttttttttttcactttaagttttgggatacatgtgcagaaagtgcaggtttgttacataggtatacatgtgccatggtggtttgttgcacccatcaacccatcatctaggttttaagccccacatgcattaggtatttgtccaatgctctccctccccttgccccgcaccccctgacaggccccagtgtgtgatgttgccctccctgtgtccatgtgttctcattgttcaactcccacttatragtgagaacatgcggtgttagaaaacctgctaggattttaatggagttgtggagaatctgtaggttaatttgaagagattaccatctkaacaatgttgaattttccattttacgagtgtgacatatttctccratttttagctcttcatagcaatgtttggtagttgtcagagtataggtcttgaacttcttgtgatatgttaattcctgaatgtatttgtcaggtttctccagagggacaaggccagtaggaaatatatatgtatatgtacatgtatgtatatgtatatattcatatatatatatttatatgtatatagtcatatatatatatatatatatgaaagaaagtttgttagggagaattggatcacatgattaaaaatgtgaagttccacaataggtcatccgtaagctagggaatgccagtagtgtggctcagttcaagtccaaaagccttgaaaccagggaagccgacaatgcagtcctgartaagtctgagggtgaaggcctgagagccccaggcaggctkctagtgcaagacctagagtccaaaggaagatgaacctggagtctgatgtctaagggcaggaggagaaaaggtgcctcactgcaaaagggagagagggaggaaggtaagcaatctgagtatcccccttgttccacctgctttgttctaatcacacccattactgattagatggtgcccactcacatcaagggtggctcttcctctcccagtccactgactccacatgtcaatctcctctggaaacaccctcacagacacacccagaaacagtgcttcactaaccagctaggcatccctcaatccagtccagttgatatctaatattgagcatcacactgagtatttcactttttgatgctattgtgaatgggattattttcttaattttattttttatcttttagttgctattaagtagaaatccagttgatatttatatgttagtcttgcatcctctcatcttactaaaattrcttattagttctagtaatttttttagcttgtagattctttaggattttctgcatatgagatcatgtcatctgcaaagaaagacactttaacttcttttctaatctgtatgcttttaatttacttttctcactttattgcaatggctagaagctcaagtataaggttgaatagaagtggtaaaagtgaacatccttgcttcatttctgatgggggaaagcattcatgttaccattaagtatgatgttagctgtaggtttttgtagatgctccttatcaggttgtagaagttctcttctatgtctggtttattgmatgttatatttggagggtaggggttcttttttctgcatctgttgagatgatcatttggtgtttgtactttgttctgttaatgtgcgtattccattaattaatttatggatattaaaccactcttgcattcctgggatgactccacatagtcatggtatataaaggaaagttttacatgctggaagatttcgtttgttaatattttgttaaggatttttactatgttcatgataaatattagtctgtagtgtccttttcttatgtatttgcttgactttggtatcagggtaatactggctatgtaatatttgttggaaagtgttcccttcttcactgtattttagacaagtttgtgtagcattggtaccatctcttccttaaatgtttgataaaatttcccagtgaagcatttggacctgtagtttttttattttttgtgggaatgttttaagcacaaatttgatttttcaaaaaaaaagtgcttctcaatttttcacatggctttggccaatttccataaccccaaaatggtggtttttgatagttttgtccagtttattagttttattttgctaagaggattttttgacttcacaccgccacacccagcagttgcctctctacctctttttaaaaaaaatctgtatagtatttcattttacaaacatgccataatttatttaataaaaatagttttttcacttttaaaatatagtctgagcagtgctgaagctaaccttcttctatatataactttacttacttttgctaataagatacgtgcatttttaattttaataaatgtcaaattattctccaaagtttgttgtcattaattatattgttagaataatctccaagaaggtccacttctgcatatattgccactaccatatacaggttaagcaaccctactctgaaactaaaatgcaccataattcaaaactttttgagtggcattgtgacgccacacatggatgtctaagatagtaacatttttgttttctgatgattcagtgtacataaactttgtttcatgcacaaaatcattaaaaatattgtataaaattaccttcaggctatgtgtgtaaggtatatatgaaacatatatgaattttgtgtttagacttgggtttcatcctcaagatatctcattatgttatatacaaatattccaaaatctgaaaaattctgaaatctgaaatgcttttgatcacaagcatttcaggtaagtaataacagcctgtagtattaatcttttatatttttgccaatatgaaaagcaaacagtttgatatctttttgtttgtacttatctaattggaggtgggaatcttctcatatgctctttgaccatttctttttattttatgaggtgactttttattcctttgcttaatttccaattatttttaattattattattatttttttttgagatggagtttcgctcttgttgcccaggctggagtacaatggcgtgatctcggctcactgtaacctccgtctcccaggttcaagcaattctcctgcctcagcctcctgagtagctgggattacaggcacacaccaccatgcctggctaattttcgtatttttagtagagacagggtttcactgtgttggccaggctggtcttgaactcctgaccttgtgatctacccacttcggcctcccaaagtgctgggattacaggtgtgagctgccatgcctggccttaatttccagttagtttggttctttttttcttatttataggatcttttgggattatagtgatactaaatttttatctgttttatgttgtaaagatttttttctattctgtcattccttccttctagttgtaactgttttcaatctttaaagaccctggtgttgtaatttatgtttttatttgtttttaaaacagaaagttgtacaagggattgatttaaaccaaattcgaggacttgggtttgatgccacgtgttctctggttgttttggataagcagtttcacccattaccagtcaaccaggaaggtaagaccatgtctcttccttttcccagtggtgggatacttggctgattaatccaatgggcccaggtggaacaggagggcaggcgtctcttgctgctgatagtaaaatttagaggtagagtgaagtgacacagatcatgttgcagaagtcaagagcttggagagcagttggtatgagtggggtggtgttgacgctggattaggggractaggctttctaaaactcaggagccacagtgcagagcttggtaaaggaaggatatgagattgttagctaggagtgattaaccttgaaacacacaggtggttttgatgttttctgagaagagagtgtcagtgcttgcagtttctttgtatacgatattcctattccgtgcttatctgagtggatgagccaagtcctttgaaaggaaatggaacatggtagacagggccatgtgacagatagaagstagaagcagatggcctctctattttcagtagccagaccaaaagacattcacattaaatggtgttgtcctaatagacacttgtgagtacagaaatgagctgtttgaaatgtaaagtgctacttgggtccaccatcagagatttttcacagcagataaggttgtcccttttggggaattttagccaataacgtttgtactggggttacaaacccgaaagtctattaatatattaatgtaataattaatacattagtcagatgggtaatgtaaatgagtaataggccaggtttgagaaaaaccactgcacctgtgtgaagataaatttcaactgatatttaaccttgtaatgagcagaygacattagggagcagtggaggctgcattgcactggaaattgcatgctccatctgaagggaagggccagctctaggcattgtcagtcagctgttgccaagatagccattgcaaacatatttggggctagattctgttagagaacccttgattctgcacactgttgcagcagcatctttcttaactgttggctatgaggtagtagggtacattgatacacagtggaattagagttaggcggggactctgattgtagctctgctgttgctgagctgtgacaccttgggcaagccacttaactctgtgtttctcagttttcttctctgaaagaatttgaatgaatcagtagctttgctgtgagaatttagtgagagactgatacttaaaatgctcagaaaagtttcttccatcagatgatgaattttttaagttaagagaatattccggtcactactgtggacctaatgtatgaaatagtgattattataattataaggactataaatgatcatctatttgcatcccttttcactataagtgatcactataaataatcataatcactatgtgctgaaaatggatgcaaatagatgaatgattagagcacagtggtaatgatgaccattttctgcacagacacacacacttttttccctcttcttgcgacatttattaacacctcctgtgttccaagccctgtcttagcaaatgctggggcttcaaagataaatcaggacggttctttttcttggtggctgttcattggctcagttggcactgttctggcccaggacagggcagccttgttctgagccatttcagaaagcagagaccaaacctgggtagagcaaacctcagctctgcagcagcaagcattcactaattacaagatgtggccagccacagacctggccgttttgggaggctgtcagtatatcttttatgggctttatttaagtaaaggtcaggtgattgttygggatgccatagatcagatgtctcttactgttgatagtgagatttagaggcagagtgtggaggctagaaatcaccgtcccagaagttaaaagcctggagagcaattggcacgagtggggtggtgttgggggcagagttagagggaacttggttccataaagcacaagagccatgttagagagcctgattttgggtggractttagatactaagagtcctgtttcaaggattttgtatcatctgatctgctaaaatacatgtttacttatttatttttattctggctgtgcattagtatcaactggagatctttttaaaaattgccaattcatgagccctaccctcaggatttgtattcacttgacttgaggtggagctagggtgtcaactttttaaaaaagttttctcagtaagtctagtatgtagagaatcactgggsacagattaacggagaattaaaatattaggaacagaacacttgaagtggaagaagacagttccttgttaaatttgcttaaatatgtaccctctttggatgctatttttctttcattgtaggtagaatggcttcctgttaacaaatcctctattaaaaaggtaactaggttatcactctaattataagtgttgaaataactttattccacctaaaaggttaaagtgtacccattcatcaaatgcatccagctgcaggtgccctcatcagtttcttgcctttcaacagattgtattaaggttagatcttttatctgaaatgaattatcctgtgcaagaaaatgaaattagaattataaaggtggtttgaaggttctttagagactcctacctgcatggcagcgaccaactcttgattggctaatgggagtaattgtgaggagcagagagtggggtcaggaagattccagataaccctaatcatgcagataacctaaaaccaaacccataagaccagcaaaagtattgcygtctttagatgttaaccaaaaaattataaacgaataaattaagtacaatagtttaagaaaattcagcattagtctatgataaaatagtctcatttgcctttccttgtttgactcttcttccttaaagatcagaacaacccctgggctggacagcagcacagttgctgaatgcttcctacccctgccactgaccaaactcagagccttaccctgattgtgtcatctcagccataggagctcttgggagggagaggaacaaagggtgataattggggctgggagagggagttatgacctagtctcctctgtgcaacagatacctaatgtttagatttttttgctgattcataatawtttttcccctcaagtatgcctgcaacacattctgtgaacataaacatgtattttagcaaggtattaattaagtgaatatatggatgaataatctacccttaggtaaagtgaggtagctcaaatgtaactttacctccarttctcttaaacgacaacatttttgtgggtctgtgttctgtttcccatgctgccttattgtatagaacctctttctcactctttcctcacctgcctagccattggctagtcatttgaagaattaaataaacactttcctgccttttgaaagctttctgtgcagctccaggctcagctaactagagcctgctctttgctcctcctccacattcccatgtctggtactcttgttctggcagtcaacacacagtatagactctttctcctgcagacatatgttgcttaagggcagaactgtggcacattcttcttgatatcctagcatccaacactgtgcttggcatgtagtagatgctcaataaaagattaaatgaactttcagttttccataagagctgaaaaaaattaacttctcagtttttatctaaaacgaaaattattaattctaatacagtaatgattctgtacaattttcattgtattgttctgactgcattttgagagcatctttatgtagaggcagtagtagctgattggtctgtctttactataggcagaagtttagcaacaggtatttttaccttaaagtagctgtagatttgttctgtacagtacttaagaaacaatactgatattgtccycttcaacactcacccacccacacatacacccacatcctgattcattgatggttgtggaataggagctggacatcagtatttttaaaagttatcaaggcgacgctaatgtgcaactaggtttgagaactagagctttgagcacttctgttagatagaggaacaattctgtttacaaaaaattctttgacattcctgtggaaggtcccatgtactctgtattattttcaaagtattagtataatggtttgtggagcttttgtgggaggtgatatctttscagttaggcaactgagcccctgccttgttatgcccatgaccttatttaggtatcttcttacattggctttttttgttgtttttttttttggttttaattttaaacattcttttcaaagatgtggaagggtaaagaaagcaacatcttcctattcgcctaccactgaggataaacatgaaattttgccatatttgcctcagctccttttattttaaaaaaagatatttgtaacttcagcttttcacctcctgcaggtaaccattctgctgtagttgctgttcttaaacacattgtttttgtgcttttactacatatgtgtatacccacaacaacaaacagtatacaatccttcctctgtatctgaggggtacttgttccaggacctccttaagaccataacccacagatactcaagtccctgatgtaaaatggcatcgtatttgcgtataacctatgtacgtcttcccatgtacttcagataatctctaggttacttataatacctaatgttaggtaaatacttgttatactatattgtttagggaataatggcaagtaaaaaagtctgtacacattcagtacagatgcaaccatccatttaaaaaaatatattttcaatccacggttggttgaatccacagatgcagaactcacagacatggagggctgactctgtgttttaaagtatctcagctggtgtccttgttcatgttactatgtctaactctagtttattcatttaagaattgatttatctgttctctatgcagatctagttccaaaatacactttgtgcatttcccagctgtgagacattgggtacgtcttcactttcaagagtctgtcattgaaaaacaggggttaaaaacctgtatcagagggttgttttgaggattaaatgtgatgatatgtgtaaaatgtttagcacagggcttgggagacaaacacacattacaaacatttactattagcaagatatgtagtgctgcggttactttgccattaaataaaataatgtgtgaaaatataatacctggtttggtaactgctgggtttcttttctctttgccctaataatctctcgggtatattaattgctgttctgcaacttttgccatcagaggcatcagagggctgttaaaggatttctggcttgcccattggtacaggatgaattaacagaggctggggagagagataaggagttactgtgtggactacagggtggtaaggcaggatatgaggggcagtgctccttttccagctggttttaaattctcctccttatgattttctcctcctgagggcctactttctgagaagtacttgccatatcctttatgtgcattatcttttgtttaaaaacttcctgaattatacatcttcatctgtaactgtatcttcatctgtaactagcattccctgttagatctgcctaattccaaaacccatgagcttcccacgccagcaaacaagccaaccaaatgaggaaaaaaaaaaaacacctacataaactaattttaattaaagtgaccagaaaaagtgggaatataagcagttaaatgccattgtttagctattagatgtattataccgtcaaagtatttatccatatttaaaggagacagatcttagaaagtattgtcttagtcttatttcatagacacctttcctgaatgtatgcccagaaaagtttttctagaacagaagggataagaaaggaagggaagaatttgagagagaatacttgataatataattwattggtagatgttttctgcttttaatgtagacatttattctaaggtcatggtcagagaacacatgactggacgggaaattccaggcctggggacagtgctttcctcagccttgctggtgtcctttcattttgcacactcttgatacataaaattatagaaagtacatagcattttgatcttgggaatccataattgttcccttgaattagaaggaagagaatgtgtgtccatctgcatctccctctcgtttctgctaggggattcccatcgaaacgtcatcatgtggctggaccatcgagcagtcagtcaagttaacaggatcaatgagaccaagcacagtgtcctccagtacgtcgggggggtgatgtctgtggaaatgcaggccccgaaacttctgtggctgaaagaggtgagtgcatagggtmtaagagaagataccaacaatagtagaggattcctgttactgtggacctgtasgtaccaggcaccctgctaaaatcggttatgtttgatttttcccagcaactaggaggaaggttgatcccattttattgattacagtgtagttaaatcacacctgtttttatgtgcctaactcatactaggcactgtgacaagtattgtacacattrtctctttgaaggccaacgaccctatgaagtgtttgtgtgtggtgtttattttagggkgtctgttttgtagacaagaaaacgaatgttcatagagataaaacaactcactcaaagtgacaaagtaaatatgtgacagaaccagaatttgaacctaagactggctgactccaaaatcatttttttttaattttaaaatgtttcttttgtagagacttggtctcactattttggccaggctgatttcgaactcctggccttatgtgatcctgcaaaagtgatatgattataggtgtgaaccactgtgcccggccatccaaaatcaawtctttttttttttttttttttttaagtatcaatttctcttttaatcttagacgtcgtggtggaaggaaaaatcagttagcaaagaagcaatctcagaaaaagtgtatctttttgatgcctttatgccttttttttcctctttttttttcggttattctttattattatactttaagttttagggtacatgtgcacaacgtgcaggttagttacatatgtatacgtgtgccatgttggtgtgctgcacccattaactcgtcatttaacattaggtatatcttctaatgctatccctcccccctccccccaccccacaacaggccccggtgtgtgatgttccccttcctgtgtccatgtgttctcattgttctattcccacctatgagtgagaacatgtggtgtttggttttttgtccttgtgatagtttgctgagaatgatggtttccagcttcatgcatgtccctacaaaggacgtgtgaactcatcattttttatggctgcatattattccatggtgtatatgtgccacattttcttaatccagtctatcattgttggacatttgggttggttccaagtctttgctgttgtgaatagtgccacaataaacatacatgtgcatgtgtctttatagtagcatggtactggtaccaaaacagatatatagaccagtggaacagaacagagccctcagaaataatgccacatatctacaactatctgatctttgacaaacctgagaaaaacaagaaatggggaaaggattccctatttaataaatggtgctgggaaaactggctagccatatggagaaaactgaaactggatcccttccttacaccttatacaaaaattaattcaagatggattaaagacttaaatgttagacctaaaaccataaaaaccctagaagaaaacctaggcagtaccattcaggacataggtatgggcaaggacttcatgtctaaaacaccaaaagcaatggcaacaaaagccaaaattgacaaatgrgatctcattaaactaaagagcttctgcacagcaaaagaaactaccatcagagtgaacaggcaacctacagaatgggagaaaatttttgcaatctactcatctgacaaagggctaatatccagaatctacaatgaactcaaacaaatttacaagaaaaaaacaaccccatcaacaactgggcaaaggatgtgaacaaaatcaattcttttaatacccagtattctattggagttcagagaggttaattaccrttccaatgagaaagcagccgaggtgggatttaagtccatatcttctgaccagagctttgctgttctgtacacttttagccccaacttattaatatttggccttgttgacatcttaggctttccctttctcatcccacctgcactcgagtttctcatccttaaatgatatggcaatctctggtcaaagcacttgcaggtggctcccatttccagatgttaggacttctttctgaagtgtggagaatggtgatgtcagcttaatggttcccattagagatggatgtgtgagaaagttcaagtcctttgggaatctcaaggacttgaaaacctctaggtggtctggagaartagagaatccatctaatgagcatgacctgctgtgattcatttactggctctgagatttcaggtgggctgagtcttctattactcagattgtaaatggagatggggagagcttaggttgctgagagggtgcctaaggattgccatcacggggcaggagagtggtaggaaagaagggcttcagcaatcaaagcaggcttggctttttagctattttatatattgagctgttttgtaagttttaatctacataaaggcttctgtggttgctaagagtttgaaaacagagtttcttaggagtcaggagttttcaagaatctaattctgactctactgtcaacaattgtatgctttggtcaaagcacttcttatttcaggcctcactttcttcatgtataaagtgggagagttgtattaaccagtttgaaaacctgactcgggtatatactgaaacacaaaattggaatatagaactgttctgcgctgcccggtaccctgctttgagttgtataagcattagttgattttaatcctaatggtctgtgcctggtagatagcacaggaaactgatcctaaggaggttttcccaaacaggtgatagagccagaatttaaatccatgtctgctgggctccaaatctcagcttattccatcatgtcatgcagtagtaaaatccctctgtgaagcatggctcttggcgtaggaccaggaatgatggcagtggtcttcttcaatttggcctaaacttgttgctatatcaacaagtttggattggatatatcaccttttttggcaacacagaaagaaaagttatactgagttaagcaaagaggattgggcggagggtcattggttcagtgtcagggccttctagagcacttgccatgtggccagctccagcctatatcccaggagatctaaatgcatatctggcacgaacctctcaggattcttaccatctcgcacttgagataaaactgcactaaataaatcccataggaaatagttaaagtctagattacatggcagtgtttgtgaccctctgagaacatcttatattaatttattttaaaaaatcaattttctttcagaattttctgagtaagcctctagtgtggggtgtgttttggtaagcatgtacaggaattcttgctgagaattcctttggctttaacatgattgcaaaatcaaaattaaagagatttctaaagtcagttttagcatcttcttaaagcctgaccaggagggctatagtgcttctcagacttcaatgtgtaaatgaatcacctggagatcttaggttctgattcagtagctttgggatagggactgaaaatttgagattttgtatttctaactcaagttcacgggtgatgctaatattagtggcctgggaacttgtgaaaccacttttaattccaaaagctctgctcccctaccctgaaaagcatccacttttggggaatcagggaatggtacctttgtttttaatgctatgatgggagacacaggaaagtttgatagcttcagtagagctgctcaagtgcccgttcagtataaaagcatgagattctgtgttctaagttcatcaagctgtcatgtgtttactccttcttcattctttaattcttggaagtctgtactgagctcaactatgaaccagcaactgtgataggcactggggaactggggacaataaggactcaaccttaccattgagcagcacacagtccactagggatagtggtaggggagcataaggaatggggtggatgcaggagtgacatgaaaacagagccatcaaatgtactatgcactgtgatatagcaatatacaaagtgctttgggaaaaaggatttgcttcccagaggcaatagtttgacaggagcctcaagatatgagtagaggttttgcctagcagagaagataggaaagacattctgaagagagactgtggttcatctgtgttatggtaggtgagtcccagggcatgagctggggtgcttcagcaagcatagcaggagatgaggccaggtaaatagtctgagttyggcttattaagggcttatttggtgatagggattggttgatggttgttaagcaagggaggggctggcttaggtaactggcagacatgtggagattggattagggtgagaaaatgtgtgtgggggagtaagaactagagttttctcattcccctgatgatagcactctgatggctttgcattgctctgttagataaattccagaaactgaaacatggactagaaaatggtgcatgatgtcatttttacctcttcctctctcgtcactgtttgtcttttacatcctagctcactatatcccatctacaggaatccacttagagttttttgttacatgagtcttggctagaggttggcagactatggcacccaggccaaatctggcctactgcctgttattggatggcttgagaaaatgtaaatggttttacattttcaagtggttaagaaagaatcaaaaggatgatattttgtgacttatgaaaataatatgaaattaaaattttagtggccgtaagtaaagtttgattggaacacagccacactcatccatttatgtgttgtttatgtctgttttcacactacagtgacagctgagtagttgagacagagactatgtcgcctacagggcagaatatatatgtaccatctggaccaacagatgaaaagtttgccgacccctggtcttgacaatgctgagtctttcacctacagtgttcttccctctactcactgctggttcttcctcatcatttaggtttcagttttatttttgctctcttgaaaagcctttcctgatcctcaaatacatcagagtctcttgttattacactcttaattttacttcattatatctttcgtaaattgtaatgctacgtcaatttttgtggtgatttatataatgcttgctccaaccattgtaatctgcaggaggatagagatcatatccacctcgttctttgctatgtcttggtccttaaccaaatggctggtgcacagtaggtgctcagtacatattttctgaataatttgaatgactcaataactcaataaggggctgttacagtactccatgggagaactaatgagacctgaatgaggcactgtgagatggcaggagatgggtcctagaaatttttagaggataatatcaatagaacattgacactgattggctgtgaggagtgagtcagatggaggagccagagctgaccactcacttcgttattgctgtcatttatcttctccttgtccttagcctagagtcagatgtcagaggaagttgggcagaatttggggttttatctgtcttgagatgttctaggaccaccatagctcttgaacaaagtcacctggatcctagtcctgcaaatatggaatttaatcatgtccttttcatttaaagtttatgtgtttcaggttgacatttgtctccttaataagaattgtcagatgaaaggaaaaatgccatttgaatttttcataacccccagcagtctggcttttccatttggtctcaatgattctgactctcatcttaatgaaggccaaatgtaaattaagttctgtcaggcttgagcagctgrggtctcctatctttataaacatgaaacattgtagggttaacaaggtgcagactgaggaaggtcaagagagttgctgagctgatgtggatcctgacagctcaatgttaatgggaggtaattaacgtggcttgtaggggctacatggagatcttccaagctgtcttttaactcatttcctcttttgccattgtcagcagagcagaaagctaatcattttatagtttgagatttttcttgcttattccaaagttctggaaccaactgtctggaatgtcacaggattttgttgatggattcaggaaatatacctgctgcttctctctcccctgtctgtgcccctgtgcttctgtcctcctgataacatactgggaaaatgaggaaatgattctccaattggtagattctttggggggaacctgggggtttggatggctagagaggtggtttgataacttcctgctagctgtggaagctgtcacttgagtgctttgcagtaggaactgctgaaaagaaaaccctgctgcaggtcagggaagcttggttcttctagttctttctgtaacttgagaggctggacgaagctaatttttaaaaccttatttggccttattttgtcactcttgttgatgacataataacaccttttctctatcttaaaccttagtctaatcttgaaacttcatgaaagatagacaatataagtttctttccttgaaatgccatcatttaaatagatggcagtatggtggaaactagtctttcttagttagttactgtctaattactattcaactgtgttcatcaggtcttaatagtagcactaatacaagatattgaggaactttgggagatataacacaaatctatacagaaaagtacaggatttggagccaaacttgcatttaaatttttctgtaccacttaccaattgtgggatcttggacaagctaaaatcaacttctctgagtctcagtgtgctgagctataaaatgargacaatagtatcagtcttgtagagttatgagttagtgaggtatttgtaaagtggcttatatagtagatactcaaatggtactttattttcattatcattgtgtttaaaagtgcttgtttctactgatgggcatttcagtaacatcctatcactaactgagataattttaaagactaaaatatcctatttcatggggctggccataatgagtgatatgttttttcctgttttattaaggaaaattctagaaaccatcatcaaagtttctagagacaatcatagaaaatagagaatagaagagcacagaacatattttcagtcattcatttatttgaatcacccacatcctatgtgtaataccaattccaaaggcagccaacttcgagctgtaaagctgattaacttacttgagtaccttctacttgtttcccttgacatttaccagtgccgccagtctcagaatgtttttacttcacaagagttattttatttaatctttacagcagtctgtgggacagatattatctctttttatattaccagatgaggaaactgaagctcaaaaaagttaaataacttactcgtggtctcatactatgtaagcaaacccatgtcaagagccacaccattagctctgttccctcatctgctaccttatgggaacctgtgcactttcagtgtgggaatccagaagtggtctctgccaccaagaaattacagtctagttaaagaataaagatacagagcaaccaagcagtaagagcagaacaagaaaatagatgaaaataagagctaaagcgtatgtagtgcttgttaatacatctggtacttttctaagcattttacccatgataattcatttatttctcacagctaccctataattattgtatttttcttttcttttcttttttttgagagggtcttgctctgtcacccaggttggagtacagtagcacagtcttggctcattggaacctttgcctcccaggcttgagcggctctcccaccccagcctcctgagtaactgggactacaggcacacaccaccatgcccagataatttgtgtatttttttgtagagatgaggttttaccatgttgcccaggctggtctcaaactcctgagttcaagtgatccacccacctcggcctcccagagtgctgggattacaggtgtgagccactgtgcccagcctaattattgtcttttacagatgaggaaacaggcacagagactttaagcaacttgcccaaggtcactcagctaataagtggcaaggctgggatttgaactttggcatttcacatccagagtacgggcttatcaccattttgctctactgcctctttcagcgtttgctttgcaggctttgcataaactagtttagggaagaaatttgtgggtgatggcttcgggaggatctgaggctgtgaacaatggtcagtagcttcattgtttcatttaagaaatactgagtgtctcctgtgtgagaggcactttgctgggcgctggagatgccaaggtgaatgagtgggataagggccctggggtaggcttctgggaacttagagtctagtgtagagaggcagaaaatagacacacacaaagtaattttgttttctggaaaatgctacgaaggaaaaacacagakgaacagatttggcatagcgagtgtgggcctctcttgggagtttttgtttgacctgaatgatgagataggaaggaggagcaacagattcactgtgggggaggaaagcacctcatgagatcagcaaaggaggtcagctgggccaggagggtatgagcaaggcacagaggcgtaggagggggtttggcgaagtgggcaaaggctgctgcatgcagccttgaggccaggggcaggagtttgagttttattccaagatcagtgggaaatggttgatgggctttaaacatgggtgtgacacagtatgttttatgaccttaaaaaaatcattctggcatatgtgctaggtagatagtaaatatttgtatagcaacaacaaacttcatactgttttttttttattattatactttaagttttagggtacatgtgcacaacgtgcaggtttgttacatactgtaatgttaaagggaagaaaagttagaagactaatgaacagtcttataaatacatttgtttaaagaaactatcagtatggaaaaaaagactggccatatacacacaagaaaacattaatactggtacactgttcatggttggaagagtttgctactgttttagcacaatgctcatgcttttattacttagtaattttccattcaaagcttgtagtcatagctaacctttctggttgacaacacttcattattgagcaagggattttttttttttctttttgggcttattttcctaaaaagcaacatgctagggacttcacaggcagaattttatctctgccctttagtgacacagtgtaacagcatgctgttttactgtatctgtgtggcagtatgaggaaaccaagactcagaggacttaagtagcatccccaaagctacacaatagtaggttgtagagcccagattctcacctagtccagtctgcctccagctcctgggatctaactattgcctctcactgcctgcttttaaagggcactcatttcttcccacttgccagggctacaggctggcagaccactggctgaatctggtccccaatcaggtttagtttgacctaccatgtgcttggaaaaaaaaaataaacaattttaaattagtttccaatatttaaaaattgagaaattttatctgaaaattcagattatttattttcctgaataaataatgaaagaacttggcaatacagggtccacacttccatgcagaagggaacggctggagctgaataggggctgccttctttagaaggggtcggcattcttcattttgcagcagtcctcacccagcctgctacactcatttcctttttcagccctacccctctgagcacttgaatttgagacttaggctgtgggaatttgttcaaggaatctrtcattacttttcctctagcaagcgcttagagaaatggaaaggcattccagatggcgaatttcttggtccagggctctcatgattccatgcctgtattctctcacacctctgggtctttgctcaggtttttccttctgcctggcaaacttatagtaatttcttccttcaccaggaaaacttataataatagttcaaaacccagccttcactgcctccaggaagccttccttgacttagggtcctacactctgtcccctgtggcattctatgcttatctctaccctagaatttattgcattacattgtgctgtatttatctcagtgtccctagcctccagagcaatgtttaaattctaacattaataacttattatatattttgatgggtggatgaatgagcggatgaacttattaaatcatctcatgccatttttgatggctaggtgcatttgtccaatcatttcattccaaactaaaggttcactgtatgcccaacataagttaattttctcttcctcattgtggaaaatgagatttgagcattactgttcctttccatcctagagccaccccttggctgcagtcctgttaccggagtcacagcttattttgtatgcaaagtgaaggctctagactgagacagtaactcctctgggcctctccactgtgtctttggactcctgtgatggataccactttaagttgctcccttcaccccccaggagaatccaagactcatcttctcaatcagaaagactttctttagaatgtttataccagggccctgtatattggaccagattcctcccagcctttgaggaatgaagacagtattgtcagctgctgttagggcatgtgttgtggattttctctccagggtgggtactggacttgtaactaaatacacagaatgttgaggctgatggcttgccttcatctacctggacagtgaatcctttccttattatcctgtatttgcatatttgatttataccaaatatgtgttgcattcttttagttttatagtccagcaaagtaatttttaaaaggcagacaaaagaaaaaaagttgttggccagataccttgtaacatttaataaatgtcagctattattataatactttaaaaaattttactttatggctatggcagactttcataaatatttcctttatatgatctatgacatgaccttgtgggataaatattactacttctcacattttacagatgaatacaagcctcaaagaaatgaaatgacttctctacaggtatcaaatcttggtgaaggtcctttgggcttaaactggagccaaatgaagtcccttggatcttaatgaaggtycttttggctttaaattctggtatatgtgtgtgtgtgtgttattctgctgtaccatgtttcttcctcatttgggttggtggattttcagctccataaaagcagggaccaaatctatcttttcataccttactgttttatatccccagagccaaacacagtgtttggcattgaaaaaatactcaataaacatttactaaatgaattcatgtcccctggccagccaggagctagccatgtgactgtagtgctgaagaccacatgcctggcttacctgttgccagtcttcctgacggctgtgcagggatgttggccacctctaggagtcattagtgtaaccagagaggtacgaggaaggattgtgaagttaggcttgctttatgtmcacatggtatgattctgtgtcgatcaaaaattgaacaaaattcttttctcatagtggctaaaatggaagtcacacttactggaggaaaatacgatctttatagaaacaacactgaaaaggacaatgcatttaatgtgtgttgtgatacagtaactcatagcgtgtaaactgtcaacttggaaatctagaggctcagggtcaatggatgtccactgatgcaaggaaggtggcaggctagaagtccaaaaaggtgcaaaatggtattcttttggaggagtaagtaaatctcatttctctgaacacctgggctgttttactttcttttttcctattatccaaagtgaccataattgttctgttattgtagggatatattcatttaatcagtgaaagaaacttttgtctggtaactactaggtacaaagtactgtgcttggtgatggggaggaaaggaggaagccaagctcaccctttatctcaaggaattcccatatctagtaccaagagcgagaggctgtgaaagccattacccgccctgccacccccccgccatgttttattatcaaaatttcaaacatataaaaaagttgaaaaacttttacagtgaatactcagagccatcacctagagcctgccatggacatttactgtccttgctttatgacttatgttgtttccatctgtctgttcctctactcagcttacatttttggaataagttgggagattgttacacttgggaaggcagtttgaaatattaaaagttgtttacatttctgaaatattaaataagttttagttaagatattgactttgttttattgctatctacatacatggccaacacctgtactagactttattaaatatccactgtgtgctttcaaatcttctatcccatttattcttatgaaaatcctgtgaggtagatgttatcacttgctttgcagatgaagaaattgaggatggagggagttaagtagattgccacttatcaactttattacctctggcaacgttggaatgcaaacccaggtttctgactctaagaaatgaatttgaaaaattattgtaaaggttagctggtcaaacaccagcctttatcacacaggtacccctgtctacagataagacatcattggagcttacctaagtaaagcaaagcaagcaattagaaaatgagagctctcttattttgctgattaattattcattattttcttaataatgactttatttttctatcatttttagtattattacttcactttgattagagaaagcaacttctgatggtttaagttaaaaatcccagataacacatttgtttggcataaatttttaaggtaaatatgaactctagaataaaacgttatcaaagttattaaaagtttagctgttcaaagttagactcaaaatgaaagaatcatacttgagactgggtgagatctgtttcccaccactatgcaaactctgacccagggcctcttttgtttgtattccagcacattatagttacctctccaagagctgactttgtcctcttctttgcattcccctgaggtatttgtagtgagaaagaatgactaaatgatggaatgagttcattacctcttctgaacccaggggtcttggaagtgctgacacagctaagacctccctggaggcttgtctgttcatccagaatggccactctggattcctataaaggctcctgtctctctgaatcctccctgtatggagaggctatggattagataaacttcagagtgtttagtaataaaaacaagcttgatctcaactctgtggccctgtcaatacccatacctgcaccctcttgaaaagctacatcagtgtagcttctaggcttgtaatctgaatgatcagtgtcttttggctcaaaaatgcaaagtgaaggaatattcagaggaaattagagagctgcctaagtggctctatcctacctggcctccgtttctcattatggctttgctaaagggtctgaaccgtggcatggacgtacattttttctcagtaacgccacatgtgtagagtattgatgcttacccaagcaaagcaaaacaagcaattaggaaatacagtctctctctcattttaccgattaattattcataattttattgataataagaactttatttttctatcattgttattattattattattattattattatttcaccactgattagtgaaaattattggtcctggactatcaccagtccctgttctggcatttgggaacaactggtgcgtgtaagccctgaaactctccttcgtgctggcattctgtgaacctgagagagatgagaagagaaccagggactagagtgaagcctactgcagttgtcttggcatgaggctgtgtggcttggctttggctgggagtcacagacaagcccacggacctgagaaagagagtgaatcactgtacaagtatttatcgagcacctcccatgtcctgggaagcagtagctggagagtggtgaaggagtactgagttttggggttcaagtggccagggctttcccccaggctttttacctattatctgcattatctgggcaattcagttcacttatgggccttagttttctgtctaaaaaattgtgttgatatactattatgtatcagaaggtatttgataaattgcagaatgctggtggtattgatagattttcagatgatagtgacagaaaaagttgattgttggaaagaaaattagtgaggtctatttttcatatacttacctttagaggcaggtawgaaatctaagagtgaagggaaatggaattcacattgtttgaagggtaggaaattttaaaaatagtgctttttaatcgtccggaagacttggggagagggtattattcctgtttgagtgggtgggaacagtctgagagacacttacctcatgcagctactgagtgggtagagctggggcccagctcagatctaactccagcctgtgctgtttctacagcagctcagaaaccaaagttcaggggagcagaggagctggagacagtgaatccatcctgaggcccccctgagtaaatgcttccagggcaattccacttgcactattattaataccttacagggtgtccttcacaaatttctcagaatgatggctgtaaaaatgggtgtgtgttttagaaataaaaatattgtggtgctaacaagttcctgccggagttgttcaaggacgttcattcattcagcaaatatttattgaaaatttgttttgttccagacactttgttaaatattgggaatatagcagtaaggaaaacagagtcactattcccaggatgctcatattctagaaaggagataagagataaagtcacagtacagcattagtgcagtgggaacttgggttactctagaaatacagcccagttaggatcgaggggctcggggaggtaatatgtaggttgtgggccagtggatgaattggaattgggtaataagcagttgaggtgaggcagtttgtaaaagctagtctggtggcagtctgaggaaatgagacctccgtggggctgcaaatgcagtatagtgagagcttagactgcaagaagctctgtgaatccgtcaaaagttcctttaagtcccttttatatattccatgctattaattacaggattctttgcaggggtgaagggggacctcatgggatggagccagttcaccctagccacaatcagagaaaggtcagaagctatttgtgacatttttcccgactcttctatctcaaagacctggacctgagaactccggagaagatgagctttgagcactcacgtcctcactgggcagacagagcagctctcctcatttcagttgtctcaagactagacagtgtrcctgagaataaagcagtgaattaaccccacttgtccaagagggtgggactgaatactagacagggccctttccgcctctcttgggtggtggggggtggcgtgtgactcagaggcagtgacatcagccatgacttcattcatccacaggaaagacagtgtgcagaccgcgaacacggctgatttctgccctcccttctcgatgctttgtcttgctggggacattgtcatggtcctgctgttatttcccacacattttattcacgtctcatgtttaagctgttctttttcttcaccccattctttttggtctctttgttcatcttttgcttttgtctttattttcttctttctcctatttaatttttcttgtttcattttctttcctgtacttcttctcttttgtctccattttccattctttccatttgctctgtcctttctcttccctctgtgtcagaaatgtatacaggaacacatcctcctgcctcctatttcttctctcctctgggcttcccactaggttattgctgtcctaacattcctaaaactgtgttcacaaaacactctccacacaaggactgatggtggctcccattcttttctgactcaagtatctaatacaagtccagatttacctcttactgcatctcaacacaggtctctcagactgagcttctcatagttccttctccatggccatggatgctgctgatgcttctgcctgcacttttactcaggccattgcctcagtgtggactgacctccatcccatcttcctcagtctttgccttccctctagacacatatctgacattgcctcctaagtaacccccttacttacctccttcccacagcactgtctccttcatgatcatacagaatccatagtttataaattatgtattttagaacttgaattattctgtactatttatacattcttcctgcatgtttcatatgcatagattctttgttccacctagccagtaactaacctgaggataggaagtatrttcctgcctttcatcttctatgagcatacctagcacatagttggccacaaaccaggactgacagaccatttttttgcaaagtcaagaaatattttacttgaaaaatagttatttgatgctaattctggggagatagatgaatgaattatagttctttcctaaaaaaagagctaagggtctagtagaagagacagacccacacgtaatttgagaagaacaaggattgtggaggaaactaatgtttactaggagtgtacaagaatgggcacatgaacatgtataatctcactgaattgaattcggctaacaatcctrtgagttaaatgttgctaccaatgaacaaagtgagactcatagacattaggtgactactagtcagaaataacaccactaataagtaggagaaccaacatttggactaaggtttgtccgactctaaagcccctactctttcctgaagagggaaggatgtagtgaaagtgacattctaagtaataataagaacaatcgtaggtaaaaagtgcttactatgtgccaggtgctgtaaacagattacctatatttgttcatttgatcccccatcaaccctatggcataggcactattattgtcctcagtaatttttataggatgaggaaattgagatgaagagtagttgagtagattgctcaaggccacatagctacagagtactagagccaggatattcactcttgcattctggctctggagaagaggcagcagaatgtagtgaggccctctacatagagtagcatattgcatgatcagaactgctgttggaccagtctgtttggagaatcagggactgtggagatgctgacaggtgaaggtgttgagaggtgaggctaaagaggcagccaggaatcatcacaaaggaccagtgccctcctcaaggacccgtgacaaaacatgcaattttcctagaaatattttctgtgaggttggaccgttagggatccatcataaggaagagtttaagttgtggtcttattctactacttgagttgtgaaggaacttttgagttgtggcctttgtccatgcccagcgggaaatcacagtggaactctgcaacagtggtgtaaatgaacaagtaaggatgcacatacccaaatagactccaaagaaatgccagttgaaacagtaaagtacgcctgtcctttacgggttggagatgattaagtttgggttgaaggacatttgggaagaaagaagaagggacatctgtgtgagccagcttggaacagatgccaggttatcctcaggtgtcccagagcgctcaacatttgatggagcactctccccactgcagcccccctctccattggtacttggcagcaattcagtggtgctgcactgacctgggagtccaagccaggaagtgaatgaatccattttccaattaaaatgaaacttctccaaaggacctgctaaccctgagagaagaaatttatcttcctggcagtctggcttgcctagaatatgtctctgctcctgaaacagactgagaaaagccattagcttgaatgaaaaaagagaaactgggacagttcttattcacaacctcattcatttatccattcattccttttatttctgcagactttaatttggcttccacatgtctgctcattcattcatttattcattcattagctaacatgactcatcatctatagatcagacaaactgctgtgtcctaggagtagagatatttaataaaaaacatagctcttgcctttgaggagctttcagtctagtgagagagacagacaaatgaacagatgatgggaaatgcagtgatagggatattcatagagtactataggggcatagcataagagcatctgactcagcatagggatgtcatgggtgatttcatggagtaggaaacaccagagttgagtcctaaatgtgtacacacatagacatatacatgctattgcttctgtttctctgaagaactctaatacagggtgatgaggtgggcacctcttcatgaattaattgggagttgaaattagaatggtggttgaatgtaaggaatgagagaagaggtagaagatgactcctttggtagaggtagaagatgactcctttggtaactggatcaactggcactggaaatcaaggaggaggaacacacttgggggaagatagcagattctgtcttggacgtgttgagttggaggtacagtgggacatccaggagacatgtctcagaggagagtttgaattggagtttcagatttggcacgttattcagcgtgtagttggttggaatcacaggagtgattgatatttctcagagagcatgggaacagtgaaaagaacatttggatgaggtaagatccctggggagcagctaaagaaaagagcagctaaagaaaaggagcccatgaaggagacagaaaagcactgatgagaagggcgtgagaaggtcccggagagtgagaggttgaggaagacttcctcatttctcccctggtcccagtctttgactttctttcatgtctgctccaagacctgttcaccctttccaaagccttctcttcctattaggactgtctccctctctcccatagatggtaccacccacaaggcatggcttgatccaggtcactgtggcatctctctcatctcctccagtaagaaatgcacttctgcattatattatgttttagagaggcagatgactgaactcaaacattgggctgggcattagcgatgcaaaatttggtctgactttccatttacccgttgtgtgggacctggggatagtcttggtcccttcctgggctttaggttcataatctgcaagcatagttttctgactccttgccttgcctgccttgaagaattatacaggtcagatgagatcatgcatgtcaaagtgctttgaaaactgtgaaactctgtagcagaagagtgaatcttgttgacttatcaggcactttatattatttcatttaattctcacagcatccttgggggaagatgctaggaatgtggctttgaggaaactggggcttaaagaaattaatttacctaaagctacacagctgttaagtggtgaggacggcaatcaaaatcaggtatgccagactccagagttcttagaccccatctacttcagccttgttttcctaatacgtacagtggtgtcacactcctgggtaaagtcagctttgctgagtatgatgagttttcattaaaatgatagcatattttatggttgggaaatcaactctagtgtggattataagtttttcttttcgtacaagaagagcaaagcccttcagggggaggaaagtaggggaaagggatgcatataaatccagtttttgaaaattaaataaactmtacagkggaattatttcattttacaaataaattctatgatgttaccgttaaacaagtcctcatctaatgggggtaatgcgtcttgtctattcaggtttttgtttcttgggtctttctcggcagtgacataaatatttattccacttgatgtttaggcctctgcttgcatctctccccggaagcctttagaaaagcctttagaaaagcctccccaggtcccaaaccctttccccsctctgagccctgtctgtgattactcattagaggcagatatatggccacacacaaaatattacaataatgttatgaggctgactcatcaaaccttggtatcaggcttattacgttattgtcatatatcatcttattaattatctcttcctttgtgtacatctttctctcgaaaggacctggctttagattttcttatatctcccaaaactctgcattttttttttcatgagttagacttggctcttgcccttcagaagtttgtcatttcaaggtagatttaggtatatcaatgaataattagggtacagcatgggatggagaggttcacagaaaaggtgacatctgagctggatttgaatcaagggcagaggtttgataaagggagaagatgggaaagtcaattcaagtagagataccagctgtaacagaggactggaaatatgaaagtgtaatgcatttgggaaagtaaaagaggtgagaaccaaatggagggtgttaggagatgagcccagaaagtcatcatcataatgatcacagccaagttggagccaggttaagagtcctgagagccagactacagagttaaaatgggattctaggccatgaggagatgtcgcaccatctttaataaaggaatggaatgggaagctttatgtttttagaaagatgcctctagtagtgcagacctctcagcttatctgcctatctgacttgaaatatttctgatgttctgtctctgtgcatgggagtttgaaacacacaattattttattcattctgagaagtttctggctgaggtttatgacctactccatgcttccagcgtcatatttcttttaagaatgacattgaagattacgtctcttcctgaaactcttttctctctgggctattggcctgtgccctaatttggagtcttgaacatagagtgaggataaggtctagctctttcttgggtagttgtgctggaaaacaacagcatgagtacttggaatgtacaggcagtactatttattgagtggggaattagggagctgttccctcccttttgtttactgctcacagcagataacccagatagaatccctttgcaattacacagtagattacttggataatcctttgtaactggtcatgcctatcttctcatgttgcccctcgaccctggtgtcactgcagtagctgcctcatttccctcacgagttccctaggtgtctagaagcagcagaaacctcacagcttccctggagtgggagggaaagggtgaaagctacttctctctgtcctgaggctggcagggcggctgcagccttgaatcttggacatactgccctacctccgccctctgcttagacccacagctgtgtgagctttgagtagtagcctcctcccaacaaatgctgtggtttgatgaagtaataattttttcttttttttaaaaaaagctgttctctttggttgctttaagctgagggattgcttaactcaaaggattgttgttggaatgcagaaggcttttgtgccaagtcatataacccaaatcacttttctttttttcttgaaaagactagtttttgttagttgcctggtaactggaggatagaaagacttaactcattcagcacagagagctcctagtttgaactctattaggccatcacctaatgagatacatctgaaattggtgtgtgtcgagggcctgctccttgcactctctaatccgtgcaacattgtgcatgggagatgataagtacataggagttacatgagctgtccaggattgaaattgtacggaaatgtgcttagaagggcttttgtttgtcttttcttctgtaaagagtggcaatagcttccattatgacatttccaaaaggcccaaaatcacacctctgattggactgggaggttcagggtggtaactgtggcatagtggaaggaaagaacatttactttagagctggaagccctgtgactttgggctaagcccttgtggtctgacccccagttccttaatgtgtgagtattgtgtattacctacacgcctctgcatcactctgtagattaaatgagaacactgttgtaaactgtggaggacttagaggacgatcactgtgtcctaatgcaggcccagtggttacaagtagagaattaattcagtaagattgaggcctttggctgggattgtatgggccagagaggaggagggacagagagatttttctgcagaactagactaaaaatccatctatgggggtaatgtgctgttggccaatatggcatttgatgacaaagcacttgtgaatcaggtagcctaatataaaaaactgcatgtggctgggcatggtggctcacgcctgtaataccagcactttgggaggccgaagtgggtggatcacaaggtcaggagttcacgaccagcctggccaacatagtgaagccctgtctcggggaggagccaagatggctgaacaggaacagctccggtctacagctcccagtgtgagcaacgcagaagacgggtgatttctgcatttccatctgaggtactaggttcatctcactagggagtgccagacagtgggcgcaggtcagtgggtgcagcgcactgtgcgcaagccgaagcagggcgaggcattgcctcactcggaaagcgcaaggggtcagggagttccctttcctagtcaaagaaaggggtgacagacggcacctggaaaatcgggtcactcccacccgatactgcgcttttccgacgggcttaaaaaacggcgcaccaggagattatatcctgcacatggctcggagggtcgtacgcccacggagtctcgctgattgctagcacagcagtctgagatcaaactgcaaggcggcagcgaggctgggggaggagcgcccgccattgcccaggcttgcttaggtaaacagagcagcctggaagctcaactgggtggagcccaccacagctcaaggaggcctgcctgcctctgtaggctccacctctgggggcagggcacagacaaacaaaaagacagcagtaacctctgcagacttaaatgtccctctctgacagctttgaagagagcagtggttctcccagcacgcagctggagatctgagaaggggcagactgcctcctcaagtgggtccctgacccctgacccccgagcagcctaactgggaggcaccccccagtaggggcagactgacacctcacacggccggatactcctctgagacaaaactcccagaagaatgatcagacagcagcattcacggttcacgaaaaacgactgttctgcagacaccgctgctgatacccaggcaaacagggtctggagtggacgtctagcaaactccaacagacctgcagctgagggtcctgtctgttagaaggaaaactaacaaacagaaaggacatccacaccaaaaacccatctgtatatcaccatcatcaaagaccaaaagtagataaaaccacaaagatggggaaaaaacagrgcagaaaaactggaaactctaaaaagcagagcccctctcctcctccaaaggatcdcagttcctcaccagcaatggaacaaagctggatggagaatgactttgacgagttgagagaagaaggcttcagaagatgaaactactccgagctactggaggaaattcaaaccaaaggcaaagaagttaaaaactttgaaaaaaatctagatgaatgtataactagaataaccaatacagagaagtgcttaaaggagctgatggagctgaaagccaaggctcgagaaccacgtgaagaatgcagaagcctcaggagacgatgcgatcacctggaagaaagcgatggaagatgaaatgaatgaaatgaagcgagaagggaagttkagagaaaaaagaataaaaagaaacaaacaaagcctccaagaaatatgggactatgtggaaagaccaaatctacgtctgattggtgtacctgaaagtgacggggagaatggaaccaaactgaaaaacactctgcaggatattatccaggagaacttccccaatctagcaaggcaggccaacattcagattcaggaaatacagagaacgccacaaagatactcctcgagaagagcaactccaagacacataattgtcagattcaccaaagttgaaatgaaggaaaaaatgttaagggcagccagagagaaaggtcaggttacccacaaagggaagcccatcagactaacagcggatctcttggcagaaactctacaagccagaagagagtgggggccaatattcaacattcttaaagaaaagaattttcaacccagaatttcatatccagccaaattaagcttcataagtgaaggagaaataaaatactttacagacaagcaaatgctgagagattttgtcaccaccaggtcggacctaaaatagctcctgaaggaagcactaaacatggaaaggcacaactggtaccagccactgcaaaatcatgscaaaatgtaaagaccatcgagactaggaagaaactgcatcaactaacgagcaaaatcaccagctaacatcataatgacaggatcaaattcacacataacaatattaactttaaatgtaaatggactaagtgctccaattaaaagacacagactggcaagttggataaagagtcaagacccatcagtgtgttgtattcaggaaacccatctcacatgcagagacacacataggctcaaaataacaggatggaggaagatctaccaagcaaatggaaaacaaaaaaaggcaggggttgcaatcctagtctctgataaaacagactttaaaccaacaaagatcaaaagagacaaagaaggccattacataatggtaaagggatcaattcaacaggaagagctaactctcctaaatatatatgcacccaatacaggaacacccagattcataaagcaagtccttagagaactacaaagagacttagactcccacacattaataatgggagactttaacaccccactgtcaacattagacagatcaacgagacagaaagtcaacaaggatacccaggaattgaactcagctctgcaacaagcagacctaatagacatccacagaactctccaccccaaatcaacagaatatacattttttttcagcaccgcaccacacctattccaaaattgaccacatggttggaagtaaggctctcctcagcaaatgtaaaagaacagaaattataacaaactgtctctcagaccacagtgcaatcaaactagaactcaggattaagaaactcactcaaaactgctcaactacatggaaactgaacaacctgctcctgaatgactactgggtacataacgaaatgaaggcagaaataaagatgttctttgaaaccaatgagaacacagacacaacataccagaatctctgggacacgttcaaagcagtgtgtagagggaaatttatagcactaaatgcccacaagagaaagcaggaaagatccaaaattgacaccctaacatcacaattaaaagaactagaaaagcaagagcaaacacattcaaaagctagcagaaggcgagaaataactaagatcagagcagaactgaaggcgataaatcgagacacaaaaaacccttcaaaaagttaatgaatccaggagctggttttttgaaaggatcaacaaaattgatagaccgttagcaagactaataaagaaaaaaagaagaatcaaatagacgcaattaaaaatgataaagggaatatcaccaccgatcccacagaaatacaaactaccatcagagaatactacaaacacctctacgcaaataaactagaaaatctagaagaaatggataaattacttgacacatacactctcccaagactaaaccaggaagaagttgaatctctgaatagactaataacaggctctgaaattgtggcaataattaatagcttaccaaccaaaaagagtccaggaccagatggattcacagccgaattctaccagaggtacaaggaggarctggtaccattccttctgaaactattccaatcaatagaaaaagagggaatcctccctaactcattttatgaggccagtatcatcctgataccaaagcctggcagagacacaattaaaaaagagaattttagaccaatatccttgatgaacattgatgcaaaaatcctcaataaaatactggcaaactgaatccagcaccacatcaaaaagcttatccaccatgatcaagtggccgtcatmcctgggatgtaaggctggtccaatatacgcaaatcaataaatgtaatccagcatataaacagaaccaaagacaaaaaccacatgattatctcaatagatgcagaaaaggcctttgacaaaattcaacaacccttcatgctaaaaactctcaataaattaggtattgatgggacatatctcaaaataataagagctatctatgacaaacccacagctaatatcacactgaatgggcaaaaactggaagcattccatttgaaaactggcacaagacagggatgccctctctcaccactccyattcaacatagtgttggaagttctggccagggcaattaggcaggagaaggaaagaatgggtattcaattaggaaaagaggaagtcaaattgtccctgtttgcagacgacatgattgtgtatctagaaaaccccattgtctcagcccaaaatccccttaagctgataagcaacttcagcaaagtctcaggatacaaaatcaatgtacaaaaatcacaagcattcttatacaccaataacagacaaacagccaaatcatgagtgaactcccattcacaattgcttcaaagagaataaaatacctaggaatccagcttacaagggacatgaaggacctcttcaaggagaactacaaaccactgctcaaggaaattaaagaggatataaacaaatggaagaacattccatgctcatggataggaagaatcaatatcgtgaaaatggccatactgcccaaggtaatttatagattcagtgccatccccatcaagctaccaatgactttcttcacagaattggaaaaaactactttaaagttcatatggaaccaaaaaagagcccgcatccccaagtcaatcctaagccaaaagaacaaagctggaggcatcacgctacctgacttcaaactatactacaagtctacagtaaccaaaacakcatggtactggtaccaaaacagagatatagatcaatggaacagaacagagccctcagaaataacgccgcatatctacaactatctgatctttgacaaacctgagaaaaacaagcaatggggaaaggattccctatttaataaatggtgctgggaaaactggctagccaggagaaagctgaaactggatcccttccttacaccctatacaaaaattaattcaagatggattaaagacttaaacgttagacctaaaaccataaaaaccctagaagaaacccaggcaataccattcaggacataggcatgggcaaggacttcatgtctaaaacaccaaaagcaatggcaacaaaagccagaattgacaaatgggatctcattaaactaaagagcttctgcacagcaaaagaaactaccatcagagtgaacaggcaacccacaaaatggcagaaaattttcacaacctactcatctgacaaagggctaatatccagaatctacaatgaactcaaacaaatttacaagaaaaaaacaarcaaccccatcaaaaagtgggtgcaggacatgaacagacacttctcaaaagaagacatttatgcagccagaaaccacatgaaaaaatgctcaccatcactggccatcagagaaatgcaaatcaaaaccacaatgagatatcatctcacaccagttagaatggygatctttaaaaagtcaggaaacaacaggtgctggagaggatgtggagaaataggaacacttttacactgttgttgggactgtaaactagttgaaccattgtggaagtcagtgtggcgattcctcagggatctagaactagaaataccatttgacccagccatcccattactgggtatatacccaaaggactataaatcatgctgctataaagacacatgcacacgtatgtttattgcggcactgttcacartaggaaagacttggaaccaacccaaatgtccaacaatgatagactggattaagaaaatgtggcacatatacaccatggaatactatgcagccataaaaatgttgagttcacatcatgtcctttgtaggggcatggatgaaattggaaatcatcattctcagtaaactatcgcaagaacaaaaaaccaaacaccgcatattctcactcataggtgggaattgaacaatgggaacacatggtcacaggaaggggaacatcacactctggggactgttgtggggtggggggaggggggaggggggagggatagcattgtgagatatacctaatgctagatgacgagttagtgggtgcagcgcaccagcatgtcacatgtatacacaggtaactaacctgcacattgtgcacatgtaccctaaaacttaaagtataataataataaaaaaaaatccmcctagttttcatcaaaaaaaaaaaaaatggcagggtgtggtggcatgcacctgtgttcccagctactcgggaggctgaggcaggagaatctcttgaacccggggtgcagaggttgcagtgagctgagatcgcaccactacactccagcctggcgatagagtgagactccatctcaaaaaagaaaaaaaaaaaaaaaaaagaaacaaacaaaaaaaaactgcatgggatcctcacagatgcctgctggcatctcaaggtaagggatcaggcttctggagacatttcctctcattcagtccttattcctctttgctggcctatctccagacttttcttttgtagagaaagcagggaatattgctatcttcccttctgagaccatgtgcatacttaagagtacctcagacttcccacaacatgttatttctagttgctcatcccacaaatatttgttgaattactagacaaactgctcagcttcatcttccagttcctgttatgtgaggagtacttcagaggttatagagggcttccacatgtgttatctccttagagaggagaggttggactgggatctccagctttgattggtgacggttagtgtggtctcaaaaagaaagaacgcagggactccttgctcctcctattcccagtgtctctttttggcaaaaggcttgagttctttgtgacattctacttgggttctgttgtcccacagtggctggctgtgtggctacaggctaaaagctgtcgttatataatgtctttaatgaccacacacaagatctaaagtagtttttttttttttttttttttgcctgaatttaaraagattgttgtgctttggcttgaagcactggttgttgctgyggtggtttggcggttcatatctggtcactggcctttgatttctggaacctttaraaagaggctgccttttctcctctccctgaccactgattgctgaaaccacaagacatatggaaatagatttcagggactagccaaaagccattctggtagtttgaytcacatcgtctcaaaggctaccattttctgactgtggcttgttagatcctatacagagatactactagttcttagctgtgttaggaatatttagtatctttaagttttgcttgatttaacattaacatcttaraatgggcgttcaaagagaagtttagggcaggtccctttctagacacaagctttcacytagatgtttaggaagttaaaacaacaacagtaacagagaatcagcttgatactttgccttttagatctgaactcttttgatattgttttgatagggccagcacttgggatagtaccgtttatctgctgtaaatagatgttggtgtttatatagtagtgttagggaagcactatgtaggaggaactcacagaattctgataaaggccagttgtatataaaatagatataataatacccaggacttttgtgttgctctaaggagataacacatgtggaagccctttataaactgaagcacccctcacataagaggaattggaaggtgaagctgagcagtttgtctagtaattcaacaaatatttattgagttcctactgtgtgttaccctgcggcaggtactgaaatatgcctcttttggaacttctgcattgttgcctttaggttcccagagatactcctatgcttataattccttttatagctttttggagagggagtaatagaaaccaggacatggaaagttatctggatggtaggaaacctttcttgctagttcctctgtcttctttactattctgtttttgaaattctacctcttcaggtgtttgacagaaaatggccacttcatgcttttcaagtttatctcacctccagttccattcataggcagaagtgaaatggttccatttgggtcctgattctaagttcttgggagaagaaatctggttggtacaactaggtcacatgcctaaacctggtccaaccaagtgcttgtagtaaggggatgagagttaagtagtttctgcttggcagctgagggtcctctcagttggggtggagaagaggagacaatcatccaatgtcatggtgaacatgactgacaagatccttgacctcacagagcttatagtcagtctgtcaggaaagaaagacttttgtattagtctggtcttacactgctaataaaaacatacccgagactgggtaatttataaaggaaagagatttaattgactcacagytcagcatggctggggaggcctcaggaaacttacaatcatggtggaaggagaagcaaacacatccttctgtatttggtggcaggagagagaagtgcagagtgaaagcaggggaagccccttataaaaccatgagatcttgtgagaactcactcgctatcatgagaacagcatggaggtaaccactcccatgattcaattacctcctacagggtacctcctatgacacttggggattatgggaactacgattcaagatgagatttgagtgaagacacagccaaaccatatcaacattacacaaatgattgtgggggtggtatgggttgtatgacaactagacctaaactaacaatatgacttaccggctttgatttccaggagatcctggaaaccccctcaaggaatggtggtgtgtagggttaaccaaatgaggaaggggatgatgttgatcctgggagggcacagggtggtgggtgaggaatgaatgttttaggcagaagtggcaaagtaaagaaaatgcccagcagtaagaaaaagcctggccattttgcaatacagagaaccaaatctttaaaatgtacaatggcttgcttatgtggccattctctttgacttagactggaagttctttgagggcagggactatcatcttttttctattgcctttgtaaccagttggcatgtggagaattttatatggcaggggacatttagtttcattgggcagtttctgagtacagcttctttccagcttatatctgctctgaaatcttatatgtccatcaccattcactgggaaratggattgcataccttacagactgtgcttttgatatrgtttggctgtgtccccacccmaatttcatcttcaattgtagctcccataattctctcatgttgtgggagggacctggtgggagataattgaatcatgagggcagttttccccatgctgttctcgtggtagtgagtaagtctcacaagatctgatggttttataagaggttttccctttctctgggctctcatttctctctgtggtctgctgccacgattgtgaggcctccccagccacgcgaaactgtgagtccattaaacctatttttctttaaaattacccagtctcgggtatgtctttatcagcagtgtgaaaatggactaacacagctttctatccttccaggttggcaaagagggttttaagggaaattacgatcatttttggaaggatcaagcattgtcagtttttctttcctgtatragtaytgcttttatattattcctacccccaccaagctcctgaacagatgtttcaatgggcattgttggctatgcttttgttttgaaaaatttgaaacattattgaaagaggagatggtagaaaaaccccctaattgattctaayatatatttaatttggcagaacttgagagagatttgctgggataaggcgggacatttctttgatctcccrgacttcttatcgtggaaggcaacaggtgtcacagcacggtatgttaattacaagttggattgtgtttgcgttcttccattcttggatgtctgtctatatattgctttcttaactctctttgactggatatacttttggtacatctgcatgtgattttgcatacatgaaacatcttgaatctatcttcgacctccactgcacatgcccaaacactgttgttcctaagagccctggaatgtgagtatccaaggtgaagaccattcattaaaattggtcatatttgaaggagatatgaaaaatccagagtgaaatgtggatttttccaaaggcactttttacatgatgaataaaaggaaaaaataaacacacacacacacacacacacacacacacagagtcacgcattccttaaggacagggatacattcagagaatgtgttgttaggcaatttcattattgttgcaaacatcatagagtatactttcacaaatctagatagtgtattctactacatacctaggctgtatggtatagcctattgctgcttggctacaaacctgtagagcatgttactgtactgaatactgtaggccattgtgcacagtggtacttatttgtatatctaaacatasaaaagatatcataaaaatacaatgtaaaagataaaaagtagtatactcatatagggcacttacaatgaatgaaacttgcaggactagaagtttctctgggtgagtcagtgagtgagtggtgattgaatgcagaggcctaggatattactgtacacttctatagactttataaacactgtacctgtaagctacactaaatttattttaaaaatttgtttaataattrtcctttgcttactgtaacattttttacttcataaacttttaaactttttgacttttttgtaataacacttatcttaaaacacaaacacattatacagctgtacaaaaatattttctttgtattcttattcaatatgcttttttctttttttttcattatactttaagttctagggtacatgtgcacaacctgcaggtttgttaattatgtatacatgtgccatgttggtgtgctgcacccattaactcgtcatttacatgaggtatatctcctaatgctatcccccgcctccccaccccacaacaggccccagtgtgtgatgttccccttcctgtgtccatgtgttctcattgttcaattcccacctatgagtgagaacatgcagtgtctggttttttgtccttgcgatagattgctgagaatgatggtttccagcttcatccgtgtccctccaaaggacatgaactcatcctttcttatggctgcatagtattccatggtgtatatgtgccacattttcttaatccagtctatcattcatggacatttgggttgattccaagtctttgctattgtgaatagtgccacaataaacatacatgtgcatgtgtctttatagcagcatgatttataatcctttgggtatatacccagtaatggaatggctgggtcaaatggtatttctagttctagatccctgaggaatcgccacactgacttccacaatggttgaactagtttacagtcccaccaacagtgtaaaagtgttcccatttctccacatcctctccggcacctgttgtttcctgactttttaaagatcgccatcctaactggtgtgagatgatatctcattgtggttttgatttgcatttctctgatggccagtgatgatgagcattttttcatgtgtcttctggctgcataaatgtcttcttttgagaagtgtctgttcatatcctttgccccctttttgatggggttgtgtttttcttgtaaatttgtttgagttctttgtagattctggatattagtcctttgtcagatgagtagattgcaaaaattttctcccattctgtaagttgcctgttcactctgatggtagtttcttttgctgtccagaagctctttagtttaatgagatcccatttgtcaattttggcttttgttgccattgcttttggtgttttagacatgaagtccttgcccatgcctatgtcctgaatggtattgcctggstttcttctagggtttttatggttttagttctaacatgtaagtctttaatccatcttgaattaatttttgtatagggtgtaaggaaggaatccagtttcagctttctccatatggctagccagttttcccagcaccatttattaaatagggaatcctttccccatttcttgtttttctcaggtttgtcaaagatcagatggttgtagatatgtggcattatttctgagggctctgttctkttccattggtctatatctctgttttggtaccagtaccatgctgttttggttactgtagccttgtaatatagtttgaagtcaggtaacgtgatgcctccagctttgttcttttggcttaggattgtcttggcaatgtgggctcgttttcggttccatgtgaactttaaagtagtttttttccaattctgtgaagaaagtcattggtagcttgatggggatggcattgaatctataaattaccttgggcggtatggccattttcacaatattgattcaataagcttttttctattaacttttttttcactttttaaacttttctgttaaaagctgagatacaaacatacacattatccaaggcctacacagggtcaggatcatcaagatgtcactaggtgataggaatttttcagctccattaatatcttatgggaccactgtcatatatgcagtctgttattgactggaatgtcattgtgtgatgtataactcgtgtgtgtgtgtgtgtgtgtgtgtgtgtgtgtgtgtgtgtgtrtattttggcctctaatattaactaggagatacatttttcaaggaagctgattcagctggatggatgtgttatgtacttgtttgctttttatgtaaatgtacctcagttatcccatactgtagaagtatatatgttgaagtcaacaactatttttcagtaagttatgaatgttaaaaatagagcatatgctacacaatagagacttgtataaaatactcattgagtgtgaaattgtggctactataattaacagagtgagtgtatgtgtggggttacatagacaggttggacatgaaatctttaagtatgacgagcctcttgtcatgatgacctcagatttaaggagatgcctaaggtcaaggcaggtcttctcatcttgaaaaagatttagaatctgggttgaacaaacctgtgaagaagggaatcatttcccagaggatagataaacctctagtaattagggaggcaggtattgtatcttaaaatcagcttattcagagaggggtcagatcttaccctctttccttcttgtttgaattcaagggaagcgggaaatagcagtaccatttctcctatctcattcttttttgtagtgagttgatagggtgtgataattcagcagcgggggcttccagcagggagacagcagagaacatttcagaagcatgtcattcttaatgtcagcaaccccgaacctccttgcggtgaaacaatcattagccaaaggtcctggggcagagagatgcatatgcttgtgaaaatggcctctgcaaacctcaggtacatgccatctctggcaggaggtccctggaggagtgttctcaactttaccctggaaggtgtaattagtcaccattatggttatcatcagtggggagggcagtgtgtaggtgaggatatcatcttgggcattcctcttttggtgtgatgttaattgttcaaagttatttctgagagaatctttctctaggttttttcatcattgtacatccgtgaaagaaatgttttgatcattttggccaaatggtcttgtttgttagtcaagcagtgctagttgtcatgtgtatgggcaataccccattggcctgcaaatccagaggactcaaagctggaacaagagatggaggagaacgtggctttccttctctttttctttgacattttactcagcactttgactgcctccctgattctttctgatggctctgggtattctgtgtcccatttcctggtttccggtgccatattcaggcaccaaggagagggctttttgaagttagctgtggctcagataaagtgtggtggcatgcrtacacacggtggactaacaatatgacttaccggctttgattttgccacactagttgtgtgaccttgggcaagtctcttcccttctttgattgtcactctttttgtctatagcatggagattgttatacctattttgcaaagttcttgtgagaatcctattaaagcaatttttccaaattagttggagtataggaattacctgaatgatttgttcaaaacatgtatccccaggtcttctagttttcagcctaatgaatcagaatctccatgggagatgtgggaatttgtatgttaacaagtgcctaggtagtatatgatcaggtaactttggacaacactgcctaacagaatatacatgaaggtaggatgtgacactgagtgagagattggaagtgttttaaaggcctaatgaattttttgaatttaaaagttgtaaacaaaaaataaaattctaaggccccccrccatctgaatggaccccttctcttggccaaaggcattccaaatttaacctgaaaaaccagttcaggccatgatgggaagggtgtgggtaagacattcccccttatacagtcctcccttttggaattcaggacaagccaaccaatactaacatcaacaaaccttaagtctcataagaaatgtttacagtctattctctctgaagcctgctaagtggaggcttcatctgcatattaaaaccttggtctccacaactccttatcctaacccagacattcttttctattgataataacactttcaaccarttgtcaatcagaaaatttttaaatctacctacgatctggaagcccctgctttgagttttctcacccatccggatcaaatcagtattaaccttacatgtattgattgatgtctcgtgtctccctaaaatgtatagaagcaagctgtgccccgaccaccttgagcacttgccatcaggacctcttgaggctgtgtcacgggtgcgtccttaaccttgggaaaataaactttctaaattgattgagatttgtctcagatacttttgggttcacaaagtggagggcgtcttgttaacttatcagaacatgcttgggggcttctagccttgcctttgacaatctcaaaccttgaggaagcagaaagtttaatgctcagaaatgatttattggctgtctaatcatccctgccatttttattggctgtgacactcatgactcattctattttcattagtataaattaatcatcccgttcccccacccaccccgtacttgtgagcaccttcagagacctcccttcccatttccctctcttccagagagcaaagcctgtggaccttgggtaccaggttcctcttgcaaaggtggttgccctttcccttggcccacttacagcttgcatctgtgtttctctctcttatttactcaatatttctgccttctctatttctacttgcatatcaaggtgaaacaaggaacccctctgagcttccttgattgtagatggaaataatgacaacacctgctccatggggttattgtagagaaagcttctaacacaatgctgagaaagctttttaaaggtattagcgatttcatttagttccctttctctatcagttttggcaatgagtctttacattaagcatagaggaaagagggaaatccttgtggtcagactgatctggtttcagtgtctccatcatgtgcwgtctgtaagaacctggagcaaattatttacctccctgagccttatttcctcatccataagccctctcagggctattaaaacagttctctgggtaaaacctctgtttttacacaataaagggttcttttaataaaaaaaatccacattgtctgttctcttttctagagtaaggaagatgagggtctgaatttgaatatgccaattccaaaaaaactttgggtaataaaacaccaacttggcatcctctgggccaaggagagattgaaatttggtgtttatttggctcttacatgtgattattttgggaggctttggggaaaatgattgccaaaaaggctagagggtcttttttaaaaatacgttttagtagagtcaagactaacaagtgatcgaatttcaccctgtcttaaagctttcaaacttgtttttggcaatgacagtgtgtaagaacacctcctcccctttctctcttccttctccattttcctctcctctctttcaggttttgtttttgtttttttacccattstccccttttattgttctcatcctccraaatatggcagctacttttctttatctgggtcactgagaaaatcaccatttggcccatgattagtttgtaattcagctccattctttttcttatattaatgaaaataattattgctatttttgttaataataataatggtaattatcacttattgagtgcctttcctttatctgtgctaggcatatttagcaaatgttaactctgttagtcctcatgaccatccttacagcaggtggtgtcattaccgctttgcaattcaagaactgaagcagaatgctttagtaatttgccacattcttgctattaagtgggttactgtctacaattttgatgacatgagaaatgggaagtcaaacatttgaatagtaggaattttttagtagtcagaaaaatatatgtataaattctccctctaaagagatttgaggtgactaataataataatataagaaaaagtcgtacaaaatagaaaaaaatcagaatggagtgaaaataatgataagataactgagctgaagctaagagctttagagaacctttagagaattcataattactaataactttgtttccaagcttcctagtggccaaagcaaagacagagcttaatcaagattaactgagtgaacagataaaaactttactgctgttcaagggaagtagaactttttctaacattgggagtctgagagaaattaatcctagatgatcaagggtagacaatataaattatttaaaagtatgtgctattaaatttagttataattttgaacaaaattttaattttaaaatagttttaggattatagaaaaattgtgaagacgctacagaattcccatatacttgatgtccagtttctcccattaatatattattatgatacatttgtcataattaatggactgatattgatatattatcattaataaaattccatactttattccgatttttttagtttttacctaatggcctttttaccatgttacatttagtcacgccttctcaggctcttcttggctgtgatagtttctgcgtctttctttctttttgatacccttgacagttttgaagtgtattggtcatgtatattgttggatgtccctccattgaaatttgtctgatgttttctcatggtgagacttgggtagtttgtttttcggargaagaccatagagataaaatacctttctcaacctatcaagcgaacacactcttatcacaacttaacactattgatgttcaacttgatcacctggctgagatattgtcaggtttctccactctaaattactcttccaccccccaccccccaccatattgtactttttggaaggaagtcactatgcacagcccacacataaggagtggggagtagttatgcttcattttcttgagactgtagtatctacatatattactttgaattattctttatgggagatttgtcttgtctcagttcaccttttttatggctttgaactaaaataaattatttacaaggcttcttatgtacaaacaagagacactgtaagtaagtttggtttactggttaaatgttagaatttctgagacatttctgtggcatatgcgaaaacggttgaatttctataattttaggtttattatttcttatatttctttatattaaatttacatattctacttactcattttacttttcctctcccctccattataatgtataattctgtatgggttattagtaaatattctaccttttcctttaaagagatgaattcatggcttttagaaactgaagtctctttaaaataattattacgtttctgatgtgtgtggttctctgtgttttgggtttataagggatattattgkattgttattcatcttgtgggtttttaccagtctgtcaggagatgattatgttgggttattgatctgtagtcattttctaaatacaattcataggatctcaaatacaaaaccattatttagactcttattctactgatttttcttttgttaaaaaattggaaatatgctttgtacaacttatttttttacttaatatgttgtatttttcatattaatgtataaaaatatttttgacatctgtatagtatcctatcctatgtcagtatcaattttgtcaagggtttgggcttgaaatgggatcttattttaatttgcatttttgattattgaatgcaattaatttttcttatatttatcaaccacttatttatgtatgtcattgtcaattactaattatgacaattagtgttatatatttcaatgatgtttatgtcaattgctaatatttgtattgggagttcagtgttttcttcaattttggtgagaatttaaaaaaaaatttttttgcagtataatttccagaaaaatttaaacctacagaaaacttgagagartggcatattgaacacccttataccttttacctacgttaatcagttgctaacattttattacttttgtgctctttagtgcacaccttacctacctctgacacacagacctgtaattattttgctgaaccatttgtaaataaattgcagacctcacagtattctccacctgatcagccaatactaacaacattttcctttataaccacaacatcattatcacacttaaggcaattaaaattaatcctcatactcccttacaggtatccctgctgttaaggattcagagggccactcactctttcttgctattggagttctgactgatagagactacattaaaacatattagctaaatgaggagtgaaaagttgtcttattatctcagaaaatactctttagcctctagtgtatagaacttctaatatactagatggataatacagctcagaagtgcagttaaaccccgtctgcatgttcaggtatgtgtacatacataggagttggggcaggaaggaagacccgatttgccaaccctatctcaagtctagcagcttagcaatatgaatccagacctgcttgggtatgattaccacatggcagtgggaagccatgctggtcacacttgggcataggaggtgaaagtgtgagctcattattatcaccttttctttaacacagtgacccttaaaatgtggcttaatctattccagtctcttaatgattacatgaatttcccttaccgtcttggagaaaattgagtaagaggatggggtgcaaagtcaactctgtgtctctggtgcttctctgagtggagagaggaggtcgggtggaagtctcattctccccagagagcagaggcagcagcaggagaagaagggagaaacttgcaccttaatacgtgcctgcctgtggtgactacagtccacatcccttccttggtacttggcctcttcatctcctgtctcattagtatatctgagataagagttgatttttttagaaaacatctttagatgtatatagtatacataattacatataattcacatactatatgattcactaatttaaagtatactattcaatgatttttgcagattacattacttatttttattaattttaataatacatatagcataaaatttgccattttaattatttttaggtatataattcagtgtcatgaattacattcctcatggtgtgcagtcattaccactatctatttctaaaacttatttatcaccccaaacggaagctgctactattaaataataactccccatttccctctttacctatcccctcttttttttagacagggtctygctctgtcgcccaggccggagtgcagtgtcgtaattttggctcactgcaacctctgcctccagggttcaagcgattctcctgccttagcctactgagtagctgggactacaggtgygtgccaccacacctgactaatttttgtatttttagtagagacagggtttcaccatattggttaggcaggtcttgaactcctgaccttgtgatccgcccacggctgagtgaacagataaaaactttactatttttatccctccctctcccctcttaaactctaatctactttatgtctgctatgaatttgcctattccagataccccatttaagtagacttatatagtatttatccttttgcgtctggcatatttcacttaacataatgttttcaaggtgtgtctatgctggagcatgtgtcagcctttcttttttatgactgaataatcacatcctattgtgtgcatatactacattttgcttgtccattcatcttgtccaaatggacctgttggtggacatttgcatcgtttctaccttttggctattgtcaatgatgctgtggcgaacattggtatataagtatctttgggtctctgcttttagttctttttggtgtatatctaaggagtgaaattactggttccatagggtcattctaagtttagcttggtgaggaaccaccagatgtttccactatggctgctccattttacattcccaccagaaatatatgaaagttctaattcctccacatcctccccagctcttatttccctctcctttaaaaaaattatacccattgtagtagatataaagtagtctcttattgtggtttaagaattgattttttaaaatactagaaatctgtgggatgaaagtaaaattgattgaatttatatcatcctagaagtaactttttttggcaaggataccccagggagtgtcataaaattaaaaattaaaggtgtctgagagtaaggggagaagcacagttacttctgatgtgcttgatgctaaagctccttgatttgcattgttttatggttgtgttgaaggatgatttctcagaacagtggtatttaaagcagctcttctaagttctaggaaggattcagtcatcctctctcaccagcttattttttagtatatttaatagtgctgagaaataaccagtaaatattagatattctttacccttatttttgagaaagaagagtgttttcactctctacagaagaaatatccttatctcttcactaatgatagtagaaataataggcatttcaaaataacagttacttaaacacataagggctcattctttcctgtgaataaatatagatatatggagtcttgggctactgtgatttccccataaagtcatcaagracactagcttttttgatgttttttagtcctgagttctattttcaagatcacctcatggtccaagatggcggttgaagtttccattatcaagtccacagtccatgtagcaggaagaaggaagtgggtgtggtgcatacaaaggatgtgcctcacattggagtgagccttctttaaacaatcttcttagaagatctacgtcatacttgtgcttgtatattattgaccagcagctaggtttataatcaaactgaggtgaaggggaatcggggcagtgtaggcttttatctgggtgtcttcctatccaaatattggggttttcttactaaataaaaagggagaattgatatggggtgggtaaaaagacamtcaaaatcataatttctcagcaatttacattgaccagtatcacagacaccaatttatagtccaatgatagtcacaaggtaaagggagaaggtggtgatcatgagggagatagtatataatctgagcaatgtaactcacaagtttcattattcattaatacattcattcattcacttattccttacatatatattagtaaagcatctgtgaggcattctctccctaatccagtaattgataggtacacatgtatttgactattcaaacccgtataagagccaaataatccttagttcaaagttttgctctgccacttttaagataaatccgaactcagttaaatagcttgtggatggggtgaggaagagggaccatttagaaacctagtaaacctgtggttcgatgacctttttctccacctcctccctggcttgggatttgattttggctacctgtggagagagtcatccactgaggggtctcagagacattgtgggggtgaagaaatgggtaggtgcccaggagatttcaggccagcccaacctgagttcagaggcttaaagtccagggagggcgagagaggatgaagcatgctgggtcagtcgggctggaggcagtgggggagtcggagggagtaggaggaagtaggaggtgctaacatcatgagaagcatgagttaaggcacaggttctcagggactgtgccttgcacttgtactcacttgttacatcactgactgtccctctctgctacattgaggcaaagtctgaggaaggttgaggttgcttctttctcttttcattagtaaagcaaatctggatagaaaagggtgagaagccccatctttgtcctttggaggaaagggtaaaactgtgtgacctcgacgattatgatgtgcactcttcactgagaaccactagtctgamtctgttccatttctataaagctttttccccagttctctgctgtgtacgtctagatgtggattttatgtggctgaaagatgatctctagcatgactgtcattttccaactgagcagcagtatagcttttcctttactgaacaattttctctgagaccttgaatcacttttggaatttaatttcatttgctytttcaatatgataaagtagaactctctctgaatttgattcctcacttacaaatagatatgatactatattctctgttgaaaatgttttggaactgtgaagatgctagagagttagatctcgtgtttcagggaacagaactgaaactcagaagggtttcattctgagggtgaagccagtgtgtggaataagagttaaattttaaggggtacattcctggatcatgccttgttcaggagtctttttcctgacccaagaaggcctccctcaggatacagtgggcatctcagtctttgtgaactcttaaattcatttcttacccagggtggctaactctgtcagtggactattttgtgaacttcatactttcggaatatgttatacttatgtgattcttggtagtctcaagaaccttggtagaggttcaaatcagtcaatctggttaaaggtatcagtattcagtcttggaatcaagtggcactagagctcttaaggcttggcggttttcaggacctacatcacaagatacagaagtggtgtggcttggagctcgtaagactcgtgtctggtccaaccaggtaacttggggcccctggcacccatatcagacttttctcatctgcaaaatgtgctgcttggagtgggtgatttatttagtacttcccaggcccaaagttctgagtctgtaagatgtagtggggttgaccagcatctccttttggattctcctttaaaactcattcctttgaaaggagattgctaaagtcaaaccttagaatccaaccctttgggctatgatttaatgttaaaatgctgtaccctttcctttcctcctttttctcctttactacttctattttgtttctttttcgaaaaaatataccttcttttaaaatttttcttcatttttccttcttctctgtaaattatcaagggcctttgaagagaattcttacatgttattaagaaattgcagtcagggagcmctctgttcccagatcatttagaagattgcttttccttttgttaaatacaaaaaattgtcaacctgtattgttaaaatrtgccaaaaactgcattcaccaataaaaaatgtcagctctcattattgcccagatattattcttttcaaaagcggagcactcttgccaggctttctaaacaatcttcagctcattcatcttcctggttttgttacattttgaacctctctgggtctatataaggtggcagcctgtcttttaaaaattaatggattccaaatgccattcaaacctatttccgcccttaacctcctcctcttctccccaaccctgcctgttaggagtcttatgttctgtataaatattgagctggagatagtttctaaagaggtgtttggacctttaattaacattgacagcctgtctgcttaggattttgctctgctgtctccatggaaaagtcaggtaggtcagtatgtgggggagggacctctgcagtggatgtgttcctggcggctggccctagagacactgcactctgagccaaccgtgaagtcattttgaatttaaggagtcttgctaatccaaggcaatgtgtcttaatttgacaaagtaaaggctgcccgataagcaagcctcactacaagttctgtgaaacagggggtgtttgtaagtttagattgtgctagagaaatgtggtgatgtggaagaacgggctcattttctcctgtttactccctttcccaccccatccccctcctctctcccttctctcttacttactttggcccaaatcagccctgcagtctggcctctgcagtggcttgatgtgaaatttgagaaacatatgtagttttctatttcaggaaaatgatctcagggattgaatgtgtttttttgttggctgttaagctctgatcttgcccagtgtggttttttgatgatgggaaagaggcttcgaagtgctttttatcagaatttcatgtaataaaacttaaggtttggtttctttattttggcccccaaccccctcccaggctcaggacacaatgtcgtctattctgtcagaagtgggaagaagtacacattgttcatattacaatcacttctttgctgcttgcacacacatatataagaatggccactgtgtctatccttcacaaaagctattttaaatgtagttcagtggaggaccaaaggtctgcgtagtgtctcttacaaaggaaaagggatctgttgggggaaaagtctgcctttgttttgccttggaagggccagtatttttctttgttctagaggtgagtgccaataatgggcctagtgccctatcaagcaaacttcattaatccagccctgcaaagggtacactgatcagataaaagggacctacatcctcaaagctcaaggtatttgtttttaaacttttttcttactgtaaataaatatcactattgtacttaatctcatattcataattgtattccttttcttaaagagcctttacataaaagcttcaggccctacaaaatccgagagcatccttcatggaggaaggatagtagactcgagggtgagtggttgaactttggctctggtgtaaaatgcccaccctgggacttattgtgtgaccttgagcacgttacataccatttctgcacttcattgtcttatttatatttcatgggcttgttgcgggattgaacaggttcaagtgtataaagctcatagtacaacctgctaaggactcaacattagctattcctgctgctgtttttattatttgttgctggcrtataagacctaggcaaatggagctaaatactattgtctaccattaaaatattcaccttctggagggaatagtgcaagggtaacttcagatttgcattgaaaaacccatggactatcactttacatatttatttccttaccatcttcaacccytatccagacagctccaaatgcacattattcagaaaattggtgatattttcacagcactgagactaagctcatctcctgctggtccttatcactcaccarcctttcagccacatcagacatctcctcaatctctgggcaaaccaggccttttcatgtcttcttgactttgcacgtactgtttcctccccgcagagtatcatttgcccttttttctgcttgtcaactgctattcacccttcgagacccaacttaaatattatttgtgaattttgggcagttacacagactcttttgggcagttacacactactgtttcatttttcctatagttcttcaagaacttctctcattgtagtgtaattatttcttgacatacatttttcttctaacagcctaggaggtctttggatgaagatactacagtctattcacttttataaccccggtacagagtgcatgacacgtgttaggtgttgagaaatctgagaaatcgactgggaagagttttttttcataccattatattttaaaagctgcaatagtttgttccagaaaagttatatttttcccttggtgtatattctaatttaaaaggtgtttttaatgcctgattgatctccaatctgtaatgactttgtagcattttctttgtttccctgcattcagccttctgatttaagcagataatgcttggaaacacctgtttaagttgtatcttctttgctagttgtaacttcatgagtacagggaccatatatgttctgttcacagctctatccccaagtcctaatacagtggttggcagttctagaggtagaagaaattataataataatagtgcttgtattttatgcttaacagagcacttaacatgctggccactattgtgagtattttagatacattaaccccttcagtcctcccaatatycttatgttatatgtattataattatcatctgttttctacagataaagaaacagactcaaaagaggctaaggaacttgccggtggtcacacaatgattggcagagttgggattttaacctgggcagtctggctccagaattcaggctgtttgccataatggttccttgcctctgattagtactaattagcttagtacttgtttgttaactaattattaaaggaatccaacagagacctatttctctaatgtaaagagttcattcattaggcaaataatcaccctaagccagttgttctggaagtatggccttcagaccagcagcatgagcagcrtcacttggaaatacattggaaatgcaaattctgtggcctcactcccaccctactcaatcagaaactcttgggagtgggaccaaataatttgtgttttaaaaaaatcctccagaagaatctgatggatgctaaagtttgagaaccactggccaagactcagccattttctctggaattttacccctgatttttgcttttcttaagaagtcataattttgggtgtctcacttttgcatactcctgatttttgtgacattaatgtggggactaagctctaacctcagtgaatgtttttgctaargtttctgagaaattttgaaggtttcaggtgtgtctgtagcttgacagtgtttgtttcttttgatttttttttcctgtgatagcttttaggatcaggaaatttaaaaaatatagtacctcctccattcagccctgctgtctcagactcccctaactggtgagtgaagaaggagcccagaggtgcagggataacagagaaaggggaagtagcagaatcagtgagtggggaatcaaagtttgatgttatcgcacttcctagaagtggcctcaggtcctttggactgttggtttacaaatggtagaaaaaagggacactggacttcaaactggacttggaatcccagttcagtctctctatctatgtgattctaggaaagtaatttttctgagcaacagttccctcatctttaaaatggggataatattactaatgttttaatgatgtgagaatttatggagatgcatgatgagcactcaattcatgcttgttgtatctatactgaaggaagctgtaagagatagagttagtcactagcatatttaccagtgagtgttctaagaaatggattatagattttgcagagcaacaaggaatccacagcattccacaatggctggtattccaaggatcgaaattctgggaggttcagttgcagagaaaactaggcaccagtttgaatgcattatgtcttgagtctgctttttttttttttttaaaagaaaggtatctaaaagtgatttaacaatgtcaggatttagacttaagtttttttctgttaaagaggccattgctgaaagtcaagacccaaggactgtacaaatattgatgcaactgtcagagatacatggtatttgaccttctattaataaagacaaattattgcatttctgtgatatttgagtctgcaggaacttcccttaattccactggtattccattccacggctaccagggctgctgggacaagggacgtggcgttgtgtttctgatttacgaggtggaatattagtctgatttactaaactgaaagagcaggttcagataacaaacaacatagtgaaacttcctgaataacagccacagaaacaactcatgtatttggtggtatcacaacaagtttggctagatttatccacagactagaatacaaaccatggaggaaagaaagcaggtaagcacaagtaaatagagggcaaggcagatactagtggactatactggatgtaggaagactttgaggaaggcttttttttgcagacatctgcagggtgtaggcagtgaagtgtttgttgtgactatttgccagcaccatcccacttcacaggtgggtgggtggttccttttcaccaagattttaatggcaggttgtgccccataaaagggcggggcagtataccctgtattagtttaaaaaaggtctcagcttacacgggacagcatttttactttttacccttgcctttgctcattcacagggagtacttcrgaatcagcccatctaagcctcagacttcaaagggagctcattcctatttgacaacagtcatatccattttgccaactctttgacctttgaaatagcatctactcagtcaggtctgacctgtcaactgtctgtaaaaacccatccagatcaagaacttgatattttcaagaacacatctaaaggatgggggcccttctaattttgtttctccaggacttgttttgggagaagccagctgcttcttctggtcttaatgggatgggattatagatgggttgagtctgtgaggcctcaacttacatgatgatcctgtgtccttttattataggttgcacatgttttagccactcatggcagcatttttctccagctacagtcaattttgtctaattattgttgatcatgattttactgtaaaaaaaawtttttttttttgagacatggtttcactcagtcagtctggattgtgcagtggcacagtctcagtgcactgcaacctctgcttcccaggctcaatcgattttcctgcctcagtctcctgagtagctgggactacaggtgcacgccaccacgcctggctaatttttgtatttttagtagagatggtgtttcaccatattggccaggctggtcttgaactcctaacctcaaatgatccacctgcctcagccttccaaagttctggtattacaggcatgagccaccatgcccaggttgtaaaagtatttttaaaaagtgttttcagaggccatttgccatgggaaaatgggatatgttgaccttcctgtttacctccatttgtgggcttttggttgtgagcatcagttcatatccagttttggggaccactcttgggtatactttaaataattcagatgttgaaatttttcagaatgagaaaatctagagagaagtccagtttgattatactagaacctcatttgctgattaaattgtaaaattcctaattgcaacttggtcatgtctttgcaaaatagtaataataatattaacttctatttatatagtgactgtcttctcaaagaactcaaaacagtgtccttttctgtatccctgctattcccaaaacatgtttgtggcaatgtrtgtggcttcaaaatgtggatgtatcattatgaaakataaatgcatgtggtgatggtatttattagaatcatatgttattggaagtacctaacattgggtgtaarggaagcctggtcaagttkccaatagagatttacaattgggcctctttgtatctcagtttcttcatctgtatagtgggcataatagttcctattttatagagttattgtgatgattgtgttaatacatttaaagcattgacacagtaatgctgggatagtcctcaaatgctattgtttgcatcggttttagaatcagtctaataaatatgagtttaaatacccctttgtcccttgcttgttgtgtcgtcttgggcaataacagtaacagtcaacacagatgctatttattgaataatacttatatgtcaggcattatattaggcccaggatataagtgattrtttatcacttattcctttaactttcttaaataggtatgattatactcattttatagatgagttaggtaaggtttagagaagttaagaaactttcccatagtaacagagttagattactggcaaagcggactctctgaattcttgtttttggttacctacttaggttcccctgaaccacagtttcatcatytgtaatagggatgacaatagctctttgtaaggattaaatattgtacataaagtatctagcacttactgtgcattcttgacatgatatacaatgatattatcctctccaattagagctttccatataatataatttttttctttgtgttccttatgccatgcatatatctttagagattaaaagacacttcttaagaatggattcttgcatttctgagaacttcagaatcacacttgtgatctgacacagtatatatacactcaggtattgatgtgtgtatgtgtactttccattctgttcagtctagaagtgtatagatgctcaatctgggtgctttgtaaggaacatcacaaatgttcaaaatcgtggatggacttgaacatgaaaatgccttggcctcaaagttttgcttttctgttctcaaagttgttgaggaaactggcttagttaaagctaagtgtttagaaaccaagtgtgttttggatggtaaggtggagtyagcattatatatattaatrcatttttggtaccagaaacagcaacaatcccttagtctkgtgtgtgcagatgtaatatgtttcatgatatttcagcctgtattttctgtcttaataagtgaaagcactgcagaattgggctgcaggccactgccccatttctctccttttgtagtcagatctcccttgtgaatgataaacacccactcctttcatttattcacccattcactcaacctcctacaatctaagctgcatgcttaccacctaccttaaagaacaccagtgattgcttattgtgacttacgtcataaatatgtattctagacatgacttctcacctgaatatcagtgtcacatccttcatagcctcaaaactttgaggaaatatcctcttatggcatactttaaaatttgtaattttaaagtaagcacaaagtacgttttgagaccttcatttttttctctaacaattctgttttgttttttttttttgtattctgtattttttgttaagtttatatcaggatgatttgtcattagtgttcttgtaacatattttggagttttccttgtgcaatgtggaaatagtaaggttgacattctgcttttaactcttctttataaactatgaggaattcccaaatagaatgttaccttgaaagactcttgacataagtagaactaaaccaaatattttatataattatttttattttttatttttgagatagggtcttgctctgtcacccaggctcaagtgcagtggcgtgatcatggctcactgcagccttgacctcccaggctcgagcaatctgccctcctcagcctctcagagtgcttgggattaaaggcatgagccaccatgcttggcctctgtaattcttaattattattttatatatgttatgagtatgagaactaagcagttccataaagatgagaattataatatctcattttagtagtattttgctttgtattatttgacattttataaaaattcatagtctcaaaaaatatacaatgttcttcgtcaagtagctaatactctctttcttagtgttcggtttaactattaatcttatcctgttaaattatttaaaatttcctaataattggcacataataacagtttttaatgtcagcattgataacatttttctgtcataatattcaactaagggatgcatcttcaatgtataaagcccataagtaggttttttcaccctagattagatctaaattgcttacctgtttttggaagtgaatattatgttattaacaataaattccaaactgctttgtattactgacattgtaacaatgtcttgatatgatggagacccttgctatcacattgtcattgatcatgcacattgatcatgcccgtgttgaaataggcaatgccagagacagaccaaagacgaaactggtagtgattttggtgaacattgttgccatgttaaacttgagtatatttcttgttgaacaaccccattttagagatacggaaaatgttgtgaggcagagatattaagtaaccctgcccagagtcgaatggttaataagtccttgccaggatttaagtgataaaacaaaactcatgcttttaactactatagtcttgtaagccactcaacaagtattggccagttaaactaatgaattccctcaaggaattgattctagtaatagagataaataatcaagtcataagtcatgactcaatgtgaaaagtcttgtgactaaggaatgaacagtmcaataaaggaaacatgaggaacagtgaatcgtggtaggattatggagaggaggaggaaggaatgggggagagtggggcctcagagaggtgcaccaagactggggcccaggccttgcttccaaggtaccatggcgttctgtgtttttccttgtcttgggcatactattcagtgtttcgatttatttacttgtccttacctcccactaggctataagctttctgactgcagaggtaaattgtgtgtcttcatcacttagtgcaggaagtggtagctaatgagttggatatgtaggggcgagtacagtggacaggtgaagtcaggacatgatggacaaaagcatgaacatgaaagaagatgtgaacattcgttgcctctttaggaaatggtcgacagtgtggagtggacagagcacrgacatgtagcttggggtattgtgaagggatgggtcagccgtgtatacttatctaccatggtaaaaagtgatattattagatttctgagtgcttgcctttccctaatgcatcttcatgtctttaaggacaaagatgtaggaccaagagtgggctacatcacaggagatgaaaagatctgtttgcatatttgacctctgctaattatcagcagtgtgatagtaggcgtgtcatctgacatcatcttgcctgttgcatagtagacatttggtaaagatttgttgaatggattaattaatataattatatgtttttgcggactctgaagaatttgagatacagctatataaaagagttactatttattggtacatattgcttagtatttggaataagcttggtaattattcactaagcaggaaacagggtttagggatttccaggcattagggacactgagccttgagacagggtagcagctctgtggttcagagtgactggtccaccaggaacagaaacaagctagtattgggaggtgagggagtaacattccttgggaggattatttggcaaaacgaagtaagaatcataggggcatagggtcatggaaaaggcttcattcttagtagagctctggagtacccatcaagtctgggtgaagatgcttacctccctgagagggcaagcatcaggaaagcctgggtatgggggtcccgggctcctgaggcccaggactcattgctaggatacagattgcactgtcaagtccagactgtcacgtgtgagtctaagcctattgttttggggcttgccatggtctggatggggcccctcttaaaggttatagagttgtggaagaaagggactgacacattttgatagtcaaagagtaaaagaagctatgagttaccagtgtgctggatgcttctgaaagcgtttgacaagtgctttttgagtttttaaattaaattacttttttatttttgtcttcctctctataaatcataccagagaaggtaacatttttctctatactgactttgacaagcctagactatgctttgtctatgtccagtgtacaaatgtagagaacccattcatttctttactcctcacatatttagtaaagtccggctgtgtgccctgcctttaggggacactgagcagaaagcagactcctccagacgattgcattgcagtataattagcaccataacaagagtctggcagattctagtctgtagtagcaaaatgaagagcaatcaggtctatccagggaatgaggaaatacctcacaagataggaagtgactgaactcggacttgaaggatgatcaagaatctgccaggtgggtatgggggccacctggcaaaaggacagcatatgggaaagcagaggcatgaaagaccttggtgcatccacaaagcgttgggcacgtgagtctagccagatcacaggttgtgtgttggggagcatttagagaagagaacacaaagtcctcacgtgctttactcaggctttgggcttaaggagtgtttctgatgtgggctctggagccagactgcatggctgtaagccccrgcctctctgcttcacacctctgtgatcttggacaagtaccttaactttctgtttctcagtttcctcatctcagatgataataggacatgcctcacagggtggttgtgagaacytgaataacatcgtaaagcacttcaaacagtgtctggcacatcagttgttattaataataattatataagataaaattatataattcataatgatgatgtttaatttgtaacctgtagtcaaaaagtagaaccaaatacaacttgcaagggaactggatgcttctggaagagtttgataagtgttgtttgagtttataaagtaaattaccttttttactttccaggtaaaaaaatatacctttgggaggggaacaacacacactggagcctgtcggggggcggggccacaggagggagagcatcaggataaatagctaatgcatgtggtgcttaatacctcagtgatgggttgatggatgcagcaatccaccacgcacacatttccctgtgtaacaaacctgcacggcatgcacatgtatcccggaacttaagaaaaaaaaatacattttttctttccaggacagcgtcagtccttaagaggctagctcaaagactagaggaaaaatagactactaaataaatcaaaattatttagtagggtatagagttatccataaagtgctgggggtcactaattattaaagcagatagagcacaggtagttgttgagcgtagaacagcccaatcagaatgatgcctcagaaaggcagtagttggcctcccagagtggagcatggaytgcagcagggggctgaggctggagggggagaagtgttgaactaattcaagggatgttggagggctaaaccagtgtctcttctgctaaatctgagcagaagagacagatctggaagcttctggtaaggtaggcttgattgagtttggtgagaagttagatgaggagggtgagaacctagcatctgggtgtctgctagatagatgctgctgcaccacaccaatgtccgtgtgtctgggtaccgaggtggtgttcaggacaggtcttctccacgtactgscgctgagctcacatccacgctgtgcatgctgggctgagttctcttcaggctgttttcagctgacttaaatgcaacacgtgatgatgagcatatttacataatgtatgcctggtgaaatcacgaaagattggaatttcccattttaattccattttaaagatgcttgttaagcaaaaggatataattcatttttcaaactgctgaaatgttatttggcctcttgaatcaaaggcattccgcaagtgttttctttattacatgccttaaactttaattagaatttaattataagatcctgaaggcatgagcaagaggagcagatgggatagtaaaagcagcttagtgagggaggattaaagattaaaagttgcttgttaatggcataagaaatgaacagagagctaaattactatgcttttgtgctatcctgatgctttttcgattctgtaacttattcctggttgcaggtttttcaattctgcaacttattcctggttggaagttgaagaatctcacaaattagatttttaattttttgagttgctagagtagatttgtacatagaaaacaggtaaaacctgacaaaaaggtgttttatggctagtagcaccttgtacaataatttctgcattgtaggggcttagtggtatttactgaattgaactaaaacttacatcatctcactagtaaacatcgaatgagcataaaataagatttttttttagagatggatggggaaggtgtgagtctataagtccaggctaacctgtcccatggaatgttagatacctactcaggaaggtaacttgtatgaacctcccacctttagcctaccccccagtcgaccttagtcatttgccccacttggttggttggctagaggagtggtagaaatttggtgtgggaaacactttgagactgctcctcatgtcacacagtgaggatgacctgctctgctctctggtgctatgttacgatgatctcccgttaggctaaattattctacttcttagtgctttttcccctagcttttttttttttctttttgaaatctgatatttagagtcctcttccccacttaattgcaagctcaatgaagaaaaactagagaacaataagatagaaaagaagacaaaaatgtagtgaaacaaaaagcattctatctcctattttccaggaacaaatgttttttaaaaagcttttttaagcctgttaatagacagttgattcttcattatttgcagattctttgtttgcaaatttgcctacttactaaatcttatttgtaaccctcaaatcaatacttgtggcactttcacagtcattcgcagaaatgctcagagaggaggataatttctgagtctctcgtcatgcgtgttcctagccgatggcaaataacacaacaccctgccttcttgtttcagctctcatrgtgtaaacaagtgtccttttcgaagtctactcgtgccatgtttttctcatttttrtgctttttgttggcgatttcaccatttaaaatgcaccccaagcattgtgcmaaagtactgtgtagtgttcaagtacagtgcaagaaagctgcgatgtgccttacagagacaataacgtgtgtwtgataagcttcattcaggcaggagttaagtgctgttggctgtaagttcagtgttattgactcaacaatatatattaaatgagttgtttttaagcaagaatacacatgaaacagggttgcgtattgatgagttggcaaaaatataactggaggctcagaggaacctagccctgtatttcccttaggaacaatggtccagtgttccctaatttaatgtttttggagactaccaaaaataataaggtcagccatgtatctttctccttttctccttgctcttgcttgatctttccatctcttgttacctcaatctgtgtgtatatgatatgcatatatttacttaaattatatatgcatatatttagcaattatgatatcacatgatacacgattctgcaacctgtcttttaacttatcaattgtgttggcctttgggctgtttgcactgagatccatttgtcacccttgccctgctctgcaagggtgctgtgttacagggggttgacccctgccccctgacaatttgycatcagtgggagatggcaaggcaagagaaagagaagctggagtatttgtccctccctctgtctgccttgggcagcatctctggcagtggcccctctacagctatcccacctgcaggttgggtcctccatggctctgtcatcggctggttggtcctgggtctcgagctttagccctgccttcttcctttgtccttttagctgatgggtggaagaagcttcctgctgatgctgatctctgagtttcttccctgtmccctgggtagagcatcagatttaaaagccaaggcaagacaaaaaatgagagaatggtagcaaagatccaacactttacaagaccgcctgagaaaagggaggagggggtggttcgacaccagggcctgcacactgagtgtgtgatgttgcagctctgcaggcacagattaagcagctaagatgccatcaatgcttggaaagcagccggtgcctcttgtcctgagcttatttgtctggaatatgattcccttgaacctgactagctcatccacggggagagagaaaaaaaaatattctgatagttatcctgaccaggctctaacagggcctccttccctaggatataattttttctggcctctttccattcacttcttcacattaggacccttttcccccagagtgtgagattccctgagggctctaaaaactggaatgctatacagcattttaagccccctgtgttggcacagtccttattaaaaatgtattttcctcaagccatggctgcaccccctgaagtgtggattaacagaaaggccttcagagctggaagacatttttgaagaaccrctgtaccaagtggcattaaatatttattgcctactacatgtaaattgttcatcatcttgttttaactcttggaccaaaaggtttctcatctgctttctgctaaagtggaaatcacaggaaaggtactctttactttgctgtggtattttgttttcccaggaatacrgaatatttctttgttctcataagtaatactagaaaagattgccttgactctcagcatttsattgggaggccatgtggtgtcatgatggagaaaaactcgaattctggggcaagtgcattgggctttgccacctgcaagctgtgttggcttgagaacctgataccatttatgtttgttgtgctggaaaaatgggacattgcataaatagcagatagcacaattcctggcacccagtaagttctctctttctcctaggtcttctatttgggactttgcaaatacatttctaagcaacctagaataaaatatgctattaatatgctgttaataataaccaaaagcactcagcttaatctttacttattaaataaaactgaaatgttgctcagacaccytttgctgtttttggaatgcctttgtagacacttttgatcttgcttaaaaaacataacagcatttcaaaggcttatcttagctattcttattcatacctgaaaacctacagagtttggataattttggcacacatatgtgtgcacgcatgtatatgtataaatattctgtctctctaaatatatatgtatatgcaggcacatgtataactctttaagaaatgtttttctaatgtttaattttcttaaagtctgtacttcacatcatttttttccccagaactgtttatcctcactccagacatgacccttggaaaggtggcagaaaaaacaaacggctggtgtgttttggggcagtctgcattccttttaactctctgagaccaggcttatgcatgggctttcaagctatttgtccagaggcccaaccactttgatttctgcttgaaaattagcctgttgttcaagctcaggagagcttccacagagctttcttgggttcgcgaactagagatctatgaagtgtttgcttttatttgtaactttaaccacggcagccttaactggacttttgttttcttatttaacttttatccatgtaaccttaacctaagttctttttcaaatctccatcctcccccatctcacaatttctaatccctcttttgtccttagatttttccttcaaagtcaggatatgacatttatatctatgctttaggaagtatctgaaagctaacatacacatagaattatgatttttttcttgggttgcttaggaggattaaacaaaggttttagaaggcagaattcagaaaaaaattgatagaagttgtgctgcagcttggaggggagtgtggattttagaaagcataaggacactttcatttgtccctttcatatggacttttatttcctctgcgagaggcccaggggcctggcctgtggatggtttagacaggaaaagactgaagggataactgcttccagaccttcagccttgaatgttcagccattattcaagccgttgagaaagggagcaagaggcataaggaggcttcgggagtttccatgcagcttctctgagttccagcttgtgtgcattgttctccaaatgtgtccccagcactactgaaaggactttcatacctcaactaacccttattgcaagcctgtgaaggaagagttttttatatatatatatatatatatatataaacagacaaggcaactaaagctctgggaggttacagaaacttaaggcctaagtagggttacattgagaccagattaatcagttagtagattgtctttctatttcatcatgtgcttcatttcctccttggtttacatgacccttctttggaaatttccttctggtaatatcttagttaaatgaaataactaagttttatggagtatccattatgtgttaggcattgttttatgcaatatgcatctatgtagtgcacattctgataggaaccatgtgaagaaggtgtattacctccattttagacaggaaatccctgcaatacagagggttaggtaatttgctcaagatcacacaggacacagtaggtgacaccaggatttgagcccaggtctgattccagaacttatgccatgcccactacaccagccgtccttattaagaggaaggccattggtatgaggccacttgaaatagacatggtagatatgtggcaatcaatgcaaaggtattgtctttcatgctctgttgcaatctcatttcatttctagcattataggtatttaaagcagaggtaggcttgctttcttagtttcagttttctgagaaacaaagatagtaacaacaatgatgatggatcttgttaccatatgtgaatatctgtgtgtactaggcacggtacttggtctttacacatgttcttctaggttaaccttatgacaactctgtgaagttttctcaaatttatatctgagaaagcactcagaaaggttgagtcacttgcttgcccacatcacactactagtaagtggaggagtgaggatttgaacctaagacctcttacaataaaattatgttctttccactcagtatatgggacatgtatccctgggggcacatgtgagaactataattggtctgtaagattattgatgatggtatagggatagggtgttaaagaacattgatgcccatagtgaaaaagtaattccctttcacttgtcctaccaaccatctggttacatgaaagaggaagtctcagttaggtgccagtatgccttttacaattctaacagagaacagggctcagactctgaggctcgggcaggtaattgaatctagaagaccatggtgacgttctttttgtttttattgtattttaatatcttctcattaaaaaatattataatgtgttcatatatacaaaataaatgtaatgtatatataaggttaaaagaataatataatgagtatccatgtacctatcacctattgaagcattagattaattttagttactatgggaaccttctgtgtcactcttcccatcccaacttctttctttctctcctaccaacatcttacataatcactgtataactatcaaaatcagccagttaacattcacataatactattactcagtctacagactttttgctagttttgccagttgtcatactgtttcatttcctggaccagaatctaggatcacacaatacatttactagtcatatctcctttgtctttggaatagttcctcactctttttgtctttcatgaccatgacgtttttggagtctggttaggcattttgtagaatgtccctcactttgggttggtctgatgtttccacaatattaaattcaaattatgtgtttttggcagggaagctacagaaatgatgttgtgcctttcacagtgcatcacagcaggaggcacatgatgccgatttatcgtatcacaggtgatgtgaactttggccaatttgttaaggttgtgtcttccagtttatccactgtaaagttactatttttccatttgtaattaatgattaccttgtagggagatactttgagattatgtataatatcatgcttcttatacctttgtccactaattttagcaactattgtaaattcttgcctgaaacaattattcctgtggtttttccatatggtgtttttctatgattataattctttctatatttattaactggaatgctttgtaggtggctttatcctcgccacacacttatttattcattcagttgtttatttgtatcagtatgtacttacaaattcttattttattgtctggattataatccattagtatcattattttgttttgcaaatagtccttttaaccaatggggatccctwcaaattagcttttctatctttctgacatgtctccatcttttttaaggcatttttgctttctggtgccagaagataccactttgtgctttacttgctccaaccctgagagaagcctcctcttgctgttctgcatccattcctctcagtcactccttcatgcactataatatgatttccactctccccagtgcactgacacttccgtcacttaggtcattgctaaagcagtagatattttaattcttctattactgcatatcagacatctcttggccccatatcagatcttctcaggaggacagtaaagggaaattgtaccatctcttgttccagctgccgtgaccaagtttgcatagactctgaaaaacttcctacagtataagctgacagtacctcacctcatgctgcatgcttttccatagggcaccccacgaggttccatggggtttccttgtggttgctacctctggatctcactctgttcccacacatgtacaacctggatagagaattaatgcctcctttctctctatcgtggatggttctgagatacagttcatgtggcttggggtgtggagaggttgaggatgatcctatgggatagagaacgagtcacttctagtggggscatcttgataccacaacttcatcttgcctccccctccttattatttgttttattccctttgtctatcagtcctctccttctccctaagattgcactacctgatgcagtagaaccctcttccttgggtctgctgtctcggggacccaggaaaagatgtgcagtgtttaaactccttctctataatctcttaactttcacactatcacattttcattcatttattccaattcattcattcatttacaccttatttattgagactttccctgtgtgagacattgtgtacaggtagacaaaaatcttgatcttatagaagttattgtatttgggggagcagaaataactaaataaaaccaattcagctgaattataagtgcttttaagaaaatgcaacagggagagggcagagagtgggccacgtggggcctggcattgggatggttaccacatacactctgaggaaatgacatttgaactgataaggggtcagcaagaagaaatgggctgagagaagactgatctattcacaggaaagaggaagtgcaagagccctcattttctgttttgcactagaactgctttcctatgattcttcagattgtgccacctttcttccaactcccatgcatttgcacagattgtttctttgacctggaatgccctctctgacttaccaagctggcagatttctatccttagctcagatctcatctaaagcagctctccacccccagggacattttaagtcctttttctgttgttggtgtgctgtgctttgagcacagtattcatttataatagtgatgtcagtgtacgccttagaattgttcacctgcatctctccttcttggactaggagcactctgagggcaggactatgtttgtttactttgtattcccaacaaagtgcttatagggatttaaatctatttattgatgagttggatggatgaatggatgagtacatgggagaaagaggaaaaatgatatatgaattgaaataaataaatgaaagagccagtgaataaatgacagtgacctgaccttaaggcgttgtcttgtttgtgggtgagacaggagtataaccattcagagtactgtgatgaatgcttagagattctcagtgcatgaataacagtggcagtcagcaagttctgctcatagatgcatattgtttcagctatttcatgcttatttatttagtttttaagaaattcatttaggtaccaaacataaaaaaaaacccagacttgcagctttccagatttggggccagacacatgmctgtaatcccagcactttgaggggccgaggtgtgcggattgcttgaggctaggagtttgagagcagcctgggcaacatggcaaaaccccgtctctacaaaaaatacaataattagctgggcgtggtggcacatgcctgtagtcccatctccttgggaggctgaggcatgagaattgcttgaacctgggatgtggaagttgtagcaagccgagattgcrccactgtgctccagcctgggcaatagagtgagatttcatctcaaaaaaacccaaaaaacagatttggcagtgctggacccttctacatggagctggggacaaaaatctgctggaaagtaggaaattattagaataactaactgtattaaaatatgttgaattcttcttgtcatgactgttttgacatttgtttgtactagttaagggaaaatgaaacttcaggttgacagcctttaccttccttgtgccataattaatttgctctattctgtttgttcaggaaattcagcttttgaaggcccagaaagaggactaagggtgcaggtggcaaggaaaggttgatttgtggtgacctggcatactgtattccatctttaagtcctcaccacaagtaggcctttatccaggttcttgttacctggaaatgtgtgttcatttgggktatctagatgaggcaggacttcaaggaaggggatggataatgcacttaatcttcatcttcayataaggatagctgctctttatcttctccctctggaagctgccattgtgaggcagcattaaggtgggagaggaccctctggagttcatccagaaccctctgggggcacctgtgtcccttctgtttgtcagtgtatcagccatggatcctgcgtgaaacaggtggcacatttaaatggggtaatccgagaagagtggacaagtgtagggaaaccacatggatagtgcaagatgcttggctatctaaagtggggctggtactctctctgggcctaaggaacaaggagaggggctacgagcaggccctggggagattgttttgtggaggtacttacctttgtgacctttggtggagagctgcagccatcctacactttctcctagtccactgatatccctctgtgtcctccattagctgaacctggctggaggccagaggcagaagrgccctctggtgtgctccacacccatcagcatcctggcttacaaggcagggtggagaaagttagagattgaatttgaagagcacatggaagatgtctgggacatctgggcattctttctgtgtggttggttcttgtggtcagatatttgtggaggagtgaggtggtggtggtagtggctgtgctttagagtcagtgagtctgggacaggatcacatctgccccactcgctaacggagttaccctcagctcaaggtcagcaggcaccgatttctttgccgtctggtggggccaagggcaaatgcctatctcaaaaagctttgggaagatcaaaaatgaaaatacttaagtgtttttttgcagatttggaaaaggctgaaagaagttttattaaaatgtgagcaatatacctcaataaagttgttttcctatataagacaaataaaactgtgttgtgatttcacaacaagtgttgatttttttcttcattatatttttctgtattccagattttctgtcatcagaaaaccagacatccataagtgctatttagaaatatgttagtactgccttcaaattattactgttggctaatattgccttctctgggttactgaggtatgtgaattcacagctgcagcatagctgacttgactatggacagactagagtgaacgtgtatgtcatttcttacgatgtgcccatggattcaggtctagtgccccatccccaggaagcctttggcccttcagatgcttctcctctgagctcctgcagctcctgggctgcccctagcagttatcacactgttttgcggttttctccaccactagactgtggtctcctctaggtccaggactgaattttattcatctccaggtcagtgtctagcaytgtcttgtaaatgctgtctttattcatgttgcccagcttctacyacacggctactggaagttctcaagctcataacaccgtagcttctacaacagagagcaactgactgtgctttctcctttctgttttcaaagccctgggaaagaattctgattagtttcatttgggtcaagtgtacctacatcccttattgaaccaactatacccatggagaggtatattacagtgatctcagctttggtcaagtgctcattcccagaggaatctgttgtgtggccaatagggtaggatctgtacaactatgacaggtcttatttaaatcaattagttacagtggagaagagaatgaatcagttaggaatgctttcagctgcagtgacaatgcaaaaaagcttttatttaaatcagttagttgcagtggggaagaagcatgtatcaggaatgcatttgcaagggagcaaaaattggttcttgggggatgaaaaagatcttagatattacaatcatttgtggccttctaaagcccatccttatgtaacagcataagtagatacacaatctgtctgtggtattgaaatttcacagtggcagggaaaaggaaaagactgtctggaaagggtctttagtgggggcgatagtgaaaaaaaagtttgagagtgatttatgatgacaataatcatacctaacttatttagtagttatgcaccaggaactgttatgaatgccttacatatactatattaaatcatttcaccatatatccatttgacagtgaccaaaacacaaatagtcttgatttcccactctcacacccctaaattacaagtacaaagatgatttgaccatgtcaccttcagcatatctttaattctttggacttttccctcatgctagctgcctcatggttgtaggatagttgctgcatctctggacgttacattctcctttgatgctggaagaattggtgagaagagcatgatgagattttttgttttgttttttaaatgagaggagcaaaacctttcccaggaatcttctcttcctactatacttctgcttaggtcttattggctggaattaagtcccatggccactcttagcagcaagaagcagggaaagtggaaaacargattatcatggttggcttaaacctgcacattccaatatgatagttactagctatatggctatttaaatttttttagagagatataattcatataccctaaaattcaccattttatgtatacagtatagtatttctagtatattcacaggattatgcaaccataccccagtatccsattccaaaacattttcttcgccctcaaaagaaatctcatatcyrtagcagtaagtcctcatatccctctacacctagccattggcaaccactagcctactttctttctctatggattttcctggacattttgtttggcttctttcacttggcataattttttcagggttcatctatgttgtagtatgtgccagtaatttttttatcagttcctgttttaattgataatactctgttgcatggatgtatcctattttgtttatccattcatctgttgatggacatttagattgtttcactttttagttactgtgactaatgctgctgtgaacactgattgatgtacaagtttttatatcaacatagttttgatttttctttgaattctcttgagcctattagaaggagtggaattgttgggttttatggtaacaccatgtttaaccctttgaggaaatgtcaaactgttttccaaagtggctacacattttgtacatcctggtaggaacatgtaaggattccaatttctccacatccttgtgagcacttgttattttttgtttgtttttattataaccatcttagtgggtgtgaagtggtatctcattgtggttttggtttgcctttatgtaatgactactaatgttgagaatatttaatgtgcctattttccatttgtatatattctttgcagaaatgtctgttcagatcatatgcccattataaaattggattgtctttttattgttgaattataataggtacttaaatttaaattaattaactttaagtaaaatagaaaacttagttcctcagtcatactggccacatttcaagtgctcagttgctgtgtgtggatagtggctatgttattggacagttgcagataaagataatttacatgattgcagaaacttctgttggacagcactggcttagaaccaccatgattgatcacttatagctgggcatatgacttctctaaataaaattgaggttttgttaagctaaggaaggattggtactccagaaagagtgaggtgtcctggtcccagaaaaggaggttatgcagactcagtgtataactcctaaagatgcatcagagtttaccaagggaagaactggggcaggggttgagtgggagggcaaaattctagaccagggcttggcagatgtcttttgcaaagggtcagatagtaaatattttggctttgctgactatatgatatctgtttcaactattgaactgtaaccaaaaagtgtctgagacagatttcaatcgatttagagaggtttattttgccaaggttgaggaagcacccgagaaaataaacacaagttacgttaggatctgtgactggtgttttgtccaaagaggattgtgaggacttcaggatttaaaagggaaagagtgagcaggaagggaaggaggaaagaaaaaaaaaagtttgaggggcataggcgatgaggcaagtggttacattcttgtgaggctttgattagtgctcaccaaatccacagtttacatgtgaaaagaggagtgggggaaagtcatttatgctcagtaaatctacattttacgtaagataaaggaagcatgtgaagttacagcaacccatttgagaacaaaaggatggcagttttttgattttttctttttttgtgtgtgtgtgtgtgactcagttcccaagcttaacttttctctttaacatagtgagtttggggtccaaagattttattttcctttcacacaactttgtccttatagtgaaaaagcagccyaagacaggccataaatgaatggacatggctgtgttctaatggaactttatttacaaaaactggcagcaggcacatttgggctacaggccagggtttcctagggacaatacatagaaaagtatggaagccagaaggggcctggcatactgaaataaagagaatggtaagacgtttggtatggctgaaaactggctgtaggagctatggctgtagagaaggctaggaatagagactggaaccagattataaagggtccgcaatgcatatcaatgttgttttgttctggttggtggtggtggttgtggtgctagtggcagtggtggttttctaaaatcctctaagtggcaagaagccgtcaaatatttttaagtaggacattatatgattatggctttttagacaaccctctggcagcattgtgaaaagaatattggaggaaatgaggctagaggtaaaaaaataccagttaagctttgtattttgtattaaaataaagatctggtaattatcttgctaattgcatcagtagagacatagaccaccaagctgataattcttatcctgactaacctactcactatgagctgagtaaaaagcagtattgatttaaatgagttatgaagagtggggcttggatatgctctttttatatcccaggggaatcaccctggaaacctagagaactggttccaagtattcatctgagaacatctgtgactctcagaaagttatgagattggagttgtacggggaaactcgctgtggccttggaagagttgacttctaaatggggtagtgaacttattctccgtggctcagttctaaaaggccctaagaggagaaaaggattcttgatgaactactaattgatgattttaggtccagagttaagcataatatggaggtttgcctgagagtgtctgccgtcagtgaagatgaattatccatgtgggcttagaaaatcacacatgcaaattatgtgtcaatggatttttttttcaacatgctaatcctagcctttgagtacacagcatattttcaaagccaattttgcaaacaactctatggtaaatgctgctaagctgttgataagttggctttccatttgtaagcctattagttcagaatcttctgaagtttaattcaaaatgagataatgtgtagtgatttgacagttttcattctgtgacgatgctcttcaagaaagcatcttggcttgttcactagttgaatcctcaccagttcctgaaattatgaaatgtaaatttgttataagcagccgctttgggcccttcacaaggcagaattgtaccttatccctgagtggaaataaatgaacatctcatgtgtgtagcttctctctctctgtacatcctgactccaaatgctgtgaggcaccagaaaatgtctcctgaatctgattttgggtggctggatcaatgtccagagggaattaggaatttttccaatggtggtacagatagaggtgataacattagaaaagactgacccttgacaagacccacattagtgaagtcgttattcccaaggagttgggtatgtacttcccacgtgttgtgaaaacagggctctattaccttgccagcaataccccaaaggcagaggctgtatttgtccttggatctcagtctttgacattgttttgggaaggtatgatgagaggcatgaggaaacctcatccattttgtgagtccagtgtacttaaacggtagagactgactccagggcatttggagttcacagaatttgtcaaattatttttcaagcttgtagggttcaagacttccccaaatgtatttttccaagtgcttgtaccctggtgtccattaagggaaatgtactccatatgtttctaattcttctaccctgaaatgatcaaaatattatattgctgagatctctgaagactagaaagatccttttcaattttttttttctctttgatgacactaacagaaatgggtgatcccagtaatcacaaagaggctcaaattcactcccaaatgcccggccaccaagaagctttggacataagtattttttgggggtatttgtgccaactgctgttttaggacatgtttctgataatgctttacacttaccagaaaagctgtttttgaaaaatccagtgttgtcttacaatcattaatttaaaaaaaaaaagtttcccaagtattttcttagagcaaggagatctctttctgatgaagaatacactctagcctaaaaagccacttaggtggaccagtttctttgattaacaaaagttacaaaggggaaaagaagagtgttagagaggatacctgtaacaaaaagagacaggagacatatggaacactcgtggtgtgtcacccttatttgaaccctcattcaaacaacaactgttaagaaaagtaaaacataggaggcatatatcaatacagaatggctatatgatgatattaaggaattattctttttaattatgatattgataattagctattttttgaaagatacctccttttatagatacatgctgaaatatttacagaaaaattttttaaaagcctggaatttgtttaaaaagaatcagggtgtggtatagttaaaactcctccctccctccatctctccctctccccctctctccctctccccctctctccctctctccttttctccttccctcactcccttttcttcttttttccctcccctcctccttcccctcctttctcccccactgccccagcttctcttcccttctgttctctttttctggccttcatttgggctgacaagaagaggatgcatgttttatatcaggttggcaggtatacttgagatatattgtcttggcaatacaaaggcctgacacttcctagggacccagatgggtattgtagatgtttagggcatgccttgacctctgagtagccttcttgggcttgaggtcwcatttgactrgactaccactccacagtcagccactgtggtctgttttttaaaaacgttgccatgatgagaatgtgaaggatttgggttgaagttaaggacacttcctttttattattagtctggagttttaaaggagatacctgggatcccacccttactttgttactttgatttggagtcagcccttggctttgagagtgtgctgtgatattggtctgatttaatcattgcctatgtagaaaaagagattagatcactggatcccaaactagcctcagaaagtaagtcattgatggcaagaatcacctggagagattttcagtttaattcttaaaaaatttagtgacgatacttggataaccctctgggaattctgattcagtagtcctgggtagaaatagaatctaaatatctgtaattttatcaggtttctacacgattctcatgttccaatagtttggtgatttaccaggttcaatgccttttaatagattcagttgctcaggagcagattgaggttgtatttccatatagtcctaccttgtaaaaaatggatgtgtcaagttttttgttggtgttattgtttttaattgttattttgacttgctgggctgggcgtggtgattcacgccagtagtcccagcaactttgggaggctgaattgggtggattgcttgagcccaggagtttgagaccagcctgggcaacatggaaaaaccgatctgtactaaaaaactggaaaattagccaggtgaggtagtgcgtgcctttagtcccagctactcaggaggctgaggtaggaggactgcttgagcccaggaggttgaggctgcagtgagctgtgatcatgcgctgcactccgatttgggtgacagcgagaccctgtctcaaaggaaaaaaaaaaaaaaggttacttgcttatgaataagaccttccatatagcagttattatataagcactaggtaaatattaataaatggcaaatactaaaaggaaagacaggaaaaggaaaggcaactgatatttattgaaggcctactattatagtaaacttgactcataatttatattttcttctttaattttaaccttggcatgcaatgattaytacccaattttgtattcagtaaaattaaagcccagagaagtttagtatttttcctagagtcacatagtaaacacgtggcagcaggggtgtttggatactattgtgccaggcagcctttccgaacactccagcctatttctcaattctttcttggctccagaggattgtgtagcargaggggaaatctgttcagagatcaggaaactggaccaattgggcaagctgccagagcttcctttactggattgtaccagcaagtttgtttttctctgtccaatactgggtaaaggtcccaccgaaagcctttgtctctgctcagaatgcctggtatgatctctgggaaactatttggcaaaggagtgtggcagctgaagcacagaagcctctcctaggtggttcacccatatctgatttttttttctttggcaccttgtaacagacctgagaatgttgaaattttgtgccaacgtggacaccattcagcatgtcagatttctctgataccgtgaagatcaatatgttggatgcaaaggaaaagtcccagcaatagattccagccctcactgccacttacctggtatattacaacagcctccatactggtcttcctatctgcagcctgtcctctgctttccggcccacttttctcagggggatcctctttcaaataaaggtctgattatgttcctccaatattaaaccccttcagtgactccccagttcttgaggaaaaaatgctgagtctctgagcatagcactgaatacccttcctggtctggccctgtttctccgcatgcttctcccactccacccagcttctggcaggtcatactaccgtggctcaccaaagatgccttggaaaccaggtactttcatgtctctgtttctccagctggagtttcgttccttctttgacctgcctggcaaactcctatgcattctttgattcctactccttcatgaagcctttcagcagtttctttcttagcacaactctaccaccttgtctcacctgttcacagacatctgcctgcctccctctctaggctatggtgccctccaaggggaggcaaggtgttgttttcaaatcattcacagtacttactacataggccacttacagtcagtgtgtaataactgaaggaggacttgagtgaataggcaaataaagatggttaccatgataggccgagatctgaaaagaagctaataatcaatgcatgaagatgtgtgaggaacttgtgtgtcttcagtaccattctaaataccatacaaatacaggtgccgccagagtgcttgcacatggcagcttcacagcccatttgagaagtagaattaatacatgtgaagaatgaggccgggcactgtggctcacgcctgtaatcccagcactctgggaggccgaggcaggcgaatcatgaggtcaagagattgaaactgtcctgctcaacatggtgaaaccccgtctctattaaaaatacaaaaattagctggacgtggtggcacacgcctgtaattccagctactcgggaagctgaggcaggagaatcgcttgaacccgagaggcagaggttgcagtgagccaaaatcgcgccactgcactccagcctggcgacagagtgagactctgtctcttaaaaaataaataaataaaataaaagaatgagtaagaaaaccaagaaaatatgcaatttagttcagcttgtttggtgctggtaatactttatttttcatgtgtcgatttttgatctccaccttgcactgtgagctccctgaggacagggactttgtcttggcaattatgtcttcacacttggcatacagtmagttttcaagatatgtttgttcaatgaataaatggatggtaggcaccattcagtgctgtttagggtcaaaggaaggcatgatttgtgtgggttgaagtggtcaaggagggcttcacacataagccagttatgaaggatataggcattgaagaagcactaaaactggttgtgagctttactcttcagagagtcacagttttagaaaagctcttgctctattggaaagaatatgggttttagaccaaatacatctagaatcaaatttggactctttcccttatctgctatgtgatcttgagatctctgagtttcagtttccttgcccataaaatgaaatcaatattacttcccttagaatatgcttgtgagccgtaaaagcgatatcatatataaagcatgtagcataatgcctagcgtacattaggctctcaataaatggtaagtaaaagctgatatataggtatagtgtgtctgaaatacctgggaaacatggattatttggatgacgtagtaacatttgattaaatttgcatgattattatattggcacataacaattagaattataatagattccagtatttttatggccttttaagtgtgttttggggatttctatcacatttctttacttttttaacattggaaaattggaaatggatatttgcccccaaattgtctgatatatagatctcgcccttcccattacacttgtgaagggaaggcttttctggcaggaggagcataatgcgtagaggagggaaagggaaatgagctttccattttgggagaaaaattagagctactcttccagtgacaaaccgcattgcctggctttccttctgcaggcwctgcctcatgcctgtgttcctatagacatyggagttaaagctctcattcatggtcatgattctcgcctctgtctaattcttttactttgtcgtgtaccatctctccttttcccactgttttttccagccacctctgtttcttttggtttccttgagcatgtcaagttcttttctggcctatgttctttgaatttactgttccctttgacagacattcttttcctctggctcttttcatttttcagaaaatcagctgactccttaccctgtggtggtattggagccaaataatggaattgatttttcagtgtttattccacataattccaaggaatatgattttaagagtgttcacaattcrtatttttttttaatttttgaaattgaataagtttcaaatacgaaaatttaggaacatgatacaaaacttttctctgtgcaccactggagtactgcttttgaaatcaattctctctgtcctggattacccttagagctcctgtctcctgcatggaggagggtggagggcatttaacatgtccayctctcaccccattctacctgagcttccagcaccaccacctctgggcagttccgcttttagtcagcagctcccagttcccataattttgacttctgtccttgctagtccagaagaaatggctcttctgggattgaattcctccctttccccagcagaaatggattggggcagaggaattgcggagctccatggcatagagggtcctggaaggcttgtcattagggtatccagggtgggaaggggagtgaagggaggggaaggaggaaggaattgagttgggaagagtcaaggaggatgaatgaagttgctgactgatgtctggaataacattatttcaccctcaaaaataccagtaattcaggactgaaaaataaatttcacaatatgttttaatttcaaaaagtgatagtgtatttgacattcttatccagcctggtctcacctcaggagttcccccattggagaggccatccctgaatttctaactcacaggcctcccctacgttaatatatttatgtcctcctggcccttgtttactttttacttgtttacttttgcttttstttacttgtttacttttgctccatgaagtcagggacctgcctgcttgctccgcaatccctagaactgtgtctagaaccttagttggttgcagtaaatatttgttgaatggatggatgagatggttgtagcaatctaagttgctttggatgagattaacactgaaaaaaaaaaaaaaactggttgcctgcaattctgtcagccagtccaggcaatgctaatacagctttgattattatgatcatgattattattttgttttgaaacctttttcagaggccaagcatgytggggacttgagggacataaaaatctttcaactgattatgccacctgcaaacaggataagcctgactttctacctcacccacctcttgctatcacagatatgaatcaacgaacacacaaaaaaggttttcaattctccctttggaaagagggcacatttaatattctgagtcaggcaaggaaagactctagccacaaagacagctgggaactcaggtccatagcgggcacccaggacggaggtgaagagaaggcgcctccctgtctggtgacagcagctggggcccttgctgcctccctccccacaaaaatccagttgggaccagtgcatgctgggaatctgcctgcctgacagaaacagatggcctcaggtggtgactgatctcttggtgacactaactgcatagctgctgctttactcatgaccgaatgagacacgagatggcggaggtaagagttggttaccttgccgtctcctcctcagctgaaatgactcacattgctgtagcttaaatttcagtccaggctctctggactcggggaatttctttttgctcatgctcctgagaaccagagttctccaggaacatctgtagtctctgtcttcaatcaaagcatttgagagatgctttatttttcccctttcctctgtacctgtcacagaagggggcctgtctgaataagatggcacataatctgctgagtgcagcaacccctctgtgcagcctygaggaagaagacaaggcagtcaaagtaccttccatcatttcctggaaaatgtgtcsgtagcttggagaggcagagtgggagatggaagtaacactgcatgaggagttaggtggtctatgttcaggggccagggttgtcacttactagataggggacctttagccagtcacttaactccaatggccttctgcttcatatcatctcttatgtagggtggtgggactggattaaggacagcagatagattagctgtcagtcttactgattggaagttgctgtccagagtacagtatgggggatggctgggaagcccatctcagctaagtgagaaagagcagtcaactattggtrtttgccaagtgtgtgacagtggcacatctgcctgctattatgagacttgatggtcatttctgcctctgtggttttatgattccaagtgtcctgcaagtgattctagagggatcatgaaacattttctggtcttaataattactcagggatctattaacaatggtgaggaacatactcacaaccagactttcattgagagtttaccatatgtatattatatcacttaaccctcatccttacggatagggaggctcaggctcatagtgattaaatgacttgccaaggtcactcagctaataggtgatggagctggaattcaaactctggtctgtctgcctccagaaccgaagcgctgaactgccaccctatactacttcccagttggagaatacctcagtacagtaattagatgccagtgtgtatggctttgcctatcagtacacagaaatcagaaaggtgattgagagattcattaatgcctccttgcccagttcttttgagcatatcttatttgagaaaggtgcacgtgaccttgggtcagtttgtctaactctgtcagtctcagttatcttatttgagaaatggggcyatagcttttaagttaataatccagataaaacatcctatagtgccccagatgtcagtagcactcagtacatgttcatattatgttgccccaaggtcacgtggctgggaattgagctgaggactgcccacctccgaagtctatgatggcaccttttggttttggtacaagtgagtcctgagtggaccacatggcagcattagaggtgcttttgaatacgaaaggtggcgtgaggatccctctcacttatgtctgttctgttgtccagaacttagtgaaaatcctggtccttacccgctagagtgaaaaaggaaggaaaccttaccattctttctgtgtacctttctctggctggggctttctctggtctaggtgtgctcagcaaatatgacaagtagcaggccactcattttgaccacgcccatgtggcagacagctttcttcactttcacgcaaatgaagtacaagacaatcacatgtatggctgcactgaatgtaaaagattaaagagaagtgatatgccaaatagatgactgggagttgacgtttagcaaagtaaatctcttggtggccctggtaaagttaatttcaataattctggttttttttttcatcttagaaacttagaggttaaaaaataataaatatacatgaggagatttaragtgtatgtggaaacagagatcttcggaggacaagtgggatatttctttatagaaagagttttccctcttgatttttttgcttggtaagtttctttcaaatcaactcaattcatttggtgctattgcttttcttttgtgaaaacgattctggggatttgatcaaaaccgacatgaaaatacaaccctcaaatggtaaatatcagggaatctggaatttgcattttctaggctaaagtaatttactggccaagtttgctgtctcctcactcccccaacacatgtacaactcttaaatctcattcccctttaggctccttctctctcagtttatttccagcacacatgcatatgcatccatgcatacacaggtgtgcacatatgcatgtatacacacacacagacacacgacacacacgtgacgcacatattttactctgtgctaataaataggccagtattggctaggctgggcctcaggactgtctggtttaaatctaagctgcctgggagatctggagtaataagtgagtgacaacaggtgcagatttygttacacccttctgaactcagcccatagttctttctttgattcttttcacccaacacccttgcttcaattgtgtccaataaattttatagctgcatgatcctgtttcagagctgaagggagatttttccctccacttggctaaatggtgcctaagtcaaaacaccacttcctgccccctcctcacactttaagaagtaataaggaataaaccccaggccataagctgttgctgggtcctgtatcttcagttttgcatgtgaagagctaattttctggtcccattttagaaaagccaagaattaacttgcagagaattagccataattggggagaaaataattacttggctttttctgccctgtgataactggagccactggcaaatctttcacagcagtgtcaacgcctacttctgtttaaaacaaagtattgcaccaggggccttgaaagtcacatctgaatgttctctgtggtacattttggtccaaaccaccctgaatattggagttggattcatttcatgtcttttttggtgtaaaatcccggtgcagggagacatttcatattacactggaagacatgaatgtcttttgcaggtgtcaggtatgctcatgggccctgcatgcatacttaaggttgggtccaattggatttttttaggagcagtctgtggtctaagctgagaattttttctcataagggcccattttcctctagcatttttctgttttgagactttgcccagctgcctctattccctagtatgtagacttaataaaaaatctcttggttcataataaacatggaaaggagatggtacacgttttccatttgctagtagaggtttacctgaatacagttggtcatatatctcagtgtcgtcagagtacaacaaaatgtcatgccttcccatgatttcagacaccactcttcagtaatgacttatctgaatatcagccctgtacctctcctgagctccagccttaagggcacacttttcattgggtagccctacctgctgacccatagacaccctaggctcaactcattttccctaaataaatttgcttttctttctgtgttttctatcatggtaaaggtgctgtgatccaataactcaaacaagaaaccttgatggcatgccttccatatccattactgttagctaagtgggggacaatctatatattgcctcagatatcactgggatccattgccctcctaactaggctccctgggtccagtcatctttgcctttcctccaacttctcccccatgtcacctacctcctcttttctctacccccaccaaaacagtacttcatacatccctagtattgtctttaaatgtaaatctgatattatttaactatttgaattctttagtaacatcccactgctggcaggaaacaagtcctaacttcctagtataaggaatataaggtccaatgtgatccagctgctccctgactctccagtcttacctcctgtcacactaccatggatcaagccccatggttccctttattctctttcaactctgtattttcgcatatgtgactttcttctgctagtaatgccctttcttaattggcctgtacctttgactcctacacttctgtattattaggctatagcactagatgtggcttaaataagttagattatttgtttatctgatagtccggacgtagatgctttccatgagatcatccaggaacccaggtagcttctgcattggactgtgcttaacatgatgcccctttctgcatgatccaaagtggctttcaaccacagcttccttcaaggcagcaagatggagaatagatgaagaaggaacacaccttctcccttttggtgctgtgactaataagaaatatatttttagtttctgttccaggtttgtgacacagagctcctaaaagccttgtaatttccagagtgatcaacattctaggagtatcttttgttgtactatttagactttgactctggttcctaacagagcttctaaatcccttggggtttcctaagcgatagagcatcttttgctttaatgaggcgactcttgggctcctggataacttcagaatgggagttggtcagaatgggacttggtcactagaaagaccatgtgatggatagcagctcagaattttcagccctactccccacatccacccaatccaccaggaggggagagaggctggagattgagttaataagcaatcatgcctgtgtgatgaatcatccctaaaaatccctgaaagatggggtttggagagctcccgggttggtgaacaagtggaggtgcctggagagggcatgaaagctccccaccccttcccacataccttgccctatgtacctctttgtctggctgttcatttgtatttgtattctttataataagccagtaaatttaagtagagtgtttccctgagttttgtgagccattatagcaaattatcaaacctgaaaaaagggggttatgggaacctccagtatgtagctgatcagtcagaagtatggaaggcctagacttttgattggcatctgaaatgggagcagtcttggattgaagccttaacctgtgtgatctgcccttactccaggtagttagtttagaattgaattgtgggacacctggttggtttctgaagagttagagtattggttagtgtgggaaaatccctcacacacgtgatgtaaaaattgtcatgagtatgcagaaaaaagtttttcccctttagtggcagtttccagagtttgtaaatatctctgcttcccaatcttttgtgcctcctgtctgtctggtactccacctctgtagtaatggcagcagcagcaattctagtagtagtcacagtggtgtttctctagtagaagctgtaatagtagtaggaagaagaggtgtaggagtagtatcagtatcataatttcccattcctagtttcagaagagattgaaaggctaagtgacatgcctgaggtcacatagttaataagtaaacggcaaagctatcgttctgactgggagctctcttacttcagagctcaccactagactgtgggtagttttcaatccagtcacactaaatgccagttatttccttacatgattacctctcccacaagwttcagaacttcttgaggaaaaggacatatccaactgacctttgtatctgtagagcctagctccraggctgggcgtatccatcagttttagacattgaaatcagggtttcttaaccttggcaccattgacattttgggccagataattctttgttgtggggctgtcccattgtgcatgacaggatgtgtggcaccatccctgacttctacccactagttgccagtagcacatatccccacccgcagccagataaaccaaaaatatctccatgcattgccagctatctgctgggagacaaaatgtccctgattaagaaccactgatttaaattaaatgaaggccaaggagccttgagtagtgttcatatccgaaaagggcattttcagaattgttcaggctgctggatctctcaaagatgatgatgtattttccaggcctcatgtgtctggagcacaggttgcctgtggtggtggctgcaatgatctcagtgtgccaggccttcacggggaataccagagagggtccctctggagcagctcttactgggtcatggagaccatctgtctggcatggtaccacctggcaaaatctctttgccttaaccaaaaatatgcttttgtaaatttcctggcaaagcaggggctgcattctgtttcctgatttctctcttttatttccagatgtgtcactggtgacacatagagcccaatgagaactctgttggaaactcaagtttctcattcttcgccagctccgttgtcatgattttcccaccgtctaagccagtgtaggttacgttacccacgtgctggttagtgcttggatgtcagttttcctttttaaattctagatctgtagcatgctttagggaggaaactttatggcttattacacaaatggagttaacccttccctgctttgcagtgtttttgttagtgacagagacatgaattcaagatctgccatttattatttgtttcattttggacaacatgcttagcttctttgatccttgatttgtttaccttcaaaacagagtaacctacctgtcctgtctacctccatgggattattattaaaacacaataagataatctgctcaaaaggcttaaactccctagtatgatttactatcagtataccttttgcacccaagaaaactctacagtatcattgttcatgggcaccaaattgtaagttcagttaaggcagactttgtgtctttttctgccagtttctaggacctagaaggtattcagtaaatatatggtgaatgacagtatgaaaaaaattgggaagtcagattctgtggttcattgtaccagtgggggctggagggaggtaagtgaatggtttgtgtggctttgtrtcatttgtatttgtgacagacattccaagcaatagcattttcaagggttcacaagtgagtgcctgcagaggcaggacacacttaacactctggcagatatgcgacaagacagggtagggaggggcccaagggaactagagagggcatacccagctgtcttagtcattttgggctgctattaaaaaatgccatagactgggtggcttataaacaacggaaattatttctcactgttctggaggctaggaagtccaagatccaggccccagtttattccatgtctggtgaggactcacttcctggttcataggtagccatctcctctgtgtcctcaaaagacgggaggagtaaatgagctttctgggatccattttacaagggccctacttcttcatgacctaatcacctcccaaagccccccccacctccaaataccatcaccttgaggattaggtttcaacacaggaattttgagggggggatacacacactgtctatattgccaacctaaagacattcacagttacacattttgaagtctctgcatcagctaaacaaaatatgtctttgggccaatttaagtcttcagacaaaaatttacaactccttattgacagagtacctaatataaatactgggacagatgcggggcagataaagatgaggtgctcaggatccggcagcagtgatagacaggaaattagtgagacaatgagaatatccaagatacatggagagcttagcccagcactgtccaatgtcctttacaaatgacaacttgtatttaatcctcacaacagcccaatgtgagttagtggatattatgtcccctgttttataatgaggaccctaaggcacaaagaggttgatattttgccagaggctttgaagccagtatctggggaataataaaatgcaacgtgtatgtccaatgacaaaggaaacacagaagccccctcttagatctcactacttctactcctgcccctccagcccctccatttgaagatccctgagggatctgaaaatgcaactttgatcgtggcacagaccagtcctgaggttggtgcagtgacatccccatgccacagaggccctgtgccttctggacgctgcctctcttgccagccttgcccgcccctcatgctctatgctccacttcacttgcccagacagacaagcactttgcccctttgcagccactctcccctttgcctgtgtctccttgttatgcagggcctttcttattcctcaggcctcagatcaatgtcacctcctcagagtgggcctttgctgcccacgctgcccaaagatggcctactgggtcactttcttctttgccacttgcttatttccttcctcacgtgtgtgcctgcgtgtgtgtgtgtgtgtgtgtgtgtgtgtgtgtgtgtgtgtattttctgatgcctccacttgactgtaagctccaggagtgcaaagatttttgtcacgttcactgctgcatcccattgcctgagacagtggccagcatgaaggagatacacgagaaagcaatgtgtgtgcactgagtgagcgagcacatgggaggagctgacttcatggggcagattcagtcagagagactgtggctggcctggtgtcacattggtgagaagtggcacagtcgggatttgaactgatcatgacagcatctcgcttgaatcccatcattgcctccctaccgcgctcaggttggactccctggtgtttaccatggacaatgaatcttgatgtctggcccctgtagcacttctagcctcttcaccctcaattgtctgcacatcctcccttgcccctttctatctgcactgacttcaccgtccctcagtcaccccaccttctttctttccctgctcttccttatgttctcttcccacggyaggcaccctctgcccttctgtttcatggggctgtctcttcattgtccctgaaatttgaacttcagtcctcctccccccgcaaacttcttccaagcccatggactagactagaaccccctcaagtgcccctcattgcatttatcatggttgtaactctatagttatttttgtaatttattgtcttttctggcttttctgcccatggcccctacaacaacagcatgttcatctcattcttcttctgccctggctcgttaggtaggaggtgcttacataaacgtttgtcaaggaaatgaataaatgaataaataaatgaataaattgctggatgaatgaatgagagtaagtgaatgaagagttcctgaatttgcttttatgccacctcccttctctgggaaatttcacacaggataggatttctctggcatagagcaacacttctctttgtagatctcagcctgtgcctggagactgggtaaagttgaatgacggggtgcaggaagccttgtgttgtcttgtcacaacacaggaagggaaagtactttggcttttactgttgtaaataggactaaaagtagctcttcgggggtgatctttgtttaccactgcctaaggccactgtccttggagaaaggtcaggaggtgggtgtttacaagttctgtccaaactctcccatgacactatgccacaggccctcatttccctgacccattgttaattagagcagaggaggaacttcagatgctgagtttgtctttgaagaaggatccagaccctaggatgtcatcctggagactttgctcttccttatccttcatacctggtcctccaccttcctgacagtttctcttcttcctcatggttattgggagatagaatgggtggcagatttttattgtttcctgaggagccctgtgctttaatttccattatgtgtgaagatgtctgccatgaccaccaggttgggtgttctgctagattggtgtttgggagccagttgtagacagagtcaaccagaatataaaaagtgtgagtgcagagataaacccactcctgccctataacgacagtaacaaaactggcccagtggtagagctctcatcacaggccaggcactgcgctaagcacgcagtctgcacccctttagactggcccattctctggaaagtttcaaacatacacatcagcaaagagtataatgaaatcctgtgtacccattacgtgtaggggctgaaaatgtatttgccttgatcctgctttcaaagcaatgggtctagtgactgctttgggggaggagttagggaagtgcttaactcatattaacactgatattataaatttacagaatgcagctcgctytggagattatatctggttatatatgtgcacatatcagtgattgctatagtcccctggtaaggggatatatatttaacttaaaatgttctgtttggagtttttacataaatgtcactaaatacatgaatatttcagacccccttcccagtctagagtagtattgggttaagggaactaactgttttgagggaatctgagccaatttagtctggcaggaaaatcatgtagtgaagtagtgaggcccacatggcctctgaccagtcagggagagatactgaagttttacaagagaccatttaatgagagattatccataaaacttgatgcacagatttcaggagaagtctttttagtacttatgtgtgtgtgtgtatgtgagtgtttaaatgtggcaggctaaagtgaagaaatacgactgctactgatagtagctattgtttattgagggccagtatatgggtcagttgctgtgccaggaggtcctttgactacagtctattcctcaccaaggcttttagttcattgttattaccaccattgtagatgtgagaamatggagagtttcagagagttgcccaagactattcacataacaagtggcagggctggaatttcaatccaagttagcctgtttgcaaagcctttgccctttccattagactacatagcatcttaaaatattctggctgcttacttgagaggtaagtatcagttgggaacttactcacttccttctttgtttcaatatacaacccagaatgctttacaaattctgcagaattagccagtgctcatgtttaggcatatcatagattttttaaaatggctaatgttgctgttcctctccttgtgctttggaaaaaattttcagagtccgatacctattgtgacaacttttctaaacactcaaagtgccaagttcatcttgttagctgttcttccaccaggcaatcaaaactcatgttagttccctgtggattcattatagtccccgggaaaccaaaagttttgcctgtgtttggcacataccagttaattgcctaaattgtaacttctgagtattaggaattatcttaaaaactaataccaaaatttggtatgatgtatttcaattgagggggaaaatatttggaaatgaatttattttgactctggggtaatatcttttgcttcacatttagaaatttacatactgggttacttccrtgacctaaaacaacttccaagttttcttatttcctcagtacccctagctttgttctggatgaggccagtctctgttccaacgcatgatttaaatatacacggttctgcatctttgtctataatgtttataatatttactatctcatgaattttttatatctacttcataatctactctctccctctatttttccttgcacttgacagcccaactggatgttgtctcttaattctttgtcacttcatggcagtttataattctttaatgttacttattatatttcagctacactgcagtaatggatgggcccattttctctcctccagcgtactgaatgggactgtgtcttgtctccgtgtgcctgacaccttgcatggaatttgcacctcatagccrctcaatagattttaattaattgaaatttaaaagggaacttgtgtggttttgtttaaacaagaccataaattagaaacaactattttcatgaatttgaaattcccagaaacattattctttaatactgtacttttgtcgagactgaagagtttggctttatagtaaatgaaatgaatcacagaatcattgaaccagagtaacaacaatactaataaaaacaccagaaatcatctgtgtaatccattcctctctcttaatgccagacagttccccagccaccttaaaatgatagaactctcctttccttaaagatccttttaaagaagactgtcatcttttcccattccacatcatcatgtcttctagccctacaagttaggcagcttctcctcagatgatcgaaaccctcccttactgaaatttatgcttattgctttcataaagatgaaaagcagctgcttttaactgaaaatagttctcttcctaaagatggttattccattattccatatccttctcttccctaggcataattttcctttccatctgacattcctttttgttctatatttccaaaccattgaatactactctctcaacttacggttttttgcctaagaaaacttggactgggtgtgattagtaagtgatcgttgattttagatgtactgagaaatatgtctcacaccattaaaactagtcgatccagccaggctggtgggtaactggaatactgtgacctcaaatgatatgtggtggtatcttttaaagcctgccatcaaccattcccatctcagtttctccagttgcttaatttataagacataatttatttgttataaactgctttgcaaggttcaaaaaaaaaaaaaaaaaacggaaatgatacacaagagaattagattgaatttaggccattttttccccctcatatctggtttttaaataagccctaagagtgctctcaattagaaaaacacatggtaattctaaaggagataaaaaaggaacatgtacactccaagtgcacttttatcttttcatatttaagaaaccccacaaagctccttcttgcaaattaaagaggatagcaagcaggcagctttctttcctcatttagtttagcaagcatattgatttacatttgagtaggggcctctgatctcttttgtttgtgggtggctttgtttgtttttaatatgaactcatttaaaaactaagcttatggactgagttgcaaaggtagagcttcagtccaacactcaaagtagtcttcctatgcaaaaataaaatagatatttatgtatgtggtagtaggtcaaagaagacatcagtgataactattgattcagtaaatattaaacatctactatgtgtcctccttactaggaagactaaaatgtagaatgyaccatccttgcatctagtgtgcagtgtagtatgggagagagaaataatttagcaggtgatcataatgcaataaatgctatgataggaagcaattaaggcacagtggaggggcgaataacacacctttggatgaattcccagaggaattgacaccagaaggtgattaggatttaccaaggttaagaaaggtgaaggtgtttcaggagtgcgttaccaagtacagaagtgaatggaagtgtgacccattcaagatactcttgagtttgtttcagccagagaacggacaaacaagggaaaacttaagtactctatcctgggttcctcaggatgcacactttaaggacgttttgcgtttttctctggtatttatttattgaagttctcagaacctccacagagctaatttctgtagccttttgtgctcccataaagctttatatatgtacccacatttaaaactttcttacaatactttttgcatttcctccatatgtctattttcccatctactctctgagctaatcaarggagaagacctagtactcacgtctatctatctgcagtgccatgctgagtgcttgcagaaatgtgtttgggaatcagtgcatctctctatgaatggctagagcattctaagtggttttgcttctaactgtgcaggagggcacagtttgggccyaatattggtttgcaaattcaagataagaaccaagaatttgattcttaactcaattttatgttgacttgagcaggctgaactgggttgcttatgccattatttcatttagttcggataatggctatcaaattagctgacaacccatctcagttccctgtagtattcttagcagtgtcttaaagtgggttttcatttgaacatttctttattatattttctttctcagaagtagccaagagatgatgatgatgttgatgctggggaaaacaatggtaacaagagcagctgctttttattgggtatgtgctatgtgaattaaccctgcacttaaccttttaatgaatttatgagataattactactgttaccttcttaacagatgaagaaaatgaagagcaaggaggatatcttactcactagtgaatgatggcttcaccatgtctgatccaaactgtactttgtaatgccttcttcatagcagcactaaaatctaaaagtctggaagagtctttaggagatcagttattccatttcacatctgggggcaggattatgcttgaactgaatgccttggtccactgcctgaaatgtatcctctacaacctttgtccacctggtgaactcctactcatatttcaggactcacaattcaagctgctactcccaagtgaagcttccttaatattcccaggtagagttgccctcttcctctgttgttcctcttaaatatcttgtatttcactcatgaaattcaccaatcatgcagagggtatgtttctagaggcagtttgtatagttgtgaaaggtatggactctgcagctaattgtttgggttccaactctagctctacccgtattagctaaataatatggtgctctcttcccctgacagactgttaatcccttgaggccagataatatttacaagaatttcttaaatggctaagtcacaaaattgtcatgttttttaccttaatagcaagtctgaatgtatcctccttctgaagagctgatgtattgtttctgctggtttctgcatcttgatccctgaaagatattgaaaacctaattttaaggccattttcctgtttgtttgtttttgtttttgtttttgtttttgtttttgttttccatttctgtttcctttccctcttttcctgtccttccttagagacaggacatcttgaaaggtacgaaatcttcaggtctgtacttctacttcaccaacttccttttaatgtttttacctctttgtcttgtgtggaaaatcttaatctgactctttctgctttgtgtcaaagggatactgttcatgttaaaattctcagctctgagaggtatgtgagtaggccgttccttgggtgatgggacagttgacatcatatctgagaagagcatcaccatggtgccctttacttatggccgttgtcatgatgacagtcatagccacctggagcacagtggcctgacaaagacaggaataggaagagggaaataattcgtccaacacttttgtattttgcacaatgggaaaagagtggcatcatttctagatcctaaaccaaaattgatagaaaaagaagactagaatgataagatctgctaaatattctcagggggttgaagtatcaaatatctgcagatggtatcactgagcaaaatcaaggagagcagtttaggatttttagtatgagggaaatgataatgcttttcagtacttcttagagttgtcagtgtctcataaaagataaagaatatttgttgagtgaccacaacttgctgggtactgggctacactacagtatagtatagttattactgagaatttgtagagataatcctagcttatcaaggaaatatttgttttataatttgttcaggtgcttatttatattgaagaatattctcaagttaagatgatttttttagatactccagaggccagaattaatcataaagggccctaatagccaaaaagaattgaaatgcactaggccaattggcagacactatttcagtctgctctctttcatcctttgccaggaattgtacattatctctttaaggcagagcagccttggatgaccatatattaatatgataacttgcttttccttgctccccaccccccaactagtggctttagaatagctttgctatttttcacttatttcttggcagtagcactagatcccaggcttaccgattatgcacactttagataactttgggtcagctcagtactgaacaaatggcaagtcaggaatgccattaagactgaagaatgttggaagataaggattatatagacaccactgtccttatacacactgtgttgtcctgtaattggataggccaaaatgagttgacactggaagaggtattttaatattggagcttataaaatgtttagaaatgttttcctatctgagtcagactgagataggtatgtatgttttctgtctcttctgagtgacactgggaaatagttatgattgggaataggccttggtaccaataacctcatatatacactagggtagaccttgcagaggaagctggcaccagggcatgggaccgtgaagcaaaggggttcagaagaactagagagtggtccrataatgagtcttcagatggccagaggcaaaggctgagatcaagcctcaggtccaagaagccagaatcataagcctgaaataattgagtgagaaacccaacattactagaatggagaagaggctaggggaaaggcaggagcaaacccaagggctgggggtctgaagatgttaccatcacaaggcagccccattttaatggcctctagccacagggtttgccattaaaaactgtaggagtagacagatgcttgatggaaacccttgaccycgggtctttgctcccttaatgaaggaatctaaggcaaagtagagattctttttttaacatttaaactttatttttaattgacagataataattgtacatattcatggggtacatagcaaagtttccatacatataatgcatagtgatcagattaattagcatatccatctcaagcctttttcatttcttcgtgttgggaatgtttaatatcctctttctagtgatgagaaactgtataatacattattgttaactgtagtcatcttacagtggtatagaacagggctccccaaccccatggggttctataccactgtaggatgactagggttaacaatagtgtattatacaggtactggtctgtagcctgttaggaatctggctgcacagcatgaggtgggcggtgggctagtgagcattaccacctgagcatcacctcctgtcagatcagcagtggcattagctcctcaaaggaacaggaaccctattgtgaactgcgcatgcaagggatctaagttgcacgctccttatgagaatctaatgcctgatgatctgaggtggcacagtttcatcccggaaccttcctcctcgcaacccccacccatggaaaaattgtcatccacaaaactgggtcctggtgcccaaaaggctggggaccgctggtataraacagagtttatttctccttatctagttgtaattgtgtatcctttaacagatctctccctatctttttacatgtcctttgataccataagctctatggacaccctataatatttcttcattatacttacccttcatagtaattactagagtgagctcttcatggatttttctcttttactagactctaagctccacgaaggaagagataatatctgtgcctggtacatagtaagagcctaataaatatttttggaaggagggagagaaagagggaggagggaaataaatggctcttttgctccttttcttcatgccagggcaacactcagcttctgaggtatgcacagcaaggatcttgctgagatgggtgtggccacttgcttgcctcacttccagccctgggcacatgcagttctttctacctggtgcagtcctcttcctccctgctctggcacttgcctctgcttccacttctgctgctgcttctttttctagtctcctgcagcctaatcatcctcttgacacattctttctttaaccatctgaatgccttcagtatggttcctgtgagctctgaatgttctggaagccattgttttgttttgataattttgaatattttactcttgctcattatggattaactttacagctgaactctcaaaaccagacttcattttcccaacttgagagaacatctcattgttgtccctgtgtccttgcctatggcacacatctcccgaacacccttttttaccagaacatcctcacagcaaacctaaggcagctaactgctttctacagctctgtgtttcttgacctcttccatctgttttattttcatatttttcctttgttaaaaaaaggagataacagacaagaaaaacacgagaaattaaatacctcaaaattactgtacattttcacttggagtaaccagtctttgtaatgttttgtaaatatctttccctgagtgggcctgaataagcatgtagttaacaagcatggacttttaattgatcagggcaggttttgaacttctgtcctgctctttcctaatgatacaacctccaatgacttaacttctgagcctcagtattctcttctgtgaaatggaaatactaataatagtatcctcacaagtttgttgtgatattcagtaacccacataaaatttctatgcataatgcctggcgtataataggcactaagtaagctgtcacttgttttctttactttcctgctttctctcatattgcctctaattagtaccgtccttattttttaggggacagatccaaatccgtgaatccaggggcttcatcacgatcttggaatattttggtggcaactttaagatcttttgttttctgactcttagatctctttcttttggtggcatgggaaaattccctcaactcgattatttattcagttctttcatgctccccatattgtcatggccacgtttgaatcatgttatcggcaagtctgaccgaaaaagcaatttaatattgccctgtgttgcatcattgcatatattatttcagcctgtcacgggcctgtcagcaagtcttgatgaagtacagagccaatagtaacaggcctgaaatctgacagctctttaacagaagctgctccgattggtgcagtggtatttcttcagaaattaaggccttcttggtctctttgttgatacaattagcaatccaatctgagtcattttatctcccaatgagctgtatcttcagggctggtaattcagtctgttgcatggcttggaaaaacagagccatcagaggcctgtgatgtaccaaaggctgcagccaggaatatcttggtaatttatccccactctcagctctaattattctgttcttcactggctggttcgattgagactctccaggttcagccttccctaagcagagaacaaaaggtttcccttgaaagttggggcctggcaatgtcagtacagtgagctgcgtataaataatgcagcagtgccggcttcatttttataaaatcttggtggagaaatgcatgagaatgatcaggcccctggaactcagcaggcatgtgcttttgatgtgcgccttgctctgagtaaaagcaggagaataaaaagttcttgtttgtgctgaggctacttcatggtctctggctyggattttggtgaccctttcgctttgtttctgatagagtctggaggctcctacctaactaggaaaactctgatatgtatatagagggaaataccttcagtaactattttctgattgaaactaaagatgatgaaaataaagatggtgattatagtagctttacttatattagctttacttacattccctcattttaatcttcctaaggttagagttatctggctaggctattttctctataccttctgctctcccaattagccttatatcttttcttttttctggtcagattccccaaaaataaatattcagggtgtgaacctagcagccaaagctctgggagctgagtcggggaaaggagcttgagggctggcctgcaaaaaagcagatactgaatcagtctctttttgtcaagatactctacccttacctggaccttttatcgcaccctatctaagggtggatgctatggtttggctgtgtccccacccaagtctcaccttgaattgtagctctggtaattcccatgtgttatgggagggacccagtgggagataattgaatcatggggctgtttctcctcctgctgttcttatggtagtgaataagtctcacaagatcagatggttttataagggggaaacccctttcacttggttctcctcctctcttgtctgctgccatataagacgtgccttttaccttccaccatgatggtgtggcctccccagccacgtggaaccatgagtttattaaacctctttttctttataaattacccagtctcaggtatgtctttatcagcagtgtgaaaatggactaatamattggaccttagtacttttcttccgtagtgtgggagaagtagtaccctggttgctaatagtgaggtcacatgggatctaattacttcctaaacatactttttgtaccatctgctgtttttagcctcatttttatcctcactttcaggggtggtgagcaccaccacctcctgaactttttgggtctctgtagggtaatcattttgcttctgggtttttcctgctgctatttaggttttacctttctcaagtctaccaagagagttactactaccatggtttttggcttttagattttcgatgctgtcatcttctatcctgttctcattgtgggtttttgcctctttgaaacattcttgtacaaccattttgttggaatttttaaagggcacagagttcaacacgtgtagtcaatctggcatctttaatcagaagcctctttttgtttttgtactttttgaaataggaaagaaggtctgctagagatctggcatgcatttgtgtcttgggcagtaggtggtgggaggaatgtgaggtaggcaaaaccaggagagcattgttggaaggctctcctggttccattgaggttaatggtctatgcaaggaacccagtgttctgcttcatgcactccaggagtctaacttttgtctcttctccagcctgcatacagagcagtatctaaagatctaggctttataatagaagccattaaaaaatgattaggaacctgaaagcttccttctataactgagatctgaaggtttttattcattcacttaattaacatgcattgtgctctcaaaatttgccagagtagcattgtgcttattcatccatataactggatgaaaaaggcagatatggaccctgctgtgggaggttgtggcctgaccttatatactgaaatttccaraaggccagatagagcatcaagaaataaaataaaataataacattcttttatgataatgagatagatccttcagtgcctcctggtcttccccactcatacacactcatgcctaaaatagtccacggttctggactcctttagtgggccagatcctttcatcaccatgggctgctgagaccactggaatttcaggcaaacctataaaacaggggcagctttaggtgaccacattctgtcatgaatccttgatttcatatacagtttttgcattacatgtttgctagtcctaggccaaaacaaaaggagaaaagatctaattttagctgagttcgagttgcctttctaaaaattatgatttcttctttatgagtctttttggtgaattgacccttttctcaatatgtaatgtacctgtttattcctggtaacatttcttgttctgaagtctactttgatattaatatagccacctcagcttattatttgtatctgcatgccttatctatttatttattttttgagactgagtcttgctctgtcccccaggctggagtgcaatggcacaatctcggctcactgcaacctccaccttccaggttcaagcaattctcctgcctcagcctcctgagtagctgattacaggcgcacaccaccacgcccaactaattttttttgtatttttagtagagatggggtttcaccatgttggtcaggctggtctcgaactcctgaccttgtgatccacctgcctcagcctcccaaggtgctgggattataggcrtgagccaccacacccagcctgcatgccatatttttgcatctttttactctttatcttgcatttttatattgaaaataagtattttttgtttgttttgttttgttttgtttttatccaggcactgcgactcacctcacacctgtaatcccagctactcacaaaactaaggcaggatgattgcttgaggccagcagatggagaccagcctcagcaacatagtgagacccccatctctaaaaaataaaaaaaagaaaaagtaatctgggcatggtggtgtgtgcttatagtctcagctacttaggaggctcaggtggcaggattccttaagctcaggagttaaaggctgcagtcagtcctcatcatgccactgcactccagcctgtgtaacagagtgagctcttctctaaaaagtagaataagtttcttttaaactccatatagttgggttttatttttattcagctttattatctctgccttcgcactggagattttaggtcatttacatttattggttgggttttaatctattttctttttctgtcttccatatattctatataattattcccttttcctgtattctccagattacttaaatatttgttagtattccattttatctctaaaaagttttacctcttgccagtttctaatatgcgtctttcacttatcacagtcgaccttaaaataattttgatgcctcattatatataatacactttcatatcttcctgtgatttgtgctattattctcatatgatttgttcatgcattggattgtataaagatttaaattcaatttttttaaagaaatttatgtctsttgtatttactcacatatttagcagttctgatactcttcattcctttgtgtgtgttcacatttccatttggtatctttaacccatgtagtttctgcatgaattataaagtattctccttctccctcctcctatatgagtatacagaattgagtttgttgattgtattaacaccctttaattccccagtagtaataataatagctattattactcttatagtttacatgtctcttcacattctgaaagtacaatcacatatttaaatagaattgtcttttttcaaatgctttttaaattttagaagctcttgtttcatatatttcatactacattgtttggttcataaaatattatgaatggtagttttcttggattgagcattttgtcattatgaaatattcttcttttccttgttaaatatttttgatcttgattctactttgatacttatattgtcatttaaaaatttttttgtttgtatttgttgtagaacatttttgaaagaaaactgaatcacattttaaaaaatctgaattataaacaaggtatatagcttaattttaaccacagtatgattaatcttatcttttaactggttgtggaattcagcccattcacatttgatgaaatactgagataattgaccttatttgttccatcttattttgttttctatttatattacatcactccccattccctttcctttttgttttgtgtggtttattggtttcactggcttgttaattttttctttattcccttttattccttgttactttgagagtcctactaagtgttttgtttctactagtggttacattctcattccttataaccaacaataaacttatgttctgcctaaacatgtatatgtatttcaaggaacgttttctgtgtaccccttctctagactcttacttaatatttgcttacttaatgtttattttcagttccagactgttactaagttttttttgttgttgtttgttttttttttgtagaacagcaagcctattgtattttaagaaaactcaatattacagattcctgcttacattattattatccacttagatttcaatacgtatatgcatatatttttatgcatatatgtatatgtttaagcatattatgcacatacatgcatatatatacatatatgcaggaaagagacacacagagtgagaaagggtctcagtgtctactggttcctctagtctttgatttccaccatattgagaaagctgctctgaatcaattgttatttggttatactctttctcaagtattgtcctcagacagtgcttatgagtttactttttgaatccttgtgtgttgaaaatgttttttttgcctcttacagctaaataatattttgtctgggtataggattctttaatcagtttctcgtaatagtttgtacattattctagtgtcttctacattccagagttgtagatgagaattcccttagctaggattaatcctttgtaagtaacctattctttctgtctggaagcttgtataattttctgtttactcttgaaattcaagtgtttcctggatttacttcctggacttaatgagacttttaatctgtgggcttaaatcttacttcagttcagtataataaaatacctagccctgtattcatttaattacagtatctccctcatttgttcttttctttttttttttttattccttttctctctcctaaaaaacacaaaatctgttctggaatttctgttattctcatgttaggcttctggaatctgtcctccaagcctcttatctcttccatcattatgtcaatctctttgtatctttgctacttgtagtagcaaagtgggagagatggtgaaatgaatgagcaaagacagttactatggtaaattaagataaagataaagataaaattcagatgtcatatgtcatatttcatttacttggtcttccagagcattaatttgattttcattagtgtcagtgattttttagttcttctgtggaaattttaaacgtaaaatcagtatttatacttccagaaagaattttttgcattcttctgatttctcattgttttcatcattaaaagattctaccatatttttcatcatttctacttctgtgggacttgcctcttgtagatgttctatgtggtctctcaggtgaactactcccattaagttagttaatgtttttgttttgcctactcattgataaatgctattttgactttcatataggtttttagtatctattctgcattaacaagtctgaaagcagtgaaaggtacatcagttcctgccctggcacttgggctggcagtcacccaaccggccaacagcaagtggccccttctttcttcttagagcacccttggtggaagcagcactcctctctagctgccaatcttagaagcaactcagactgccagtgtagccctgactctgtagggcccctatctctaattctaattttacaaacctttgggtgggggtgactagtaggtacagcttgcctaaaggtgaatagttatccaaagagggcaagttgctaaaacacttcaggaaatgtcaaaactggtcttaatagaagactcccggaggggtaagccctttgttctgctgctagtaccttgcctttacccactaataatatgaacaaagtcctatgttttctttccctcctggagagttttggagtacctgtggcttcaattgtactcactaaactttaccagttctgctgcttaatagcacgtccatattacccatcagtttgatttaaagaaactcaatgaattggaccctaatattgtttgaataatcccaatgaaggagggagttgccagaggcatctgtagccataaaacttctgtagtcatcttcactccaggcatactctcttattttaacttcttgtaaagaccaagacatccctaactttccctttattggggaaaaaatctgcttggaaaaacttagttatgctgtgaagtgttgagtttttaaactattgctgtattatgaaccacaaccaatgcttgttagtttaatacagtaatcatttatttgactcatggacagctcatttaggctgtgctgtcctaggtgatccttctggtctcagttggactcactcactggagtcttggctgactgatccacgttgatccaagacaacctgggggtatctgatccagattgagctcagcwkgctattgccctgctccatgtttctcttatcctcctcatgggaccagtggactagcctagaatgatctcatggcagtgccagaggtgcaagagaacaagcagaaacacatagaatctcttgaggctcagactcggaactggcatgcagttacttctgcttccttattttggctaaattcagtcatgtgacagaatcagaagtcagaggtaaggaatcagaatcagaggtaggaaaggaagccctgcctacaatgtgggggacaggaggaggagggtgcagtactacaaagttacatggcaaagagtgtgggtatgtggagacatgaagacttagggccatgaactcaacctttatcagctgttgagaaatacagtgcaatattttaaacttacaatggtacctcaagagagagagccacgagtttagcttggaggtagtagagaaactttcacagaggagctgacattggaactggaccataaggacaacctggagtttaccaagcagacaaagataggtgaaaggagtaataatccattaagatggaaggagaagtcaaagtagaggcccagcactctacagacaagaatggggacatctggggatttaggagttaccctgtgtgattggatcattggaaacaatccttctatactgccttttgctccctaatattactcttgccagggagctatcgtacctccccaaaagttggaatttcagatgtcatatgccaggaggagttagcatattgtatactcttcagaacatgttacataggtgggctgccttctccacttattagagatgtatgttgcttaaaaaaccgtgaataatttagcatgtttctagaagtgcttgcattccttcagtatatttatgccacttagcatagctcaatgtgttctgtgatctgtgccacatgtaaaaaaatcattaatgataagtgacatttgttggctttcaaaagacatttaagcctcactcagtgctacctcctctatgaacccctccttgatatttcctccctgtctcccaccagattatgtcaggttcttctgctaaaggctttcatttctccctctacttccttcagagtattcatggctgtttgttagtatatgattttagttgtgattatttgatcaatttctgtctccccaattaaactttcagcttctgtgactgcaaaagactagatattttgcataccactggtttcctggatcctagtatagtgccaggatcatagtaactgaatattaaacatttattaagtgagtgagtgaatgcatgaatctatgtgagtgactgaatgagatacatctagactattgtccttgtgagataggttttgggttatctttaaaattgcatgagctcccaggtttaccatttacctaccatgtaatggacaaacgattcattctttaatgtttccattcagtcagtgttcattgtggcttgtcataatcctgaatgtgaatgaggtatttgtgatacagagaagagtaaggctgattctgggctgacggagttgctggtttagtgggagagatggtgaaatgaatgggcaaagacagttactgtggtaaattaagataaaggtatgtccagattggaacttggagaagaagcttttcactcagtctgcccttcattggggcttcctgaaaaaggacaatctgagctgagtcatgaaggctaactaagagttagatgcataatggggatgactgttccaggaagaatgaagcaaaagggttcagtacacagggaagtgggaaatcaaggctcactatagcaaactccaaataattcagtattgcagaatgagaaggcaagggtggggatggccagaacggagtgactgtggagatggacacagtcatatcacaaagggttctttaagccctgctgtgcattggactttgtcctgaagttagagcgtagcaattgaaggatcttaatcagagattgacataaaatattttattttataaagtttgccctgggtacaatatggagaacagattataaggcaataagactgtaggggagcaatatgaagaagcagttacttacccagcatgataagggctatggtagaagacatactccatgctctgggaaatcagaagaggagtgcctaacccagaactggaatctcagcctaggctaaagtaagagtttgaattatcatggtgaagaagctgggatgagttttcccaacagatgggggtagggcaaaggcactgaagtatgtcagaacatgactttcttcagagaactgcaagtaactttttattgttagactacagaatattaagggtaaattgagaaatgtagctggaaagcatctagcgttcaagtcttcctcctattaaatattgccttagactgggatgaccatactctttattatctccaccagacactttaaaaacttttttttatcatagaaacttttgaacatgtagcgagagtagtataattaacacccatgaacccatcactctgtcccaacaaccacccatgaccaatcttgcccttagccacatgccatttacttctccttctcatgttgcttaaagcgcattccagataccatgtatcttatacaaacattttcagtatgtatctctaaatgataaggagccttttgttaacataaccacaactaccaatatcatatctaaaatttcataatttttttatcaaatagcaaggttataatttctaattatctcacaaatgtcatgtaaacgtagatgtaaatacgaatattcatatacagattgtttaatcaggatccaaataaaggactgaaacttttttttttttttttttttgagacagagtctcaccctgttgcccaggctggagtgcagtggcaygatcttggctcactgcaasctctgcctcctgggttcaagcaattcttctgcctcagcctcccgagtagctgggactagaggcatccaccaccacgcctggctaattttgtatttttagtagagacggggtttgaccatgttggccaggctggtctccaactcctgaccttaagtgatctgcctgccttggcctcccaaagtgctgggattacaggtgtgtgccactgtgcccagccagggctgagacttttgaaagtgaaggaaggtactatccataattaacaggtatccatggagactttttacctaagcagggatgtgtcattatctacactggcttattccacttctttaatacctctgcagatacctggacgggtattttgcaaaatataaaggaagcctcactcatatggtcagttctwtctatatctcttctattttcttaggtctctctgctccctgrtgtgtaagtggacatattcagcagagaaaggctgggacgacagtttctggaaaatgattggtttggaagactttgttgcagataattacagcaaaataggtaaaagaataaaacatctgtagagtgattatgtgcattggaggatcttgatgggtttgttgttattgtggtttgtatgtttcttgtttttgtatgcatgaaaatacaggaatgaagttcactttttccaagacaaatgagttaattatgatgggtaggccatgactagtaggctcttgccttaagatttatatgaactgagtagagatacatgctatgaaaatctgcattgaaatatagaatcagaaattgcgctgggcatggtggctcacacctgtaatcccagcactttgggaactgaggcaggcagattgcttgagcccaggagttcgggaccagtctgggcaacatggtaaaaccccatttctacaagaaaaatacaaatgttagcctggcctcgtgcatatgtctgtagtgtcagctactccggaggctgaggtggggggattgcttgagcctgggaggcagaggaggttgcagtgagctgagatcgtgccactgcatgcagcttgggcaacagacagagcagaactctgttttgagggggaaaaaaaaatgggctagactgaggaagatatttgcaaggagcagcttgggaatagcatactcaaggggctgtgtatggactgcttccagtyagtactacgaaaataattttacaaattaggttcacaggacaaggcaaggctgtgaacaggtaaaaaataaagctaaaagatcaatattagaaaatctagaaaaaagcagaaactagaacgagtcagtggctcctaactaaggccttagggtctcagactaaggccttttatgtgggtggtaaagtacatcttctatgtcccaagcacatttctctgtgcttgtatgtaccttgttttatatatttctcacaactactgacaaaagcactgttgcatgtttacagatgagaatcagagagattagtaaccttgcctaacctggcatggaatcaataaatggtaagtcaggatcgaaattctcccaatgggaggacctagaaggaactaatattttactggaacacaaatttcagcttcagttacctaatggtttaagtgatttgtaaaatgtatatgccctccaaaaaattagttgttttttgctgaatattcccatggtatgttgttaaacatagctttattagtgtatatattgattacctgtatatgtgtcttgattcctcactagactgtgagctgtttgacataaggattttcacttatttacctttgtatttcctgtcctagcacaaggcatggcatattttcatatctcagtgactttttgattaaaatattgagatgcttggtactaggaggttggcactctttcctttaaaaatctgtaatgatatttactgattttaacattatctttggcaattgggtataacttcaactctgattttctgattatttttatatttttctgctcctctttcctgcctcacacatgacacatgtttaattagtatattagctctgctaacrtagcagtatctacaagaaatattcattagaagtccataatgttaatctagcagaaaatttccagagtaactttattagattttttccctgttaagttaatggatttttaatggatttcctaaggagacatatcattaagcagaatattgctgtacgtgaattagaacttacccatttatcaaaattaattgtgtgatgtttcctttgattttcgcttctggacacttgagcttgtagtttcagtctgaacccaaagtagaagatatttaagaggctgtttattctcagttgtgactttcagaaactcctctggaagctacctctagacattctttagcaattcttggaactatgaaagatgaatctcagaagcctccctatgaagtgttaaacatttccagtggcctcattgcccgtcaagatgtgggcaatatagtgtgaaaccttttagcagatttgagcattgagcgtcctggatttgagcattaatacaattaccataatttgctccatgtggagcttttagccaagcctttaccaggcttcctgggcccatgcagtaaataaatgctttccctgaaaactgaacacctcagcaactgatggtcttatggaggaatatttttaaaatgaattatttatgaagtgtaagttaaggatcaaatgcaatatttatatggtgcatttcaaggacaggagaaaaaatttacagggttttaagtaataacatgcaagtttctaaagctaaaatgttactacctaatgccttctttcaaggaggtatttggatggcttggtttgggaacattcacaaagtaaggaaaaatagttttgtgcatcaaaagaatatagtagaaatttctttacaattgaatagaaatttctttacagttgaaactgtacaagttgacttaatgttcagaattgatggagaaaaatgaaacagattttgggtaggagattatatagccctactgacaaaatgatctgtgttcaatgaaatgatccaacaaactgatctgtgtcaataaattttgacctttaattccacatgaataattccccagttacctatctaatcctaaacatctatcaaaagcaaacaggaaggaagagatcagcagggagaaaggaccttaggaagataagcaacatcccacctgttctaattgattatccaggtgccatttcagcatgccgcggttgcctttttaattcctgggaaaatctctttgttctactattggggtagcccactttatgaaaagtcgtgtgtgcaacatggctgaattatagagtgattatctgcattactaacagggtttgtcatataaagggattcagtgtattagcttatagatcattcctttatttgggaccagggaagccaggcaaagaaaaatgtaaattccaagtccaggaagttagtaagtgttaagtgagaggcagaaatgaagataaagggcaggagacagtttcttgagtggagggaggctgctttttaaatgggtttcctcgacccgggaagcacaaggggtgggggagatttccctttcctagacaagggaagccatgacagactgtatctggaaaatcgggacactgccgcccaaatactgggcttttccaacagtcttagcaaacggcacaccaggagattatatcctgcgcctggctcggcgggtcccatgcccasggagccttgctctcactgctagcacagcagtccgagatcgaactgcaaggtggcagtgaggccaggggagaggcttccaccattgctgaggcttgagtaggtaaacagagcagctcggaagctcgaactgggtgcagcccaccacagctcatctaggcctccctgcctctgtagaccccaccactgggggcacggcgtagctgaacaaaaggcagcagaaacctctgcagtcttaaacgttcctgtctgacagctctgaagagagcagtggttctcccagcacagtgtttgagctctgagaactggacagactgcctcctcaagtgggtccctcacccccgtgtagcctaaataggagacacctcccagtaggggccgactgacatctcatacagctgggtgcccctctgggatgaagcttccagaggaaggatcaggcagcaatatttgctgttctgcagtatttgttgttctgcagcctccgctggtaatacccaggcaaactgtctggagtggacctccagcaaattccactttatgaaaattcctgcagctgaggaacctggctgttagaaggaactctaacaaacagaaaggaatagcatcaacatcaacaaaaaggacatccacaacaaaaccatcatcaaagaccaaaggtagataaaactataaagatggagagaaaccagagcagaaaagctgaaaattctaaaaaccagagcacctcttctcctccaaaggatcacaattccctgccagctacggaacaaagctggacggagaatgactttcacgagttgacagaagtaggcttcagaaggtcggtaataacaaacttctccgagctaaaggaggatattcaaccccatcgcaaggaagctaaaaaccttgaaaaaagattagatgaatagctaactagaataaacagtgtagagaagaccttaaatgacctgatggagctgaaaaccatggcacaagaactacgtgacacatgcgcaagcttcaatagccaattcaatcaagtggaagaaagggtatcagtgattgaagatcaaatgaatgaaataaagcaagaagagaagtttagagaaaaaagagtaacaagaaacgaatgaagcctccaagaaatgtgggactatgtgagaagaccatatctacatttgattggtgtacctgaaagtgacgggaagaatggaaacaagctggaaaacacatttcaggatattatccaggagaacttccctaacctaggaaggccaacattcaaattcaggaaatacagataacaccacaaagatactcctcaagaagagcaaccccaagacacataattgtcagattcaccaaggttgaaatgaaggaaaaaatgttaaggggagccacagagaaaggtcacattacccacaaaggaaagcccatcagactcaccacggatctctcagcagaaactctaccagccagaagagagtggaggccaatattcaacattcttttgttttgttttgttttgttttgttttttattttattgtattttatttttttcttctattattattattatactttaagttttagggtacatgtgcacaatgtgcaggttagttacatatgtatacatgtgccatgctggtgtgctgcacccattaactcctcatttagcattaggtatatctcctaatgctatccctccctcctccccccaccccacaacagtccccagagtgtgatgttccccttcctgtgtccatgtgttctcattgttcaattcccatctatgagtgagaacatgcagtgtttggttttttgtccttgcgatagtttacagagatatagatcaatggaacagaacagagccctcagaaataacgccgcatatctacaactatctgatctttgacaaacctgagaaaaacaagaaatggggaaaggattccctatttaataaatggtgctgggaaaactggctagccatatgtagaaagctgaaactggatcccttccttacaccttatacaaaagttaattcaaggtggattaaagacttaaccgttagacctaaaaccataaaaaccctagaagaaaacctaggcattaccattcaggacataggcatgggcaaggacttcatgtctaaaacaccaaaagcaatggcaacaaaagccaaaattgacaaatgggatctcattaaactaaagagcttctgsacagcaaaagaaactaccatcagagtgaacaggcaacccacaaaatggcagaaaattttcgcaacctacttatctgacaagggctaatatccagaatctacagtgaactcaagcaaatttacaaggaaaaaacaarcaaccccatcagcaagtgggcaaaggatatgaacagacacttctcaaaagaagacatttatgcagccaaaacacacatgaaaaaatgctcatcatcacttgccatcagagaaatgcaaatcaaaaccacaatgmgataccatctcacaccagttagaatggcagtcattaaaaagtcaggaaacaacaggtgctggagaggatgtggagaaataggaacacttttacactgttggtgggactgtaaactagttcaaccattgtggaagtcagtgtggygattcctcagggatctagaactagaaataccatttgacccagccatcccattactgggtatatacccaaaggactataaatcatgctgctataaagacacatgcacacgtatgtttattgcggctctgttcacaatagcaaagacttggaaccaacccaaatgtccatcaatgacagactggattaagaaaatgtggcacatatacaccatggaatactatgcagcctatacaccatggaatactatgcagccataaaaaatgatgagttcatgtcctttgtagggacatggatgaaattggaaatcaacattcttaaagaaaagaattttcaacacagaatttcatatccagccaaactaagcttcataagtgaaggagaaataaaatcctttacasacaagcaaatgctgagagattttgtcaccaccaggcctgccttacaagagctcctgaaggaagcactacacacggaaaggaacaaccagtaccagccactgcaaaaacatgccaaattgtaaagaccatcgatgctaggaagcaactgcatcaactaacgggcaaaataaccagcttacatcataatgacaggatcaaattcacacataacaatattaaccttaaatttaaatgggctaaaggccccaattaaaagacacagactggcaaatatgataaagagtcaagacccatcagtgtgctgtattcaggaaacccgtctcacgtgcagagacacacataggctcaaaataaagggatggaggaagatctaccaagcaaatggaaaaaaaaaaaaaaggcaggggttgcaatccttgtctctgataaaacagactttaaaccaacaaagatcaaaagagacaaagaaggccattacataatggtaaagggatcaattcaacaagaagagctaactatcstaaatacatatgtgcccaatataggagcacccagattcataaagcaagtgcttagagacctacaaagagatttagactcccacacaataataatgtgagactttaacaccccactgtcaatattmcacagatcaacaagacagaagcttaacaaggatacccaggacttgaattcagctctgcaccaggcagacctaatagacatctacagaactctccacccctaatcaacagaatatatgttcttctgagcaccacattgcacttattccaaaattgaccacatagttggaagtaaagcaatcctccgcaaatatgaaagaacagaaatcacaacaaactgtctttcagaccacagtgcaatcaaattggaactcaggattaagaaactcactcaaaactgcacaactacgtggaaagtgaacaacctgctcctgaatgactactgggtaaataatgaaatgaatgtggaaataacgatgttctttgaaaccaatgagaacaaagacacaacttaccagaatctctgggacacatttaaagcagtgtgtagagggaaacttatagcactaaatgcccacaagagaaagcaggaaagatccaaaattgacaccctaacatcacaattaaaagaactagagaagcaagggcaaacacattcaaaagatagcagaaggcaagaaataactaaaattagcagaacggaaggagatagagacacacacacaaaaaaacccttcaaaaaatcaatgaatctaggagctggttttttgaaaagatcaacaaaattgatagactgctagcaagactaataaagaagaagacagagaagaatcaaatagatgcaataaaaaataatataggagatatcaccaccaatcccacagaaatacaaactaccatcagagaacactataaacacctctatgcaaataaactagaaaatctggaagaaatggataaattcctggacacatacaccttcccaagactaaaccaggaaaaagttgaattcctgaatacaccaataacaggctctgaaattgaaacaatatttaatagcctaccaaccaaaaaaaagttcaggaccagacagattcacagccgacttctacaaagaggagctgctaccattccttctgaaactattccaatcaatagaaaaagagggtatcctccctaattcattttatgaggccagcatcatcctgataccaatgcctggcagaagcacaacaaaaaagagaattttagatcaatatccctgatgaacatcgatgcagaaatcctcaataamgtactggcaaaccgaatccagcagcacatcaaaaagtttgtccaccatgatcaagttggtttcacccctgggatgtaaggcggttccacatatgcaaattaattaacataatccatcacataaacagaaccaaagacaaaaaccacatgattatctcaatagatgcagaaaagactgacaaaatttaacagtacataatgctaaaaacttaataaactaggtattgatggaacatatctcaaaataataagagctgtttatgacagacccacagccaatatcatactgaatgggcaaaaactggaagcattcccttggaaaactggcacaagacagggatgccctctctcaccactcctattcaacatagtgttggaagttctggccagggcagtcaggcaagagaaagaaataaagggtattcaattaggaaaagaggaagtcaaattgtccctgtttgcagatgacrtgattgtatatttagaaaactccattgtctcagaccaaaatctcctcagctaataagcaacttcagcaaagtctcaggatacaaagtcaatgtgcaaaaatcacaagcatttcctatacaccaacaacagacagacagagccaaatcatgtatgaattcccattcacaattgctacaaagagaataaaatacctagaaatccaacttacaaaggatgtgaagtacctcttcaaggagaactacaaaccactgctcaatgaaatraaagaggacacaaacaaatggaagaacattgcatgctcatggataggaagaatcaatatcatgaaaattgccatactgcccaaggtaatttatagattccatgccattcccatcaagctaccaatgactttcttcacagaactgaaaaaaactactttaaagttcatatggaaccaaaaaagagctcacattgccaagacaatcctaagcaaaaagaaaaagctggaggcatcatgctacctgacttcaaactatactacaaggctacagtaaccaaaagagcatagtactgctaccaaaacagagatatagaccaatggaacagaacagagccctcagaaataacaccacacatctacaaccatctgatctttgacaaacctgacaaaaacaagaaatggggaaaggattccctatttaataaatggtgctgggaaaactggctagccatatgtagaaagctgaaactggatcccttccttataccttatacaaaaattaattcaagatggattaaagacttaaatgttagacctaaaaccataaaaaccctagaagaaaacctaggcaataccattcaggacataggcatgggcaaggacttcatgtctaaaacaccaaaagcaatggcaccaaaagccaaaattgacaaatgggatctcattaaactaaagagcttctgcacagcaaaagaaactaccatcagagtgaacaggcaacctacagaatgggagaaaattttcacaacctgctcatctgacaaagggctagtatccagaatgtacaaagaactcaaacaactttacaagaaaaaataaaacaaccccatcaaaaagtgggcaacggatatgaacagacacttctcaaaagaagacatttatgcagccaacagacacatgaaaacatgctcatcatcactggtcattagataaatgcaaatcaaaaccacaatgagataccatctcacaccagttagaatggtgatcattaaacaggaaacaacaggtgctggagaggatgtggacaaataggaacacttttacattgttggtggtagtgtaaactagttcaaccattgtggaagatagtgtggcaattcttcaaggatccagaactagaaataccatttgacccagcgattccattactgggtatatacccacggattatacatcatgctactataaagacacgcgtacacgtatttttattggggcactattcacaatagcaaagacttggaaccaagtcgaatttccaccaatgatagactgaattaagaaaatgtaacagatagacaccatggaatactatgcagcaataaaacaggatgagtacatgtcttttgtagggacatggatgaagctggaaaccatcattctgagcaaactatcacaaggacagaaaaccaaacacggcatgttctcactcataggtgggaattgaacgatgagaacacttggacacagggtggggaatatacaccagggcctgtcgtggggtgggggaatgggggagggatagcattagaataaatatctaatgtaaatgacaagttaatgggtgcagcaaaccaacatggcatatgtatacatatgtaacaaacctgcatgttgtgcacatgtaccttagaacttaaagtataataaaaaaaaaacatacaaacctattatacttttcccttcttaaatttatccctttctttgatcttacatttccctgtaggctacatcttgttactgtaattccttttattatagagttactacaataattgtcttttactgcctctacttcctatgatgacattacagttacactttcttccccaccactgtactgaaattaaaaaaataataataaaatggatttcctccatccctatgagactgtactttgggtgtcagatgacaaaaacacagtcacttggcacattttagatactgatgaaatattcattgaatgagtwaatatatgtttgaattaaggatttgattttttttaagtcccttgttggcttcaattgtttctttcttgttttttttgttttgttttgttttgtttttttttgagatgtagtttctctcttgttgcccaggctggaatgcaagggcatagtctcggctcactgcaacctctgcctcccggtttcaagtggttcttctgcctcagccttccgagtagctgggattacaggcatgcgccaccatacctggctaattttgtatttttagtagagacggggttgctctatgttggtcaggctggtctcgaactctcgacctcaagtgatccgcccccctcagcctcccaaagtgctgggattataggcataagtcaccgcgcccgactggcttcaattgtttctaaaccacaatggactttcgtaaattttttgaattaaataatactactagctaacaggcaatgaatgtatttccttaattcagtgttcactgtcatctttcatgaacaccttctacataagacgggtccctgcagaagatacaccctatgttgagtgatagtgcaattctatttcattcctgtagcaaatctctcagagacttttctatcttaggaaatatcacagactccttcacagaaggaaaacaagaattaatcttagaaaggttgggcatttcactttttcatagagtaaaataaactgaacattaaatgaagctacactttagatatttttgtcatgtaggctaaaaatttgtaagtaaagaatcttggctgggcgtggtggctcacacctgtaatcccagcactttgggaggccgaggcaggtggatcatggggtcaggagatcgagaccatactggctaacatggtgaaaccctgtctttattaaaaatacaaaaaatcagccaggtgtggtcgcgggcgcctgtagtcccagctacttgggaggctgaggcaggagaatggcgtgaacatgggaggcggagcttgcagygagccaagattgcaccactgcactccagtctgctccactgagcaagactctgtctttaaaaaaaaaaaaaaaaaaaaaggatcttgactaatgaactaatgataggtatatgctggggacataaatgtgccagtgaacagagccacctcaggcaagggtgcagtattggctttggtcacactgaatcaaagttcagggatcttctgcctcttgttggaatctggctagactttggaacctgcacaatactgacttatccacccactggctggccaagaagctgagacaaagagaaaagaagccacctatacttgcctgaagcaagctgcacttgatcagattgattcatgaactcagagcccacaggcctgagtacaggtggctcaagaagaaagtattagttcttttctgctgctataacagaatacttgaggttgggtgatttataatcagcagagattaattcagctcatggttctggaggctgcagtgcccaagggtgccgataacttctgggcatctggtaagggccttcttgctgcatcatcccatggcaaagggtgcaagagtgtgggactgcacacacaagaatgagagagggcaagagggggcttggctttatcagaagtgcctcctaagacaatggcattaatccattcatgagggcagagccctcatggcttaatcacatcttaaaagtctcaccttttaatactgtcataatggcaatgaaattttaacatgactttttgttttaatatgctgagcttttattcatatttttttttaacttttaagttcaagggtagaagtgcagttttgttacataggtaaacttgtgtcatgggggtttgttttacatattattttgtcacccaggtattaagcctagtacccgttatttttcctgatcctcttcctcctcccaccctttgtcctccaccctcccaaaggacccagtgtgtgttatccccctcattgtgtccgtgtgttctcattctttagttcccacttaraagtgagaacatgtgatatttggttttctgttcctgtgttagttgctaagaatgatggcctctagctccatccatgtccctgcaaaggacatgatcttgttctttttttatggctgcataatagtccatggtgtacatgtaccacattttctttatccagtctaccaytgatgggcatttaggttgattccatgtctttgctattgtgaacagtgctgcagtgaacatacatgtacatgtgtctttataatagaatgatctatattctttggggtatatacccagtaatgagatttctgggtcagatggtatttccatctttaggtctttgaggaatcgccacattgtcttccacaatggctgaactatttcacactcccaccaacagtgtatcaacagcgtttaagtattcccttttcttcacaacctcaccagcatctgttattttttgactttttaatagccattctgactggtgtgagatggtatctcattgtggttttgatttgcatttctctaatgatcagtgatgttgacctttttttcatatcaatatgacttctgaaggggacattcaaaccatcacagagatacatgccaagccttcatgaactccacttcaggactgtggccccacttcccatttaacacggcctcatggatactattatacaatcttttcagtctcagggatccagctaagtgattccttctcccatggatggaataagggagattataaaagcaggaaatgggagcattcacaccaatactacctcattttaggggaaagaagaggaaattcccttttgtaaacaaaccatagaggtttccaccaacaacatgcattatgtccagtgctggaagcctgaatccagtgatgccatccatagttgtgggtgktgtaaaatccttttagrgcaattaatattcaatgttctgaatttttccagtaaaagtggacatgtttacaaggattcatgtcttcattctttatagtgtgtggcttgtttttcattttgatttgaatgagccatataattcagttatttctgtcctcagagctttgctgaagtgctgcttcatctttgtatcatgtgatataagtgccaattttactaatttatattgagagctctggagaaatctttaactacaggtaatcccagccttttctaggttaaatggggcccatcacaccattacctcccctctcctgagggaggcttatatggtttgcctctgcatccccacccaaatctcatctcaaattgtaatccacacatatatcaagggggagacttggtgggaggtgattagatcctgggggctgtttccccaatgctgttctcttgatagtgaaggagttctcagagatctggttgtttgataaatgtttggcattttccctgcttgttcttgctctctcctgccttccttccccctctccttccaccatgattctaagtttcctgaggcctcccaagccaggtggaatggtgagtcaattaaacctcttttcttcataaattacacagtctcaggtatttctttatagcaatgtgaagatggagtaatatagaggccatccctgtgggtactctggactgagatttgcttttgcctgtcaccctgagcttttgatcttaccttatcctcttattatccttctcttccctgtctaagtgacagaaccaggtcttcacagtacttgaaggcaagtacctatcctctgagtattgatgccttattttactctttagtatcgaatttctgcctgataaagaatgacttggaggtctccatgccagttagccatccatccagtcatgcatccagccaaccacactccccaagtgtctcctgtgtgccaggtgctgggctaagtcctagggatacaaaagtgaattcatcatggtctatccctttggggatctcatgtctactaggggtaggggcaggtaaatgaatcagtaatctcaaggtttttcagtaactctacagatgtccaagatgccatggagaagcagagcaggcagtcactggcactggtggtggtatcaaggaaattttctcatgaggtggcattttatgtgtctggaaaattggagtggtagtgagaagtgacagcgtgctggcagtcctcacagccctcgctcgctctccgcgcctcctctgcctgggctcccactttggcggcacttgagcccttcagcccgccgctgcactgtgggagcccctttctgggctggccaaggccggagccggccccctcagcttgcggggaggtgtggaaggagaggcgcgggcgggaaccggggctgcgcgcagtgcttgcgggccagcgtgagttccgggtgggtgtgggctcggcggaccccgcacttggagcggtcggccggctccaccggcccagggcagtgaggggcttagcacctgggccagcagctgctgtgctcaatttctcgaggggccttagctgccttcccgcggggcagggctcggracctgcagcccgccatgcctgagcctccccctgttccgtgggctcctgtggggccsgagcctccctgacgagcgccgccccctgctccacggagcctagtcccatcgaccacccaagggctgaggaatgcgggcgcacggsrcgggactggcaggcagctccacctgcagccccggtgcgggatccactgggtgaagccagctgggctcctgagtctggtggggacatggagaacctttatgtctagatcagggattgtaaatacaccaatyggcactctgtatctaggtcaaggtttgtaaacacaccaatcggcaccctgtgtctagctcagggtttgcgaatgcaccagtcsacactctgtatctagctactctggtggggacttggagaacctttgtgtggacactctgtatctagctaatctggtggggaggtggagaacttttgtgtctagctcagggattgtaaatacaccaatcggctctctgtatctagctgaaggtttgtaaacacaccaatcagcacccagtgtctagctcagggtttgtgaatgcaccaatcaacactctgtatctagctactctggtggggacttggagaacctttgtgtctagctcagggattgtaaacgcaccartcagcactctgtcaaaacagaccactcggctctaccaatcagcaggttgtgggtggggccagataagagaataaaagyaggctgcccgagccagcagtggcaacccactcgggtccccttccacactgtggaagctttgttctttctctctttgcaataaatcttgctgctgctcactctttgggtccactttgcytttatgagctgtaacactcactgcaaaggtckgcagcttcactcctgaagccagcgagaccacgaacccaccgggaggaacgaacaactccagacgcgccggcttaagagctgtaacactcaccgcgaaggtcygcagcttcactcctgagccagcgagaccacgaacccaccagaaggaagaaactccgaacacatctgaacatcagaaggaacaaactccggacacgccacctttaagaactgtaacactcaccgtgagggtccgcggcttcattcttgaagtcagtgagaccaagaacccagcaattctggacacagtagtttaccagaaaagaggggaaatggcttccaaggcagaagaaacagtgcaggcacagacatggaggcatggaagagtgcagagtgtgtgtgaactgttgggtgtggccagagcatagtggacctgaagcaaggtggagaggagtagttgtgggcaagatagagtttatggggggctagtttctgatggaacttctaactttcctcaaagatggggccaccgattagagactcaacatggcaggagtcactctattcctttcaagagatggttctaattactactcctgccaatgcagtaaataacacttgagggcagtaggagccattttagaatatttgtggctcctatgaagctgtttgtgtgtcggggcrggtggcaagcccatttcttttcttttctaaagtcacataccttgccccttagctatcctcccttccataaaggtttgttgtgaagctggartgtgatatcagatgtcacagggcagtgtggtttacgaagcctgtagaaatgttcttaccaactgtaagtacaccttggcacctggaggacaagaatattcactcctgcatcactctgttccaactgtgttcacactccttagattcgcagaaggactgttttcagctgctggcccttccaggaatagccctaaagagccagaagggcaaaggagtaacattgaccacatcatggtgatacaaggtaataactttcagaggttttgctgtggaaatgttcctcctttcaatacggcatctgaaagataattggaagtcccccaaaagtgaggtcacccccaacttctcttcctactgctggagaatcagcgattgtcagagctgaaagggatcatagagattttactgtaatgcactcattttatagacaaaaaactgagactcagggatgtgaggtgaatttccttggtcctgcagcattttaatgacagaaatgagaccagaaaccaggtcttctgactcttagtcctgtggtggttctactccttcctgccacttctcctgtttgagttttttggcaatgtgaggacatttagccaatctggatactgacatttgaatgaagctaaccactagaagaatgtcaaggagggaacgatttacataggtaaatttacccaatccattgtccaatcttcagtcatgcaaatgtaggaactggactttgcccaagtcagagacctttggatctaggaacacactgatcaagcccttaagtgactgatgtagataaacgagaataaataagtaataagttcacagttgcctatggtaatagttaagagattggtcaccagggtcagatggacttgacttcaattctgactgtcatctgtaatgaaatttctgccatatgtaactttgggtgagttacttgatctttctcagcctcaattagtatattatgaagattagtaagtatatcatgaggatgaaaggtaataatgcaggtaaagttcctagcatacaatagrtcttcagaaaatgaaagttcttactactataatgattgtccattcctctgaattcagatttctctctaggtgatagattatctgccaaagaccataaccccttgaataatcccaggtaattattgccaacttctagatttggaatttttccttttttctgagcttcttccttggattcacacaacctttttccaaccaagatacaataagattaattagatttctgcttctaaattataatcacatttcataatcacaaaccttccttgagaggcatcttaattggaattaagggttttcctgaattcgtcaggtccacatgactggcaatctttagctttttttccatgaatagaggggtgcatatccacaggcaaataaaaaaaatacaggatatgttggttaacaattaactagttaattaataatggctaatgttcctacagtgctttacaacttagaagagtttttcttttcatgcactattgtgcttttttcttccaccaaacttgtaaaataggtttgatttcagttttacacttggggaagccaggattgatgagctttggtcttttccatctcagtagaaggtgtcacaattctccctgtcattcaggacccaaacctagaagtcattcttaatgcttctcttcttcctcttacaccttacatttaatccatcaacaagtactttctgctttgctccaaagtggaccckgaatgaggcattcctgcccctcttcactattagtatcgtagttcaaagtagttttatttcttgctggatttgtgtgctagcctcttaaatggtctccctgtttctgtccttccctctgataatccattctccacacagcagccagagtgatattttaaaaatgtaaatcagatcatgttactctcctgcttaaattcctccagtggctccccattgcagctgggaaaaaaataactccttgccatgttcaacaaagtcttgcgtgatctctgtctgacttttattgcttaccatgcccccacgtagtcaccatccaaccacaatgaccttctttttgtccctcagacatttccagtgtatatagcttttgcgttaactctgccttctgtctggcatggcccttctcaaaatattcacatggtctacctctttctctttgttcagatctcagcttcaatgtcatcagagaagagctttcccttaccacccaaacactctcttctactccagcagtattctgtttccctgttgtattttattcttaacactcatgactatccaaaattaatcagtcttgtctggatgctttataggtattaactcgtttaatgcctttaaccagtctagacaggtactactatattcattttactgatgaggaaattaaggaaaggagaggttaagtaagttgctcaaggtcacacagtaagtaatggaatcagagacaggtctgctccagatcctgcacatctgtccatgtagctgcagtctcctggcctgggctgcgctgatacagctgcagttctcagactaagttcaacaagagtcccagtcctagtccagtgatgcctgaagtcacatgtttcattctgggcctcacattcatgaagaccactgacaaaaaggccccagggccccagatgaaaaacataatttaaagccagtgaatttgagaagcagttgagcagttttgggttttctcatcaaattacctgcccaatgtcaaaatattagtaaattatagatctagattttaattgagtgttgtctgacattcccttcctcagtgctgacttgagattactcaagatgacagaagaaaagtgctgcctcagaggttctttcctccctctctgtctttgaaaaagcacagggagaagagggctgaagatgtgactgtccagtaattggaaccatctcggctcctctgaaattctaggagaagaataagtgaacagtatgatatcttgcaaagcttcatgtgccttaatcacattaaaattcacaattcagttttggatttatttttccttgttttttgaaagttattgacttgggacttgcttctggatctcagttggacatctgacctcatgccattattgtcatccatttagaggtcatttatttcagtgttcttgaaaggcagccattcccagtggttggccttctctattgcatgtgacacatcgcagctcttctgcttagcttttcttggtcacacagctatcaggtggtgactttggcctccaatgtggcccttacctctgactttgtagctcctctgcagtactcttcactctggttctgtggagttttgactccgagatacccatgaccttttaagtttcccagcaccagctaacctttctgagaatctgcatcagagggctgcagtggtcagggtggcaggtcaccagttgactaatggcctcctccaaggtttgctggcagacactgcgttgccatgaaccctattgatcccagaagtttgcctgctgcttagacagtctttgcgggcgtgaggaggtagtgagtcatggagccaccacccctgctacccatctgttcttgtggtgaggagaacaaagatgatctctttgtggtatcataaaacctagaaagacattaaaaattccgttaaattttcatacgcttttagctgttgaaatgtacaatctattatgaggggggaaaaacccactgtaattttccccccactgcccttacttcagaggctacttaagggaccaggtaatgattttacgatgtttattaatacttcatgttctgcttccctcccccattcatttatctttaaattgaaagcacagaaactgccagggatctttaaaatccagagtttttgcaatgtcataggttgttctgttatggatattgtatgtagagatctattgttgactcagagctggggatggggttgggggtggtatttatttttaaaatgcactttggagtaatggaaataacatgagttttggagccagatatacatgagtttgaatcctggccctgccatttactacctttgtgaccagtatcaaacaagttacctaacctccgaaggccactcagttcaaccacttgccagattgggaaagtaatacctctctctgagaatttggatgacctcaaacagagacctctcaatgcaggcctcgtgggaacaatcttatcttatccggatatccagataatttttagtttttcttagttgttctgagtaattacttttattttctctgtctctcgtgggtatcatgtggagtaactgtcaagatatccctcacccctttggttgcttgagaattgacagcatattgaagcctcatctatagtagatttataaactatggtataaagctataacctcacctcaatttattttgttcccatgtttggtttatttaatctttgatcccacttacctcattttatatttgcctactagttataagctgtctgaaacattttataacatagcatgtagaaatatgtctggaacatagtaggtactcaatagatatttggtraatgaatgaataagtaagcattagagatacagatacaatatgtttcagaggataattaaataaaagagggcaagataatgagtttgtgcctttgagatatccaaataaaaacatagagtagacatttggatctatgctaggaaaaaaggctagaaatagagatttggaagtcataagtgtagatgatatttgaagccatagatatgtgtgagagactctagagggagaagagaaatttcagtactttagaggccaggtagaggaagatgtgcctgcaaaggaggctaaggatgtacctgccaagggcagggagataatgaggagattttasaaggggagggaacaatctccaaggatgctgaaaaaggaagggagataaggactggacactgttcatttgatatagtgactcggggaccttagtgaaagtcacttgcttataatagtgaggcagaagataaaagtcgtacagcagccacagctaacactgagcacagatgctgtgccaagtgcttaatgtggactgttacattacaacaacatgagatgtgtagtcatctcaccccattcccattttttacagaggataaaaatgaggcataaagaagttaatcacccaaggtcatatagctgggttcaagccaagacaggtgtcaggactcagagtcacagttgagaaaatgaagccagaaagtttagataactcaagaaatttggtcagagtgtggggggagagagagagagatggggtggtcactaggggaggaagacggttggaaataggtagagtgttccactgtttggttgattgattgttggaagatggagatttgcttgagcatgtctgattgctgataagaagattctagtagtgagtgatgggttgctgatacccagagagaagggagaatcagtactgtgggtccagagaagacaggcaggattagccttggaatacagactttctattttaataggtaggaagaagacaaaaatggtacagctcatgggagcagcatgtgctcggaagtgggaagttaagggatttcccttcatgaggcttctgttttctttgtgaagtaaaaagtgagatgatcttctgacagagtggtagccaagtgagagagtcagaatctgtaaaaaatggaaaaggtttaaaatagaagtacagaggatcggggaaaagatgattagagaaatcttggaggattatcaaacggtacacagaaccctgcttaggggtcgccatgaatttattataaatctgccctgtggtgtgattttctycagcagcactcagcatctggttgtaagcacacaggaaagggttgttcttttgttttattaatcttaatgaatagcagtagtctgttctgcaagtccttgacaccaccctcttttctatatgctgtatctaatctgttaccaagtgctgtcagtcttaggctccaaatacgtctataattcatgaactctttccacctcaaaatgctacctagcctgtgttcccataatctcgcaactggattattcaacaggcttataacacttgtcattgaatggaaacttgcctttttcagtccatcctgaacactgcagccagcatgaactttttataatgaaaatctaatctaatcctgtgacctcccagcataaaccttctcaagtcttcccaatgcttttagggcaaaaaccaaaaacccsaattatggtctcccctccttctggcaccactgttttcattgatctctgacctcagttgccctcttttggttttctgcacacgacacccttctcaccgcaagatctgctctcatggtcttgttttgcttccagtatcgagtccatgttccaggaagaaggacaaggacaaagggcaaaagtatggactttgcttctgttccagtgttaactctgaaacctcactcggtctcttctgcctacatgtcaatggccagaaccgtattacatactactacctgcaagggaagctggggaaaggtccattttttgccagtcacatttcagccttcaataaaatgagagttgtgttatttaaaaagaagaggaggaggggcactaggtaagcracctggagtcccaccttcaatgaggaagtgttttctaggtgaaragttgagtgaaggagatgctgacagaagtgacagcatgaatacagtttagtgctgagcaatatgatgtgggaagaaggtgctggaacactgagtttgaggcagggaaaagggagggaggaaacagagaagtaggcagggatcaaaaaatcataatgcccttctattccagctgaggaacttaaacttcatcccrtgtgttagcctctaaatgaggtcttatatgccaggtgatgtcaagcaagatggtctactgggtatagacaaaaatgttggtatttttatttatctccatttttatttcattttgtttaaattctatttttaggyatgcatcttgacatacacacatataatttataagttcaatagtacattatatacaatttataagtaataaatagctatgttgggagtccatctgaagacttttttcttagtgacttgcacagtcaaaatgtttagaaactattgcattaggcatcagggaactgttaaaacattttaaacaaggaaatgatgtgatccaaattgaatatggtccaatttgccttttctttcccctatagagttctttaaatttttaaaaattttagaatgttagtacttagaaagaaacattagggagcatcaaccctgtgtcataagtaagataactgaggcccaggaatattaaataattagaaccattaatttgtggctgagctggagccccatccaacctgggtctcatcttctcccagtggtcctttgtggccctgtgcgagtgctttctctcttcctgaatgcatgtccctattcttcagcaaatactcttctcatcagaattatgacatgtgggaatcaagaggggagtaaaagggcatatttmtaaaaaacgtggaaaccaagaaatctgttttgtaaaaatgaatcacctatttagcctcagggttctgttgactctttagctgtcaacatggaagtctctaggtaccgattcctgcaggttctgttttcataatgccagacccatcagcagtttaactgagacataccgttgtacaatgtcattattttaggtattgtatttgcaaggcyagcggtctaagtaagagattaaactgaacagatttctgacttggtaagacagagactttctaaggggtacactgccccactttatcttaccccwgtgtatatgaagaaacacatgtttacccatgggaatgtgtatgtatttggatctatttcacagagtatcttataaaaaccgayatgaaaagaaagtctgatttatagaatcctatttcctgacattgtgaatactagttcaggactttgctaactactttttgaccagtgtgactgatttatttccccatgccatcatcaacccagctatgcaagtacaggaagacagggtatctaataaccagatggtgaacaagatctgtattctcttgggtatactaagctattctgaaaattcagtttataggggtacagactaagggttatatatctccaaacaaatgtgtttgtcaagttgatgatcatgtttaccaagatccttttatcaccagctgagtcctcttttagtggcttaggtcaccctggaattatttcaaaaaccagcctgatgtttagaacctcctgtgggctcgggcttgccagacacaaacctaaaatgaagcctgtagccttcatggtagcaaactgtaacctcaagcacaattatatgaatcatggacaaatgttttcactttcaagcaagtttttgccgcagcaaaaatgaccacttatctaagaggctgcatatttatatatatataaacagtttttggacataagaatcttgactattatttcccacrgagaattacagatttatayatgtgtgtctatgtgtatatatatgtgtgtgtgtgtgtgtgtgtgkctgtgtgtgtatatatacatatgtgtgtgtgtgtststgtgtgtatatatatatatatatatataaacaccatattctgtgtcttttatatatagtatcacttgattattataattaccatgaagtgccattgttcttctcattttataggtgaggaaactgaagctcagagaggtgaaataacatcacaaagctaagaggttgtaaatttggcacttttaaaattatctagttattacaaaagttgatcttcagatcaacaaacttaactgacatttcctttttgggccccattttctactctgtgaactgaggaggattgaattcagtgattctcaaaccagagcataygtcagaaccacctggggggattcttaaaacactgattcctgggcctgcttagagtttctaaatcagaaattctctggagcgattaagaactggtgtttccaataagttcccaagtggtggttcccagccacactttgagatccattggagtagatgatctctcagtgtcttccagctgttacatcctggagggtcagcaacctgccatacttcattggtgtgtgaccaaaaatactgcttcttcatggagtgactttcctactacttttgccaagtttgttggttagccaggaaaattctcaacatgaatggaggaaaatgctgatgaaaatcactccttcctgtatttattaactcatttgcyagactaatatttactgagtataccctttgcagatattgtgctacatactggagatagcacatgtgaagatactcagcccctgcctgcgagatgcctatcaactrtggagaaaacagatgattaatttattgttattactaaaagggaagtgctgagacctatgagaataaaatacttmtctaggatttgtgattatgacttcaaacttttcctaaacaggactattttctactgtggtcttaagtcataaattgtctattctctgtatctagttcgattctgttcttagctttttgaggtatttctttattgggrcaggtcagtaagtggcattttcatttattttttaccaacctaagcatttccttcctgccctagatgaaaacttagctttgttcaaaatttgcattttcatttttagcctatggtgacagtttaaatcaacagcaaaagcagaaacccttgtctaaagcaatttcctcactgttattccaacttcagtgaaatgagaagtcctggggagatgaattcagactgtcttctctactcccaccccttctcctaacagtttggcttcttgaaaaaaaataaaagatgaaggaagcaggggtcttgaagggaagatgtctactgtaaaaaaaatagggaaaggaaatagtgtactgataatggttatcatttgttgagtgtgcattatatgccagggactgtcgccaaacattgtacatgaattagcaggtaaacttccccagtaaccaatgaggtacaggtaccattattatcttccttttacagatatggaaattgaagctcacagagggtagataactgtcccaaagtctcatggttatttgatggaggaacaggaattcaaaagcaggcctgactccaaaatctcatgctttttaccagtaaattagatctccagtcatttcaatccctgcatttttcatagggatggtgctgactcatttggcttcctggttttctgactcatctcactgaacagggccagatccgatatgtcttctgcattctcccttatatcatctttctccctgctcccttttctattatggtccacctactctatcatcttctttccatgggccttaaaggaataccttcttgtggactgtctctgtgatgcagtagaaatctggtaagcttgccagggtgtaaaaagtgcatttgtttaggactgtaatgtttatttgaaagggactttcaatcacagacatgacttttttatgagcctcattatatatccttgtgattggaaaaatgcatcagtaaataatgcctccatgaagagtcactctcacttgcattattttaaaagatttggtaataaaaagtactcagattattgataatccataattaatatgaagtaaataatgtgtgttttcaaataaaattcaccatgataagtgatgagagtatgggcttttatatttctttgtaagtcagagacttataaaagataggttatccatcactaaggaatatgtagacacattaattttagcattcagttttttttctctcttttctaaaaaacatgattctattcttcaaaagaaagagtggttttattatttttccagctctttaaaatggttcaaaaatcttggcctgcagacatctttttaaaaaatcaatttttcaataatttagagtgaatcacacccataggggggatgtgctttcaaaataattaaagtagaggaggcaggattatagatcttgagaaaatgtgcttggaaaatgtcctttgatttgttgtgaaccccaaagctttgaataaaataggataggactggaatcaacttctgaactttctcactagctagtggcatgttaccagtagtccagagaatgctgaatgcccatctaatctacactgtcatcccttttattaacaaaacttaggcttttagggtacatcagggtctttcattatagactacatttcccagctccctttgcagctacacatgttcatctaagttttggccaatgaggtataagcagatgtgtcctgygggattcctgagacgtctcctttaaggagatcaggcagtggccatcctctttccctcccctgggtcaggtagattggctggtcaggtaggttagcagtgactttggataagggggacagacgccatactccagggatggcagaacagtgagcttttgtggaacttccataccagccttggattcactacctctggactttgtttgtatgagtaggaaatttgtttatttgtttttgctgttgtttttgctttattagaaaatcactrttttgtagatttgtagctacacttaatcataactaataaaaatggtgactcataaggtttgggaaaacaacagttaaattaaggtagtaagtttagctatcattattgagcacctactatttactaggaactgttctaagatctttatttgtaatagctcacataactcattcaacagtctttctaagagacttacccccattttacagatgrtcagtcacagagaggttaaataacttgcccaagatcatacagccaagccaggagttaaaatcttcagtctatctcttaaactttctgtaaatcactgtgatgaagtgacttgacaacattctaaaaacaagtaaaactggacctaaactccaacttttccctatgtaggatacctgtctcctagacttgttgctaattatgtkagttggcctctggcacatcacttagagcccctgtgcctcagacttaacactaataagaggcatgggacaatacctcaccattgtttagtatccattctgagcctggcactgtgccagacacacagatgtgtgaatgacagcgcacccagagggagaccatgcgttggtcaaggagacaaggcctgaacacttaagaagagccaaggaacagcaagggaaatgcagaaccacaatgtcactacatccaggagggttcttggtgcttgatatgtggctagcaaccagtgaacatccctggaaccaagtggcaatgcatgttaagtgccctgtgagcaggcagaaataaatgttttgaatcaaaagaggaggggagctttggcatctaaaggattcagggacacatggtgagtgctttggttcatgttggttgtgccagtaattgaaggagtcttgtagttggtaagatttggggaggtgatgggaagttaggctcttcccccttctggctttctctgccccagggctaacagggctagttcctggaacaccrtctgtgctcccctgtcttgggtcctacacacagctacctacctgtcagcttgggatgctttcccagcctttcatcctagctaccttcttatcctcctggtctcagaaaaaaatgacatgacctatatggagtctctcctaagtagaccacatcccacttacttgctctactgtgtggtgaaatcccatcaaaatggaggatatggttccaaagtcagtgcatactgtgagcagtgaatcagccaagagaatccttgaaaatccctgagggagctatctccacagtggaaactgataagctatctccagtaagtctaacacattaattccggtatttcttttttccctgttcgagatagctgtcctattttaaagtctaggttgtatgaaaaaaatctaggttacatgtagccaagctataggttatacactccaaggagtctcatgtacatagaccatgatgggagtgacacacccctgaggtttttcagtgtatatagaactgtacatagtggaggtattagggtcagatgtagcaaaaggagatattcacactaaaagaaaatagaaaccgaagccaacccagggaagagctgatttacactccattctcgggttgagctccctgtgtaggatggtgaaataaatcacttgcattatttatattgtttaatttctctctgcatctccttcatttgcttcctgaagcctatgtacagttgactgtgtgtgtctatctctgcaaactacagatcttcacttcctattataacacttatcacatttgaatttttcatggattgtaattatgggttaaatgtgcctgccagattatacattccatgagggcaggggccatgtccatctcattacctgctgtggcccagcacctgcatggtacctggcacacagtctttycaagcarttctgtcctagacattgttgtggctttcttctcacccgccttcaggaagatccacccaacttctttctcagttactcagcattaagatctgtagttgctgaggcactcagttaagcttagggtggagctaaaacctgcctgggctggtgcttctctgatacagaaacccctgaaactgatgattatccagaaatacttgatctctttgggggcctgaggagctttggaccaccttaactcatcacctccttaagctcccctacctctaaatgctcttctcaccgctcccactcccaccccctcccccttgccccaaggctcctcctcagcccaactaactgaggctctttcacaatcctaaaagcatcatctttgttttaattttttcttttatcttcaaaagcatctaaaagtaaaaacaactaaagaaaagccagaaagtgaatgaagcagaaaaacaatttcagcactctgatacagtaccccaaaacaattttagttcactttgcctttttttgtgccattttaacgcagttgaaaccatgccgtatatgccagtgtgtagtctgcagttttaaggtgacattattgcatattcatattttcatgatattctttagaagcataattttaataatgccataatattttattgaatgctgtaatgatatttttaagccttctattaaggttggacacttaaatgtttacctttttttctctagtatgtaaatattatggtacaaatacacaaaaatactgcagggaacctttttattttctgcatctgacagactcgcagaaatggaattactaagtaaaaaatacaaactctttaaaatagatttttatttcaggtgatacttaatgcatattaagtgtaaaaaacttagaaaatacataaaagtatttcatccagcatttacctccaagagatggctaattttttgtatattttctgtctttttgatgtatgtgtatatgtgtgtgtatatatatgtattatgtatatattatatataaatatgtattatgtatatattatatatattatatgtatctataataaaatttatactgtattgatatattcatactatatatgtatcattactttacacaattgaaatactttatatgcatgttgttaaaactcttcaaatatacagcttttaatttactgtgtaacgatttttaaaacaacacttttcttgtatcatttaaattttttctgatttcttctattttgttgtatttgtatacataccttgtcagcattttatgttattccttaggatggattccagtaatggatttaccaagtcaaaaggtataaatttttaaggctcttggtgtatattgtcaagtttctttccaggaagattttgccaaattgcatttccaacagtccataagattataaagcaatggaaaatagcatgtcctttctgttttaatttctatcttattaactcttagtgaggttgagctttttccttatatrttattcatgtatatcttcttttgtgaattgtctagatacttaaaaggctaagaatatttggaggttatttttaaaaaataattttttatttttaattgacgttttatacatatttagggggtacatagtgatgtcacagtacatataatgtgtagtgatcgggtcagtgtaattagcatatccatcatctcaaacatttgtcatttctttgtgctagaaacattcaatatcctcctaggtatttgaaaggatatattattgttaactatagttattctacagtggtatagaatactagaacttattmctsgcatctagctgtaattttgtgttttttaataaatctctccctcttcccctcttccctctaccatwctctgcctctaatatcctctactttttacttctatgagatcaacattttttagcttcaacatgtgggcaagaatatgcagtgtttaactttctgttcttggcgtatttcacttaatataatgtcctccatttccatccatattgctacaaatgacaggattttgttgtttttttatgtctgaatagtattccattgtgtatgtatatcacattttctttgttcattcatctattattggatacctaggctgattcatatcttggctattgtgaacagtgctgcagtaaatgggagtaaagatatgtctttggtatactgattttgtttcctttggataaatgccccagtggtgggatcagtggatcatatattagttctgtttgtagttttttgaggaacctccatactgttccccataatggctcttctagtttacattcccaccaatagtgtaagagtcctttttctctgcatcttcaccagcatgttaattttttgtcttattttgataatcactatcctaactgggataagatgatatctcattatggttttgatttgcatttccctgatgattagtgatattgaacattttttcatatttttgttgtccatttatatgtcttcttttgagaaatatctgttcagatcatttgccttttttaaaaaatttatttttaggagacgggatttcactgtgttgcctagactgtagtgcagtggcacagtcatagctcactgcagccttgaactcctgggctcaagtgatcttcccacctcagcttcccaagtagctgagactacagatgcacaccaccatacccacctaattaaaaaaaatttttttggacagggtcttgctatattgcccaggcaggtcttaaactcctggcctcaagcaatcctccagtgtcagcctcctaagtctctgagattacaggcgtgagtcaccatttgccaatatttaaatcaggttggttgtttttttcctgtaccaatggttgaattctctgtgtattctggatattaatgycttgaccaatgaatagtttgcaagtattttctcccattctataggttgaattttcactgtgttgattgtttcctttgctgtgcagaagcttgttagtttgacataattccctttttaaaaattttttcttttgttgcctgtgctttttagatcttattcataaaatattttccctggccaatatcctgaagcatttcccctatgttttcttctagtagttttatagttgcaggtcttgtgtttaggtctttgatccattttgagttgttttttgcatagagtaagagttgggagtctaacttcattcttctgcacatagatatccagttttctgagcaccatttattgacaagactgtcctttcaaagcccagtgaatgctgttggtgcttttttcaaaaatcagttggctgtagataggtggattaaagtctgtgttctctgttcttttccattggtctgtgtgtctgtttttctgccaatactgtgctgttactgttttggttactaaagctttgtaatatactttgaagtctgaaaatgtgatgcctccagcctgcttgcttgcttgcttgcttcctttcctttcctttcctttcctttcctttcctttcctttcctttccttccttccttccttccttccttccttccttccttccttccttccttccttccttccttccttccttccctccttccctccttccttccttccttccttccttcctttctctctttctctctttttttctttcttctttcttttttgcttaatattgctttggcattgtgttttttgtggttccatacaaattttaaggcttttttctrtttctgtgaagaatgtcattggtattttgatagggattacgttgagtgtgtaggttgctttgggtagtatggtcatttaataatattaattattctgatgcatgagcatggaatgtctttccatttatttttatcctctttagtttctctcatttgtggttttccttgtagagatctttactaccttggttacattattgtatttaattatttttgtagctattgtaaatgggattgccttcttgctttgtttttcakctagtttgttgttcatgtataaaaatgctactgatttttcatgtcaattttgtatcctgaaaatttactgaatttgttgatcaattctaagagtttttttggtagaatgtttaggtttytctatatatgtgaccatgtcatctacaaacagggataatttgacttccttctttccagtttagctgttcttttttttttttcttgcctagttgctctggcttattcaaaggttgttgacacatacatagatacctattttaaaagagtggcatgtgagaaaaatacaggaaatagagcccaataagatatgaatatttgaatttgctgatccattctttcatataggactataagatttaactcttaaaacttcaaaatttttctgtatgtactttccatcttgtaaagttataatagacgcgtgtcgttcttattggagtcaatgaattgggctctgtcatttgttgagatatcatccttctggctctggagttctgtaagaaaatgacaatatatttagggtgataaagctaatatctcaagtctcaattgtttgagagccagttatcagattacctttcacttctgttcctatcattttgttaataactattgttcatttatttatgtacttattgtctggtaccccactataatgcgtccatcaagagagcttacatctctctcagtagtctgtttccttcatttcctccaaatttccattaactttttaatctgtttgcttatttgggtttctgtctttcatattaggggctctcttcagatgataaggtgatccttggctgtctgtttcatgcttgagaatggggtactaaaaagatgactgggaactctatacatgcataaggcttatcaacagtggtttgtacttgtacggtgatctggatggcttgtttagaaggggaaatcctctgccagtatttttggatttttttctattagtttaattaacatccccagagcaaaactttcaatctttcaatatctaattgcagaaataaagcctggctgctggagttcaaggggctagcataggaaagagactagatgactccagtagatattatgaaaactttcactaaatcctcctttttcactttaacttttttactttcagctgcctggtatccactatctagatgccttctgtttttcctttccaggtaataaacctcgagtcttttgccaagttgacaaaagggatggtcacaccagtgtcaagtcagtactgagtctgcctttttattaaacaggctttcagccagttttactattttcagtccctctttactctcacttctagagatatcatctgccaccaaattcctaagcactttggggttctataaggcaaattgagttactttttagcttttgtcacaatcaattaaggcttcaggttgcttcaaattgttaaattggttaccatttatctttttactttttaactttcatgattttgttgctgctattattttctgtcatatttttgtcttgatgggtttgtatattttaaaaaaatacctcttccatgtcatactcattaggatggctactattaccaaacaaaacacacacacacacacacacacacacacacacacacacaaaacagaaagtaagtgttggtgaagatgtggagaaattggaaaccttgtgcagtgttggtgggaatgtaaaatggtgtggctgctgtaaaacatggtggtagttcctcaaaaagttacaaacaatattaccatatgatccagcatttcatttctggccatatacccaaaagaatggaaagcaaggactcaaatacatgtttgttcacccacgttaataaaagcatcattcacaatagctaaaatgtggaagcaaaccaagtgttcattagtggcagaactgataaaatgtgatatatacacataacagaatatgattcagcattaaaaagggagggaattatgacacatactatagcatggatgaatcttgaagatactatgttaaatgaaataaggcagtcacaaaaggaccaatactgtatgatccttcttatatgggatacatagagtagtcagattcatagagatagaaagtagaatgatagttaccagggatttgggggaagggggaaaggagaagttagtgtttaatggatatagagtttcagttttgcaagatgaaaaatgttctagaaatgggtggttgtaatgatttcatgatgtgtgaatgtacttaatacaactgaattgtatgcataaaaacagttaagatagtaaatgttatcttacatatattttaccacaattaaaaaatttttaaaaacaatgaaaaataattccactttacatttattttattctcttcttgggggagatagagactaattaatgtattcaatgtgttgcttaaaattaaatctattatttcttagtttacagctaagatgagcctttttagggctaaatcacttgccctggtcacagatctagtcattggcagcctagggtttgattcagttctgggaggaaggcagggtttgtatctgctgtgatacatagatcagttcgattcattctttcattagccagcattagaacacctttttcattccagcactcttgaaggtagcagtaagcaagacagtaaggttacatcacattaccatgtgagatggagaaaccagacagtaagcaagtatatacataaacaagacaaatgcaaatgtggctaattgttatgatggaaataaagtgctggctgaaatgtgggtagggaaggcttctctaaggaggagacttcagagttgtgacatcaatgtggagatggcctaatcagtgtgaacatgtgggcaggagtgttcctggcagaagcaacagcaggagcagaggcccagggctgggaataaggttggcatgtttgagaagatagaaaagaccagtttagcagaatgtactgaggaaggggaaggacaagtgatggggtaagaggtgtaaaaaatgcagaaccttgtgagccttggagtaaagcagccaaagctttcctaggtatacagaaagccactagaggggtttcaaagggaaatgatgattttactttttaacattctgttggctttcactttgtatctactgtatagcagatggtaggttgtagataccagaaatgcaatatgtaatactgttgcccacaaggaaattatggtctggtgaggaagaaagagcagagagtgccagaaaaatatagcagcatattccacagtgtacactttggggtactagaggtgatttttaggaaacaaaaattctttatagtagaacaatttatattcctttgggtatatacctactaatgggattgctgggtaaaatggttctttgrgaaagaagttctctaagttctttgagaaatcaccaaagtgctttccacaatggctgaatgaatttacattcacaccactagtgtataggcattcccttttctccacaacctcaccagtatctgttatcttctgactttttaatgatagccattctgactgatgtgagatggtatctcattgtgattttgattttgatttctctaatgattaacactttttcatatgtttgttggttgtatgtcttcttttgaaaagtgttcatgttatttccccattttttaatggggttatttttcgcttgttaatttgcttaaattccttaaatattctgggtattaatcctttgttggatgcatagtttgcaaatattttctcctattctgtaggttgactgtttactctattgatagtttcttttgctgtgtggaagctttttagtttaattaggccccatttgtcaatttttgcttttgttgcaattgcttttgacatcttcatcgtgaaatcttagccagagcctatgtctagaatggtatttcctaggttttcttctagggtttttatagttttaggttttatatctaagtctttaatctatcttgaattgatttttatatatggagtattgattttatatatgatttttatatatggtatacaattaggtatataatacctaattgtatttcctaggttttcttctagggtttttatagttttaggttttacatctaagtctttaatctatcttgaattgatttttatatgtggtataaggaaggggtccagtttcaatcttctgcatatggctagttatcccagcaccatttattgaattggggggaggggtctttccttattgcttgtttgtgtcaactttgttgaagatcagattgttgtaggtgtgtggctttatttctgtgctctctattcttttccatggatctatgtgtctgttattgtactagtgtcatactgttttagttactgtagccttggattatagtttgaagtcaggtaatgtggtgcctccagctttgttctttgtgcttaggattgctttgtctattcgggctcttttttggttccatatgaattttagaatagttttttctagttctgtgaaaaatgtcattggcagtttgatgggaatagcattgaatctgtaaattactttgggcagtatggccattttaataatattgattcctcctttccatgagcatggaatgtttttccatttatttgtgtcatctctgatttctttcagcagtgttttgtaattctcgttgtagagatctttcacctctctggttagctgtattcctagatatttttattttttgtgtcactattcaaaatagcaaagacatgaaatcaacctagatgcccatcaacagtggaccggataaagaaaatatggcacatgtataccctggaatactacacagccattaaaaagaataagattttgtcctctgcagcaacatgaatggagctggaggccattatcctaagcaaactaatgcaggaacagaaaaccacatactgcatattctcactggtaagtgggagctaaacaccaagtacatatgaacacaaaggagagaacagtagacactggggcctacttaagggtagaggttgggaagagggtgaggatcgaaaaactacctgtagagtgctatgcttatcagctgggtgatgaaataatctgcacaccaaactaatgtgacacgcagtttacctgtgtaacaagcctgcacatgtacccctgagcctaaaataaaagttaaaaaaaaataaaatagatgaacaaataaataaataaaatgtggttactagattgattaaaaaaatgtctacaatcaaatcaggttggggattcatatgtgatatttccttagagattctcagtgcacaccagcatattaaagtcccaattgttacatcacagaaacctgtgtacwttgttcaactttacatttcctaaatttatttgcacaaatagcttctttcaaataataccttttaacatcttyttaaactcctctgggaaacactgatttaaggcaacatgacaattatatgttaggtgttatggcaataatgagggggkcctaactaccacaactctgggtgtgaaacaggtaagcattcaggattgccttcctggagtaggtgacccctgaattgcttccagaaggagtagagaggttagccttgtgaagaatagagaagggtatttcatagagaaagaactgccaaaacacagatatgtagacccaaacatcccacatcatcatccttggaaaatagatttacaaatttccagcakgaagaggaaaaaaagtgcttgaagtgtgctggtttctcaccttagtggaaataattgcttaaaaaaacagccagaggctggacacggtggctcatgcctrtaatcccagcactttgcgaggccgaggcagcagatcagctgaggtcaggagtttgagaccagcctggccaacatggcaaaaccccatctctactaaaaaatacaaaaattagccaggcgtggtggcaggcacctgtaatcctagctactcaggaggctgaggcaggagaatagtttgaagccaggaggcagaggttgcagtaagccgagatcatgccactacactccagcctgggcgacagagccagactccgtctcaaacaaacaaagaaacaaaaaaaaccagagtagaatgcaattctcctcatctggatttcagcaagaattgcccatttctgttcagccgtaggcctccatcctctgttgccagtctgttcttctgactctcacctgtctcctttctgcacacagaaggccagagagaatgaacaattcttccccatgtcagttggctcacccttcctggaagtgtggatttcctgttagtacctgcaactctgtcggcgctgctatttctgtcttcgcgttgtttcagaatactctcacactgctgccccatttttccgtacgcagtcttccaggcccttttttgcacctgatttttgccaggcagcataattagaggatgttacatttccctgaaagagcatattctcatggacaacaggacacaagggagtaagaaagcttcaaagatgctggagggtctccctcctgtaccccaacctgtgccacttggtataacaggattctacatgagttagcttttctttattgttattaggagattaataaaaattgacctcatttatttagtgcttactatgtaccagacacygtaccaagaatttattatcattcaactttcacaaccctaaaatatgtgtattttwcaaatgaggagaagtaggctggcgagtagcttgcccaaagtcattcaactcagaagagaggccatcgtttaatcttagattgtacttgtaaaattcacacatccaatacataatgcctttaaatgttctcattgttaacatttattttctttggattctgtgcctatttctgcttatgtctccggattacctgggagcttttaaaaataagaatcctagggttccactttataacattgaccagaagtcaagaatggggcccaggaattgctattttcagaagctccctaggtgactctaatgcagggctcttcataccttggtgtgcgtcaaaatcacctggtgagggaggatggctgggctccacaccacagtttctgcttcagtaggtctagggtggggactgagaatgcacacttytaacaagttcccaaatgctgttcatgctgccatcctagcacttgagcatttttcccaatatgtgtatgatccccctcccccaccaactgggtgacgtagatagaactttaagtgtcattaagttatgtcatgttttgaatctttctctgctcgatttccacgtcaacatgagtgagggcttcagggattttactccatcattttggytaaatgccaacttggcaaattccactyctcccccggagggactgcaaatgccagtgtcctccttcattcaggagtgaggtcattgtctgtgtggttaaaagtggacactttctgctgcttctgcttttgcactgtagtagaagtttcaaggagctctattttacagttccaaattaccatccctcccctctttaatgcttccaagatggatagtctctcaccataggttaatgtttagattttgatctctatttctcagccccccaaatctggatgatcctctggtgccagagctgttgcatgtatcacccctggacactttcttctctgcttgaaccagagaataattatatatagtagttcccccttgtccatggaaaataccttccaagacccccagtggatgcctaaaaacatgggtagtactgaaccctatgtatactatgtttgttttttttttttttttgatckggwaactgagaggattactaagcggacgacagggaggtagtgcctacagcatggatttgctggacaaagggatgattcacatcccaggtgggaccaagctagataacgtgagaattcatcacactattcagaatggtgtgcaatttaaaacttatgaattgtttatttctggaattttccatttaatatttttgtactagagttgaccatgagaaattgaaaccatggaaagcgaaactgcagataaggggagactgctgtgctagagtgctatagaggatttcatttggaaaaaaaaagttttggtcctggaaaaaaagtttaagaacatagtcgtattccatttcttcatatgtttgagatatttctggctttggtgaaacataggctaggaaaagaacctaacatcttattagtgtaactgaacaacagtaacagcagacttagcctttcttccttatgtgcaacattacctgtgacctgactcttgaaacatagctgctattaaagtacaagtgagtcatgcatagcagcttctccttgcccagttaatttctctgtaaaatctttactctcttttattcatgtatatatatgtrtgtgtgtgtgtgtaaatatatacatatatatgtttgtatttccctttaaggatttcaaacacaaagaccctagtcatttgattgtctctgtactgtcgaattttgcctacaaccctgactgtagagacacattgttacctgttttccatattctgtctagtaaatgcttggttgtcaggacaacggcatagaaggtggaagstcattgataaccacgtgaattctttaaacaaatatgatcagagcaaattccagggtatgcttgaaagtagatttaaggaagagcaaaggtttcagacatatccttccttttataaacttgatattcatctttaaggatcagcaacagttggagttactcataattttatttaaaatcctgaataaagatatcaccttagttttatggtacgtttgtcattccagcttgttaggcatgagtgtgttgttactgacagagcccctggaggacaggcrgacactgtggttctccatggtctctcagtaccaggcacagagcaagcacccaatacatattataggaataaatgatctcaaatcttcacagtgcctcttatagatggcttttatgatatatatctgcagagaaactgaattcagggattttaagtgccttttttgcaaggcccttaaagtttgggaaagtaggtgcatggaattagaactcagattatcctgacttctaagatcacactcttcattgtagcacactgccttcttgccaaaaaaaaaaaaaaaaaaaaaaaggaagaaacatgtaaaaagacagaccatttctaagatgaaatgtgtgcttttcaaaacaatagcagaaaaccttcttcaaaggtaaaatagttggaaatagaagaagaaataatatgtaatttagcgttcgttgaggataagcaattaatcctgccctccaggggtgaatttatgtctagcctatttgcacatgaaagtacaagttgggcttcatttctatgcaagtaagacatctggttgggaagtgaaaaattttgtcagttacctgaatcatgtttggtctacatgatagaaaagcccctgatgtcttcagatcaccagaagacatttggcattgtatagttaacaccagatccactgactgagtggttcacctgagagttgctgcttgacatcctgtagattcacccattgttaggaggctgttaccattttgtaagtcagcagtttgcaaacagtagtccagacgagaaaccaacgctggcccttgacaaagtgttcactggtgtgtgatgcaataaatacatgaggtcataaaaggaagtgtatttaccttaaaaaagaacatcctttattttgagatcctctgcttcctatgtttttagtgatacaattttgtgtcaaataaatcctcattgtaagatttggttttaattagtaaatgagacaggataaaaaattgagaaacctatataaatccctagttttctttatgtgatctttgtatttgattgtgaaaaaaaaaagcaaaattgtagaaaccactgctttaaaccttgtaatatttttagcacaatgacacctaaagtattttcatgtatttcccaagttttccttttcctagaagtggggtaactctccatggtagaactgtttgcatgggtcttgaaagcattggacatcttaacagtcaagtattttgctgacaaaataatgaattttccttttgaaacaagcgttttgttcttaaaataactctaaagagaacaccttctgcacttttaaagcatttccctctgaaggcatgccgtggagacatgaccatagggagaaactttttgtgctagaaaactgaattccaccactgtgaattttttaacagctttcacaggttctgcagtttgctctcatgaccccaaaagcatatatctccacatgctgtaacatcaaggatctctcctcaagctttgtaagctcggccagaatgagctgagtaccctctgtgtgtcaggcgatgtccaatacactgggaatagggagtcataataaccataattttatctgacttttgtctagcatttgtcatgtggcagacaacatgctaaaacacttatttgcattatcttgcttgattcttataaccactctgggagaaaaataacattattatagcctttttacaggtgaggaaaccgttgcagggaagttaaatcacttgcccaaggtcacaagccctgtgagtgataaagccaccaccatccaagcctgtccaccccctaacctgaactcccaagtgctatgctaaaccacctgcctcttatggatatattatctacaaaaagagctctgccctcaaggcgattataatctaaattagaagagggaagcacaagggaaaaagccattatgtagagcagaatgatgtaattccaaaaaacatgctgttggattgtagaggaaagagtgattaattatgatctacccagggaaggctttttgcatgtggccttaggctaggtgagaacaaaatagggcaccagcaattatctagagaattgggtcactgtgggtgccaaagtggatgatgatttcaagctaaaaagactatgctctgaatagttcagaattggccgcccacactcctggaatctgttgaatttttgccaactcccttgttctctttgtgacttattgccctggcttagatgagcttcctactccaggtgggggaagatgcaggatggtgctgccatagcagggagtgctgacaacgtggaagaagccttccttgagtcaggagctctggattcaatctagactctgctcccacaactggttgactccagggaagccacctccttctctgggttcagttttctctactgtaaaatgtatacactgaagttgatggtctgtatgggccattcaaaatcccgtgtctctgtttttggaacagagaaggaatcagaggagaggactggaagaagctaaaagattcagcatgttcggatttcatgactcttgtggttttgttcctagacaggacctaccaggggagcctcctgcaaatgagrtggtcttccttttctactcatcacattctatgcctgccctctctaacctacatggtatagtaggaagacgccataccatggagtcagagaatcttgggctaaaatcctgaccatgtcccattacatagtgactttgaacaaattatgtaatctttctgtgcttgtatttctacaactgtagaataataggttgcaatatcrtagactcttcatgtagagaatctaattctattactataaaatctaattctaataccattggtttggtgttagcaatgaaggtgatagcaactgaaaagtaagaagagcagtgactaaaagctcataggttttgataaatgggcactattactattataatatttattgtgttaaaatacaaattatgtacagcactcctctgaacactgacctacaatagttaccagttgcttgttggacttcttgaaccagacttgaccaggcaaagagaatttgagaacctctatttcactaaaaaggtggtatctacaatatcttgccactgtagcatctgctatgtgtaatgagatgcttgggcctgctggtggtcacctattttctaggtatacgcattggcttttgtggtgtygccatatatatatatatatatatatataaaatatgtattatatatataatatatatacatgatatagatataattaaatgttatattcaattaaaataaatataattttaaattaaatataaggaacatgagagttagcaggaatcatgggtgaaaaaaatatgtataataacaccacaaatgcatatatataggtttttgcccatgattcctggttaactcccatagcccttattataacattggggcacttgaggcctcaggcaacagtctctctcagtgaccccctctggtccttcttcacctgcccaaggtaggatgctaatttgattatggatcagaagaccctcattccagagagggtcctgccccatagcctagtggaaagaatgctacacagagaggccaaaaaaagtctgagcagatagtccttgctggatttagatcatatgctttttgtccaatcatatttttacatggttgtcaatcatgcctgtgtaaaaaagcctccataaaaacccaagagtacagggtttggagagctttttgattgctgaatacatggatgttcctggagggtggagtgcccagggaaggcatggaagctctgcgccccttcccccttaccttgccatgtgcatctgttcatctgtatcctttgtaatagtatttataataaaccaataaacgtgtttccctgagttatgtgagctgctctagcaaattaatcaaacccaaagacagggttgtgagaaccccaacttgaagccagtagttcagaagttgtggaagttggacttgccactggtgtctggtgcgtggggttgggggcattcttggggactgagccttcaatctgtgagatctgatgcaatctccaagtagataatgtcagaattgaactaaatgacatccagctggcgtctgctacagaattaagtgcttgcttggtggttgggagaaactcctacacatttagtaacagaagtcaccttctatgtggatgattgctgtggtgtaagaccagaggaaaaacatgatttcagagttwttccctcaacagccttgagatactccattttaataagatagagagatgaaagtgtattactggtgggattatgttagaaaacacatttcttgtcccagtagcattcaagatcaagagttaaacttaatacagtctctcctctttactctcccaactgatattcagcttcctgtgtgagtgtatgtttaatgtttttgtctaaattaattgatctttgtcttatgatctctcgtcttaaaaaaactaagttcagctaaatgaacattgctgagaacttatgttctagacactgctgacgttgtgctgaggggaaatgaatatagaggtaaataaaataatttgaactattctctgtctagtgggaaagagagatcgaggtataaataggggaaaaaataaaacacaacgtaagggtcataatttttaagttggattaaaaatatgtgtgtgtttctttattaaacacctcttataggccagactatcgggccagggatataacattatataaaactcagtccaaattgcataggtgtctacaagatgtaataactacaagatggcataagaagaggtattggatgggaatagtgtcgactagaaagtaagctacttgagcgtaggggccttaactatcttgttccttaatgcatttttagcattagaacagtgcttggctcgtatcaggtactcattaaacatttctgtagtaagtgatgaggctatcataaagttttgtttccccacccctaaaccagattgtaggttcagtctgaaaggactccaggaccctctctgctggtaagacatggtgccactttgtactctcccagccaatctgattggcctcttgactttggcaaaactgagctgggggytggcccccagtgccaagcacagaggaagcagggtcacatgccacccatgcccaaagctctttctgacatttccatgggcctggaaccaactctcctcctgggtttcatctcattatatgtgggaagacaaaagaacactgaaccttccagttaattcarcaccccgcccccacttaccccttcctggagaggataacagttctgttgaccattataatgcattttctgtctcccagcagtccacatagtcattaatttctgctgctgacatcaggaaagaggattatgtgtgtgtctgaaactgttcccaaagtgctcattagtcatagataattgaaaaactggtaggggaagatttggtgtaataggagcccccgcctgtgaagagggactgcaaccaccagataattgtagattccagcttttgaccactcagactgaatctgcccatccaaatgggaattcagcagacttgagcctaagagctctcagagtgatagtgtttttacatacccaggtgagggtgtgtacaccgagacagagacagccaaatcaagagaataggtgaactgcccttgggtctctttcctgccttcagactgtggagcagtgtttggaaaaagtgtccagtattctcctttattttgtttttatttcaacgtaagattgttttgatcacaaaagacatacaaggtcatgggatataagaaacacaaacattagagaagagtaccctacactggatcccaacccatgctgtgacaaaattctagggtttttctggaagtttatgtgcttacatttttatatccttttctttaaaaaaaaaaaatcacatgatcatactaagaatactattctgcatcttgccattttttctgaatttatcttggagttccaaatctataccttaattcaagttcattcattttaatggcaaggtgggattctgaccagatttaagggggaaaaacatcttttaaaatattatacaagaggctgggcatggtggcttatgcctgtaatcccagcattttgggaggccaaggtgggtggatcacttgaggtcaggagttcgagaccagtctggccaacatggcgaaaccctgtctctcctaaaaatacaaaaattagccagccgtgctggcgtgtgcccgtagtcccagcaacttgagaagccgaggcatgagaatcgcttgaacctgggaggcagaggttgtagtgagctgagattgtgccactgcactccatcctgggcaacagagcgagactctgtctcaaaaaaaaaattacacaagaaatgtagaccaattagaaattagagaaaaaagaaaaaaaggaaagaaaaaagaaatcactcataattcctccacccagagaaaacctattttctgtatttttttcccctaggaatgtatttttacaaatagttcatctactttcattgttgttgttcttacagctgttaaaagaaaacctttaggcaaattaaatttaacagtttaactgtgcaaagaatgattcatgaattgggcaggtccccaaccagaataggttcagagagacttttgctcagccacatggttgaagagaaattacggacagaaaaagggaagtgaggtacagaaaaatggaagtaaagtacagaaacagctggattgggtacagctctgcatcggccttatttgaacagagtttgaacagttggccgcctgtgggtggttgaagtatgtcttctgtgattggctgagactcagcttctagttacaagagtaggttacagtgtgtttacaaatccagttaagttacagtcactgtgtatgaagaaacctttaggctgaagttacaaacggacacctttaagttaaacttaatttaacaaaaggaagtcatatactgcatgttttgcagcctctatttttcacttggtttgactgttttaaatataaaaattattccccaagcttttctttacactgtgtgtttatcttcttttttatttatttatttttttgagacggagtctcattcttgttgcccaggatggagtgcagtggcgcaatctcggcttactgcaacctctgccttcctgggttcaagcgattctcctgcttcagcctcccaagcagctgggattacaggcaactgcaaccatgcttggctaatttttttttttttttttttttttggatttttagtagagacggggtttcatcatgttggccaggctggtctcaaactcctgactttgtgatctgcctgcctcggcctcccaaagtgctggggattacaggcatgagcaaccacgcccggccacatttatcttcttaaaaacccaacctgagcacttacagtcgtgcccctctgggcaattcctttttgcctggccacgcctgaagccctccgctgcctcttgtcccgtctgttccagttctctgttcctccttgttcccctttttgcgacatactaaatgcctcaaacacaccatgcccctcagggctccctacaggaaactcactttttgctctgctgtcatccctttccccggagcatgccagcactgaaaccaccaatctccaacttgcctttccacacaggcttgaaagtcatcttcaccttgaagactgtattcactctactagccaccctaactggaccctccacagttctctgggaacaccmtgtacacatttcacctttctagcattttctacatggccctaagastcttagtttttcatcatctttgtcccaaaccacaatatgagacctcagcacctagatcttagcacatggtagatggaaatctatgcaggcaawcattagttctattgtttctgaaatgtttgttaaaatgcatgaatgaatgcttgaatgaagcctagaaagaactgcaaatgctcaggcagtgaagtcttgatttctgggaaaagcaatgctgtgaataatttaattttatggtgaaagaaaagccaaacaaggattatattgggaaaagttgtcaggaggcactaatgtttgcctctgacagctctagtgccctcagtgtacctctggctgataaacttagagtgtgattttgaaggggtgatttctcagggattctcacctatttctatcatcctctctcatgccaagctgtttcattttggtctctaaataaacaaagctccttcctgcttggagtccagatagcctattcctgaaggctgtggttccaaatgaaagatgggatatttgtccttgtatatatttattttcatccctaaccactggattgaggagaaggctggttcactgctgtaggttgggttttccagaagcaaaggctgagacagatttggggggataaggtgtttattagggatggttggctgtgaaagaaggaagagagagaaggactgggtagagggaaaagagctgaactgaggtgcattcctgcagcaccttggtgaactcagcagagtctctggagtgagtggtgtctatcagagcccttctgcctctgctttgcaaagtcaccaggtactggctgtcctgggaggtgcatcaccttgggaaggcagctctctgcaactgaggcaggccctggaacatctggcagctgtctgctgactttactccatccttaagggkgagtttgagccatggtatctcagtctctaccatgcttcctatatccacgcaaccactgtgacctgttatttcttgttccatggaatcccttctgtctgcctctgtttctacatctccgttaccaatatctcagtgaagatccttatattctctctctttctttgattactgaaatagattcacactattttccctaaccccagtctatcctctgctataatactgccagagagtgcttaaaaaagcacaagtttaatcgctttcctcctggcttaatgctcctttagtggtttacagtgggcttcatgattaagttcaaacacttaagtatggattacaaggccctgcatccactgccccatctgcctccccagcttcctctgtccttcaacacccaccccctaccagttcacaccccagcctatgttccaatttacctagcccttttgatagttcccttaggggccccttctcccttttttctgtccttgctcaagacgcatcctctgctgatgaagctccctgtggtcctatagcctatrattagacccagatctcctgtctgcatgcccaggactctctctgcctcgcagtggtctgcagcctcatgttctgagcctagaggacatagaatcaaattaagctcctttaccagctaaggtttcttcctaaattactatagagaaaacttggaagagtgccccaccctgctaatcctgtctagaaccttttttataaaaattacaccttttatgtttgtggagattgggggtgaaggtggaacagaatttccattttgaccttcctatgaaaaccatttttaaaaaatctcaatttagtaggcaagatttctaaacggtgctcctttttctttttcttttttctttttttttttttttaacatacataatgcttgttctaaaaatacttctcttgatcctttcatccattcagaacccatttttaaacaacttttactccaaaaggtaatgtaatgaataagagcagaggtgtggatatcagtcagagtagaacccatggcctgtcttcagctcttaggctgtctctagggtgtttatttttcttctgtaaaccacaattttcccatctgtctgtaaaatgggggtagtatgggtcctattgtacccttcacagagggttaatatgaaaatgaaatgagaaaatgcatgctatgtccttagtgcagtccctagcatgaaagtgctcagcaaactggagtgcagtctctcctgtgttagatactagccatagtgacataattaagatattgtccagaaccgtattatacaaagccaaggacactgctctcttccaggtttctgctactttggcatttgaaacagaataagattttcctgttctctgccccatcctttgagcatcttatacttatcctccagaccatcagtgtccaatagaaatataatatgagccacatatgtaatcttaaattttttagtagccatgctgaagaaagtgatactaatttttaatgtatcttatttaacttagtatattcaaattattattttaacatggaattgatataaaaattattgaggtattttacattcatttttccagatgaaatctttgatatctggtgtgtattttccgcttaacacctctcaattcagacgctagatttttgttggaaatacttgatttagatttcttaaattaatctagaaaaagtagattcgcatacccaagttgttccgaacatacttaaaagtttttcagtaactgaatttaatatcagtttttaagttgaagttaaaactaaataaaactaaataaaatgaagaatttagtccctgagttactctagccatacttcaagtgctcagcccacatgtgactagtggctgccatattggacagcagagttcttctagaagtcactgcagaggtttcagtcttactcttcttagctaaacttgttttcatattcaattgtagatagaagctcttaaaatggataaaaatggtgtcgtcaaagtgctttggttccatttagaggaggttggttaagctgttcactctctgacccctctcccaacctccaccctcacctctacccccagaggtcctggagcacctctgcccagtccttgagctccatggaacaattaacaagtggcatcttagcactcaaaaattgctgatyatgcacccagattctatcttggggctcaaaggggtcttaatatatctatgagtcaactcctagcccctccctgcagtgcagaaatactayagaatccttgggggatgagagagggctygggctctgtttaacacctaggagcagatggatcatttcattctattctgtcttacgtggttctctgggttcttatcttgtcttcctaactaggttgggggcaaggactgcttttcacagccccacagcacccacacaaagcaagacaatcaattcttaactgaaggcctgactdcaagaattcaaggtcacttgaaaaatcagggtcactgcattgcacaactccaaagaacatcattcaaattgtattatatgattgtgcaagtggcagccttgtaaaatttgcaaaggtttagactggartattttttccagctgagaaaaactttttaactaattatttgttggtacaaagtacacctttttcctcttatcctctgccaggaagcaactgaaagagtaagttttcttgacttaggaatatacgttcattagagagggtgtatggatgtgtgaacatgtgggtttacrtgcgtttaagtaggttagtagatctgctgtgttaggaagcccatttggaatggtttgagcatttaaaccttgtatttaagaggctactgtgtttatattccttttgaaatttcccattttcagaatctttatctggtttgaatgatgctttagagttccttgtttgtaaagctccacaaagcatgacccataggtaccaagcacgtacactaaagtcactggatgagcaaagggactcttgatgactgcatggtttttatctttgcaaatgcagaggagggaggagagagcaaagagtttctcttaaaaaaaaccctctgtttacttttgtgtttttcaaactgatggtgtttgttttttctcatgtctacccaggaaaccaagtgctacctcctggagcttctcttggaaatgggctcacaccagaggcagcaagagacsttggccttctccctgggattgcggtcgcagcttcactcattgatgcccatgcaggaggactaggtaatctcttatttgttgcctacagccaaaaccgtattcaaatggaatattccctagaaccgaagacactccttttctgtttttaaagcaaaggtcaaggactttggtgtttcaggatataataatgaaaagcctttttacagctaggcatttggatagaattacagaacttttcattaatgataaaatttatttataattgtattaatttctttatacatggcaatagaaaaaaatgtatttgaataactttctgcatagttcttttgtttactgaaaattcaaaaaagatatgttaatttcttgccacacttagctctactgtttttttgtaaggtactccaaaacccttataagtctcttagatttattttaataatatatttggcttatgtcctgtatccagttccttggctgcagtcttgattttatcttgtacataactctcaagtctttcattcatgtattcatttgttcattcataaaacacccgttgaacacttaccatgtccaggcatggtgctagaagacagtgaacttaaaacaaaaccaaataaaaccaaagtctcttccccagcttttaatgggaaaacacacagggaaacaaagaattacagtaaagaatgatgacttcctcatccttattgcaggttgtgtgtgttttttgcaggggaagttgttctggttctcagcatctctcatctcaactgtagccatatatttttttcctagcctttcattctaacaatgttttgttttaaactatgatttataattcatgagatcaatttagcaggacatgaccactgaatttgcacaacagaatggaacagaattgaatagaacaaagtggaaaacatcagagtacatttcacaaagtaagggaaggcactgctttgtggagctgtgtttccattctgtgtgtgtatactttcagacacttccatactctgcccatgcatttacacctctgtgacttggcacacatgttctttgtccagaatgattggtcctccacttctccagctggctaactcctcctctaactgcaagacccatatcagatgctttctgctctgcatagccttccatgaaacactcaggtgtatttagaaattctctaaattatgctttttttcagcamactatttgaagaaatgatcatattgcattgtaatttcaaatatatctgcatgtcatttccattagagtgtgaactccttgagaacaggaacattatgttatctgtcctgtatccttcatgccaagccctatgtctggttcctatagctgcttattaagtttattaaatgaatagtcacattaaggcaagaataaggtgaaatggctttaaacagtagagtgaagattaatctgttttcttatgcaacggattattaaatggtgccttgttctacatactacatggatttccagagcaggatcgctctcatcaatctatggacatgtctgtcctgttcatctctctgtcctcaggatctaaaacagtgcctaagaattagtaaacaactcataatatatgtaggttggttgaatgctatgtaacrtagttctgattacaggcaaggttgtttctctccaaatacttttcagtgtgagcaatgtgtgcttttgattggaatgttaagattttggtttttacatacaagcacagagagaacttgaggtctaggcagacatggagtgtttctgtcccctagcaatcctgacattccagatcatgtgtgaggccacaaaagctttctctgtcatgctttttaaattatccctggggtgacagtgtcaatcatccacccctacctgggtgacaatcacttggctgggaccggcatatgctgaaagaaagagaactgctgcttgaagagccgcaggcactacagtttccttgtcagtttcccagacttccctcagggacgtgccaaaacacaccttctcacttctgcccaggactcactatgtcctccaggaggggagactgtcaatgaccctcacctttttcctaaacagagatgttcagtggcagaarttttacccttagaagctttggcttaagccttttgttccccgtaaaatgcaaatgcttgtaagtgatatggtttggctgtgtccccattcaaatctccacagagttgtatctcccrgaattcccacatgttgtgggagggacccagggggaggtaattgaatcatggaggccggtctttcccatgctattctcgtgatagtgaataagtctcacgagatccgataggtttatcaggggtttccgcttttgcttcttccttattctttcttgctgccaccatgtaagaagtgccttttgctcttcgccatgattatgagacctccccagccatgtggaactgtaagtcaaattaaacctccttttcttccttgtctcgggtatgtctttatcagcagcataaaaacagactaatacagtaaattggtaccagtagagtggggcattgctgaaaagatacttgaaaatgtggacacaactttggtactgggtaacaagctcatagagggaagagacttgccttgtctctgatgagactttggactgtggacttctgggttaattctgaaatgagttaagactttggaggactgttgggaaagcagctgggagggaggctgtaccctgcaaagccacagaggcagcgctgcccaagaccatgggaacccacctcttgcatcagtgtgacttggatatgagacctggagtcaaaggaggtcattttggagctttaaaatttgattgccttgctggattttggacttgcctgggccctgaaactcctttgttttggccaatttctcctggaatggctgtatgtacctaatacctgtacccgcattgtatctaggaagtaactgacttgttttttattttacaggctcatgggtggaagggacttgacttgtctcagatgagactttggactgtggacttttggattaattctgaaatgagtaaagactttgggggacttttgggagggcatgattggttttgaaatgtgaggacctgagattgggaggggccaggggcggaatgataatgatttggctgtgtctctattcaaatctcaactaacttatatctcccagaattcccacatgttgtgggagggacttagggggagggaattgaatcataagggccagtctttcccatgctgttctcgtgatagtaagtctcacaagatctgatgggtttatcaggcttttctgcgtttgcttcttcctcattctttcttgctgccaccatgtaagaagtgccttttgccctccaccatgattatgagacctcccagccgtgtggaactgtaagtcaaattaaacatcctattcttcccagtctcaggtttgtctttatcagcagcataaaaatggactaatgcagtaagttagtaactttcccccatatttttgttagtggaaagatagaatagtttttttttgttttaatggaaagatagaataagaatcttggattctttaaggcctgaacttagatgccagcagtggctgggaagggcacaggaaggtgatagtccatgatgacgggttgatacagacttacttaatatatgttgactatgttttatccttattatgccttcttatgccttcttatgcctctttctttacccttcaccttacagccaatccaagagttggatatctcaaaaaaattaggaggcctgggtgcaaatgtttcctttcatttctacctttcctatacccctattaggatgtggaggtgaacagatgcctgaaaatcttgaaaaggttgtccatgggtccaactctatattaactaaatataattgagtgaatgcaacctgtcagtgattggtctaggcactggagattattagcagtgaacaagtcaggcaaagtccattcgttttggaaagaaaattctcattgttctcccctgcctgcatgtttgtagcttaatagtataggtttgggacagctaatccctgagacatattgtgatgctatgacaagggcactcaaaatggaattttaagttctggatttagattgtgtttctgcctacaaatatggtgcttcgcagaacttttgtctcctgttatgcagtgagagagtgagagacaacagaatgcaggattcactactttgtgattctgtataggttgaggtcagtaatagcctcaagaactggctaaatgaaccctgtgttaagagatttctgaatgtcaagtacagacacagctttggatttggaattgccacccaggaagaggccatccaggcctctcaccaacaaaccctgacaactgtagtcacttcaaatgctgacctggcatggcctgcttgaaaccccacattctgactagtatgaggggtcagcactctgctttagagaaatacccctggactttcattcccaagggaggcctgggatgggaggataaagatcaaagaagcaagcaaaactcaacccatgcttttcccagttctggaaaaagaggaggaagggctttgtgggaataaaaatcaatgataaaagaacattttgttcttaaggtgctggttagtaagttctccagcagacagtcagaagataggagtagctttgtttgcactttgtgggggtggttctggccagggctcctgctgctgatatttttctagcttataaaaataacattaacttttttccaggtcttttcttggctccagcaccccaactgccctgaaaggcaataacaacctgatttctgtctcaggcccttctcttctcagttgctctttttttttttttttttttttttttttttgagacggagtctcgctctgtcgcccaggctggagtgcagtggcgggatctcggctcactgcaagctccgcctcccgggttcacgccattctcctgcctcagcctcccaagtagctgggactacaggcgcccgccactatgcccggctaattttttgtatttttagtagagacggggtttcaccgttttagccgggatggtctcgatctcctgacctcgtgatccgcccgcctcggcctcccaatcagttgctcttatctggcagacagactcctgattatccatcaaatcttgaatcctgttctcctctgggaagccctccctgacttcccaagttgacttaagcactctctttttcccccactgtgtcttgcgcttgcaggtttgtgtgtgccacattgcctcatctactaatttataaactctttgggcaacctgttgtttcatactcccactgcarcagcctgcagagtgctttacatatggaggacccttaacacatgcgtatttagtgaatgagtgaatgaatgaatggcattccctccatgaggaacggatattacaactgagagagagagtaacctctcattcaaaggcaattgtccctatacaatagttatacttggcttatttctgcaggagcaaaagtttgggttcttctagatgtttggaaatctgtctcctttttgccctcatcacattaccaagtttcggccaagagcaagctttgttccttggtttagcacaactatttgattaccaatattggattatttrgcagatgttgaactggcttaaattgctcatctgggccagatattgaattggtttaaactgctcatttcaattgcagagccaggccaaaatgaggattttgaatttcttttctttttaaatggaagaatttattgagccagtcttgcaaaaagggcctttggttcatgccctagaacaacacatagtttgttccagtaaacaataaaacatgccaataacatttctcaccattatcagtgttctagaagacaggataaaggctgcgatctaaagcctgcgactttagataatgtgatttggggggaacatttatttataagtagtatatatactaaatgtagcatgatggataaagaaatatacttattggcaatagtccattgcgtttgtaaacttttgatttatgaagcatgatatggtttggatctgtgtcctcacccaaatctcatgcaaattgtaatccccagtgttggaggggtccctagtgggaggggattgtatcatggtggtggatttctcatgaatggtttcgcatcatccccttggtgctgttctcatgatagtgcatgagttcccttcagatctggttgtttaatagtgtgttgcaccaccccactctctctcttgcttctgctccggccatgtgaagtgcctgcttccccatcaccttttgccatgatcgtaagtttcctgaggcctccccagaagccgagcagacaccatcatgcttcctacacagcctgcagaaccttgagccaattaaaactctgtcttctataaactgttcagtttcaggtattcctttatagcaatgcgagaatggactaatacaaaacacatctatgttcattatagaatttgctccttatagcaactttgtagtgaagttaggacaggtatgtgttccctcattttgcacagcaaacagctgaggctcagtgtattataaactcaagaatagatatttatcttacacttagttcttaaggcaactttatacatactattattctatttgtcagatgagacagttgaggctcacaagactacctaacattctgagctacacagttaaatgagagatgcgtgacttaagcccatgctttgtgcacacttatcactgtgttataaagaatggcctacctatttaaacatgatccactctgctctttaatttgaccctaaaaatgtgagcaagtaacaaattttgaaaaaggaaagtctttaatatttattgacgacccactttactagttcatggggttagacagtgactatgagagagaagtggacttctgggaatttgtattctagtaaagaaaatagacaagtaaataaacagttacggttacttgtgccgtgtatggaaggctttggaaaaacataaaatgggcctaaaattgagacttaaacaattattaaaggattcctagagggagtgatgtccagtaatctaattacgacactgctttccctgttattgcttcctggtaaagtggaatttatatattttttgcgacttttaaacttcaactaggcttcatttctaataataaaataataacattgttaattagaacaaatacaaccaccactctgactggtactactatgatgaccatttcttacatgtgtcctatgtgccaagtactctacctgatactgctcagactttatatcttgctcctcacgataagcctacaaggtagaggttgtttccccattctgcatgagggaattgaaggcagaaagaataatgtttccacaatcacataactaatctcatagcaagatttgaaattgagtctgcctccaaggttcatatatcttttctctaggccagtggttctcaaccaggggtgatttgacccctcaggggacatttggcaatgtctggggacagttttgtttattgcttctggggaaagggaaatggcactggcctgtggtgggtagaggccagggatgctgccaaacaccttacaatgcccaggccaaccccctgcaacaaagaattatccagcttcaaatgtcaaatgtcagtagcactgaaggtgagaaaccctattctctcctggaacacctccagtgatattatttctcttcatcaattcagcttatttctatagaagccaaaaagcagcccacaataagggttttgctgatacattagtactttgttgaaatgtgttttgtgaaattgactcttcagtaaaagtagttgtgagattaagaaaataatagaagtgaagcctgaggagtagggaggacaggatggtttctagctcatctatttcagagtcaagccacacgggacaacttggccgtctttcagcacatcatgcacattccacctcctttcctttgttactcatccatcagcactcagtctaaatgttactttgtggaaacatctccaaatttaatccattcttagaaaagcaccaatcactctctatgctgtatctgtgaaatactttacaactatttcagttttttcaccaaatcatgttcacgtttgtatgcccatcatccagcatgaaatccacatagctggtcttcactaaatcaatgtaattatttaattactattattagtaattaagataataaatataagagggttttgaaaaatccagaataagaattggtaaatataggtgagggagactttaagaaaatatagattcccatgccctaccctgctgaggatgcctggaatcttgttctaagtgtggaaaatgtcacctggtacccagaggagacagcctggggggatgagttggcactgaggacactggggtcagaagcagtattgatgtgtttctgccaagtaggcagatcagaccagagcagaaccgtgctgcgcaggagccaggccaggcgctggccaaaagctgggggcaggagggagcttgtccaaaatgagagagaatatggatccaaagaggcagacggtctgcaagaaattgggggtgggggggggattagaaatgcagataaagtcatgccgtggaatctggaaggagaaaaccgtgccagtccctgagcagatagagcaaggacaactctgggagttcctggatgtgaatcacagagggcagaggaagaacgtattcatgggattgcaagtttattgttttaagttgaggttcggtttaatgcgacccactactgcctgagacctcggcagttcatgagccgtggcaacagctcatgtgatggagggaggggcagagagcatacgtggggggaaggataactgagtttcctgttcccaggctccaaggctttcttggagtgctgtgattctctggactgcagaaggctggccttagctgagagaccagactttgactctgtggaagaaaaccgagagaatccagggcctggtgctattgccagctccccatgtgtccccagtttttaaatcttgtgccacacgtcagtgtatatggctgtgaacctgccatgaaaccataatattttgagtttaatacatacactcctgtttggataatgagtaatcataggctttagaactaaaaggctgctcaaagattctgtataccaaattcttcaatttgcagatgagaaaactgaggcccagacaatggtgaatcatccaaagttaccccagcatattactttcagagtcaaatttagaatctgagtgacctagttcatcagccagggtccccgccccattgtactacactgtctccagattaggaaaagggaatgactcctgatttgttattccattttataccttatatcccatttaatggccacaggcagcttcactggtggttattaaataggtaatttagttttcctgagccacacttgagtaaatctctttgttttgttgtcacaatctacaaaaagctccaaagaatctcctccagagctggaaataataaaaacacctgctattcgagttccttccaaagagctcaaagcagttatttttatttcacctaccaatcgttgaatacctatgctgtgccaagtgttttgctaggtacttgactattcactattgtgagctcacaaccacactgtgagctacaattatttttggactttaacatacaaggatgaaggtttaagaacctgccaaaggttacattttaataaattataaagttgggttcctggacccaccgattgcagagcctatgagctctcccgtgttgacctggctagtgaatctatttgtgtgtaggtatgtttgtgcctttacttacgttagcccatacttacaccaatgcatatttgtatctatagtggaagatagagcttctgcttaatatccttctggacgtttgtagatctattttatggatgagaaagttgaggcccagggtggagaagtgactctaataaagtgtatttaaagcagcacaggagtctgggttccatcaatcatggggaataaggccaggcttattagatcagggtaggaatgggatgcgtagctattggggttgtgtggtggagagataaacaatattaatgttgacgttaattttgtttactaaatttgttaattaatgcttacaatctcaatctcaaagattaatcttaatctttttgtagtgacttgctgtttttaaactacccttggaatagggaaggtatttttacctcccacgaatggttgggaaaactgaccttcgaggaggtgaagggatttgcctaaggttacaggaccaggaagactggatccaagactcaaacccttatttgtgtgcctctgtcttcacatcagctttagtgcaacccttgcatcaaacaatggaaaagtagtacctagtaaatggagcaaggtgtcttattctgtgcccagagcctctcattttaaacaagctctgatcatctcatctactacagaactgtatctggtattctggggccatttttaaacagaaggtttcacttattctctcctgtattagtatatggccgagaaaattagctgagctgttattttcctttgctgaactggggaacaaaaacaaaaaaacacacagtaatccagccactggttctgacactgccaagcacctgttaggaggacttcctactccaagttcaaaaggtacggactgctagaaaagtgtgtgtttgggggcccagagtctaagattgcacttgcgtcactggctgcaagagtaggatcaggtccactgtttttcatggcacaaaaactcaacagatagtgcttcacatccatatactgtttctaagcactaatgtttactttgggtcttgcacatcagcagctgatggtgggaaaatacacatctctagttattgccccaaggcggcagcctcacatctaaactgctggcttcttccttattatctctccacaggcctggttcatttccttgttttcagttttctcttagctgtgcattcatatcagtcattgtaaagagcaaagagaaataattttaaaaattttccatatgggcatcttgagcattgcctcagtacactctgtagctagtatagatatctggggaaactaagaaggaaaatttctttgaatatagaaaaatcatactagtctccagttatatcattcaacagcagtccccccagcccacctttccatacctctaatctgtatctgtgctttgtactatgactctgatgtaagagtttggctctctgaagatggtaaaaatttaaatgcttgaggtaaacacagtaagatagttaaaaacacactactggttccatcagctgtctctttgcccttggaagtcatctgacactgatggcagcagtgacccatctggagcagccactgcgaagatgctggctgcagtagaggaatgcactctgcagagctggctggggccagaacaggtgggagccctgtcccctaccaagttggcagggtgggagccccatgctcccaggcacatctgcagccgcccagctgcggctctggacctgggcatccctacgctctcaggggcccaggaagccccccttcctttgcagacttggaaatgcttgctcctactccctggcctcttcccattgctggtgcctgctctggagtggggcagagttgtggctgagcccagtgctgtcacaatccagccaggtgtacatgcacttgaggtggtgctgacacgctagcctcctgccaccttggccctctctggaccttgggcgccaacgagcatggcaggagctgagggcagctcggctcaggcctgcaggtgcctcagtaggaacagactgggtggcgggttgatggcaggaggaagcagacaggctcctgggcagaaaggagcgggtccctggcgaaaccccaccttcaagccagggacagtccgaagcctggtggctggactgccagttccaagtggagtctgtggcccagagtgagaacttgtgttgctttttctgggtccacccatggctacccatggaccaatcagtactcatttcctcccttctgagcccgtaaaaatccctggacccagtcagacacggacagactcaggactaccagctgcaggaaggagctacccactttgggtttctccacccattgggatgacctgcctgcagaaaggagctacccacttcgggtctcctctccactgagagctggacactcatctagacgacctgcctgcagaaaagagctacccactttgggtcttctgagagctattctgtcactcaatgaagcttctctccaccttgctcaccctgcagttgtctgtgtatctcattcttccaggttgtaggataagaactcaggacccactgaatggcaggactgaaagagctgtaatacaaacaaggctggaaacacatccctccggctcactcgctactttgtgggcaatgaggagagaagagctgtggcccttcatggagcccagacctaggggctccccaagccaggggtgtgacactgtctttaaggctttgaggttcatggcatctccaagcctccaggtgcccgtgttcccctcatccagatgcgggtgcccatagcagaagccccrtgcagcacatcrgatccagctgcagccttgcgtggagctggcacctgtgccagcacctgtagctgcctcccctgccacagcagcttgcttgtctggttgtgtgcagtggccggactctgcacttgctcacccacacacccctcactgctccacgcctgggtcacccttggtaggtgtgggatccaggatggtggcgtgagctgagcccagcctgctgggccaagtgggtggaatgagcccagcaggcacgagcaatactcaggcagaagatgccaccagccacagaggtttccggctggcaaagtgacaccccgaggatcccatgacagtacttcatgcctcagttcccccatctgagaaatgggaataatagtacctcttgcatagatttgagtaataaatgagcttttatttgtaaagcacttagaataatgtctggccatactctgtgtgtgyttagctatgattaatgtgattgcagtaaagttacattatgaatagtagcagtgagcaagagaaaatcaaagatttattacttgatttacaggtagatgacgtcttccttctgtgtgtcaggcattgttataggtatgttagatacagtggtaaacaaagccaagctccttctcttatagagcttctatcctactggggacgttcataaactcccatttaaacatatgtatttataggtatatgtaagtatacatatatgtattgtatgtgtgcataactgtgtgtctctgtatatgtgcatatttataagtgtcttcatacacatgtgtttatgcatggatctggtatttatacatgtatgtgtattacatgtgtatatctgtatgtagttgtgcatgcatatgcatccatgcctgtgtctgaatgcgtgtgtgtatgtgtatatactgtgcatgcacatgtttgcatgcccctatttgtatgtctgtttatgtgtacatttatgtgtgtgtctgatttgtgatgtgtttatgtgtatgtgtgtatattctaatgttcatgagtgtatatgcatgtgtccgtatatatgtatgtgtatatgtgagtggatatgcatgcatgtgtttgcatagggtactgctgagtgttatgaagaatagtcctgattaaagtgatggaaagttccaggaggtgctactggtatacagaggtcaggaaagttcagtctagaatggggacatttgaggaaacataccttaatgaagagaggaaatatttcattgtgtaaaaagcaaggcagagattttttcaatcagcaaatatatgttgagcacayactttgcctcaagcatgtgctgggcactgggaataccaggatgaagatgacccagtcccttctctagatgactcagcagctggtggaaatgggagatctgtattcagaaaaatcctaatacaacttgcatactgcttttccaggcggtgtaaaaatgttacaagagtatagggaatggatcagccagctcttccaggacaagttaggaggtgaaaactcctagaaagtgaaaacttggataagccttttaagaagcagtagtagaatgtgcagaggctcagggacgttaaaatgcccttcataatcaaggaacattttggtgtggccacctcgccattcaaatgtgcgagaggggcagcgagaggcagccgggaagacggagcctgtgtagcacactctgactggaatcagactgcctgggttcaaacccctgttttgccacttgttagtaaagagcttacctgctctgtgcctcagatttcccttctgcaaatggggatgggaatagtgcctcacagggttattttagagatgccttctcctgacacattgtaagcactcaacaagtgttagctactcccagttggaagctagaatgtaaaaggccttaaattcccagccaaagagattgaatgctaaaattaatttcaagcaaacctatctgttcaaatagctttctcagcactgattttgatgtgaaaaatatctggaatattcttcgttatcaagcatgtgccttggtagtgtaattacagtttttaatactaatggatgatcttccattaaagtagtaaaaagataccatctcattttaagcttagagcaaaagcttacttaagtgaaattaagcagatatttattttgtcaggctctggggaggattccgaaattatttgctccctactagtgcctagcrctttatctttgcaaccgcacttaccctgtagagtcatagttgcacaggaaactgtattcctgcatctctaccttcagtgtttcacgatcactgtttctcatctgccaggcctgagggtgggcagtgctgatttcactgtctcatacccactcttctttctgccagtgtcttttgtgagagcaattttatctctgcccctttctcttcaccccattgtctcttctccagtcttcaaacccaaacaaaaaacatacaaagtttgctcatattcactgcagtctgagctgctgaatgttcttccagagccccttaggatttctgcacccatacttgtaaatgtttgcatcttcattttgttggtggtgatgacaaattaccccacataacttgcctctgttcctgttttagttagaaattactgtttactggagacagaatggaaaatgtatgaaggggcaacatgagaaaataggttattttgattacttccaatcatccatcgttaatcgaattcataatatagataaccaaataaaaagattatttcaatttaaacttagaatgacttataggtttttttaatctgatttccattcttattacttcttgcagcagttttcaaacttgagtstgcataggcattcatggagctagttaaaatgcggatggctgggtccccaccaccacaactcattctgatcagtggctttaactggggcctaaatatctgcactgtatccagcccacacatgagcctgatgaacttcaccagtggtaccttaaaagatagcaagaggggcagactaattagactcaacgttgtttaccatcaaaaactgtctgtacataatccagaaagagcaaagttgaatccaggctaattgaaagactgcattttaaattttttgtttcaaaagtagagcaataaagagtttttccaatgtgttatacttcccatgagctggatactacctgtttacctagatgccacttaatgtggacagcaacttttatggctgtgcacattctcaccacccccatttaaagagaggaaggagactcgcttagactcaggcagctagtgtggttgaacagagagaaccttggtctgtctggccccagcttgctctcttttaccattatatagcttcacccaagccagcgttaacagctgtagatgattttcttctaatgttctaaaacctgaagacatggggcatcttttaaccaaatgctcagctctagggaaagctaagcctcttctattttgttgaaagataaagtgttaggctgtcgatctgtattgttacaggtccctgggctggatttagcctcaggagttaaaagtatatcagccttgtgactcaccaccatgaaaccctcagatgggagtctcctaccagtatcaataatatgaatgaaaactttatatgccttctggattgaggcctctcacagctcaaagttgtaaagaaaaacccacgcaattggattttgtgaaatatattaaatatgcccagtaatgtggctcttcaaaggaatttatatactgtctgctttactgtggtgtatcattatagctcagccaaatgcgtggcctaataatttgtttcccttatgcatatccatcattaaatgtaacatgcagacaataactatttaaacacctaaatagatgattatatagctgtctgtcccacttagactgtgaactttttatgaacaatggaatctagtcatcttcatctctgtgtctcttagctcagtaaatgaatgaatatatgcatgaatgaatacatgcgtgaatgaatgggtttgcttaacatgctaagcactagactagttactgtggcaaatacagtgatacaaagaaatagaggcagatggattgagttctacaggaattttaaaaagggaagaatcactttcagttgaaacagtaaggcaaagaaaagacaaaaatactaatatttattgagggaccttcctgatagaaatatgctagagagtctacatgtataatcttcacattgactccagcagcttgctcaaggtcacacagctggcagtgagaaccccctgaggttagctaccatggtccttctgggaagtgggaagggatagcctttgaatgaatctgggagaataggtgtattctccactggaagcaatgaaacgtagagtattctggatggagagaataacataaatggaggcactgagatgaggtcgtggaatggtaagcatttcagtttggctgaaatctatgatatctctaagggattcctggaagaagaggatataatgatcaaataggtggagatagattgggagtctgtcccatctgagtaccgttttggagtttgtgcttcctctttctccctggaggcaytggcaaatcattgaaggtgatctcaagccagagattcattttaagcatggctttatatacttttatacacaatagttgggggaaaaggcaaagaggtttcctgaaataggttttggcagtggggcttgaaaagaagatagggagtttgacaactttttaaaacaaatccatgcattaggcacaagttatttaaaatttttgatgttctttatattcttctagctctttctatttacatagctattactaaattaaatgtataaaagtatttttcctttttaatttgaaatagatttcatctcatatttggcagaagataataataacttgttaacttcaaggcagtcagggtaattcatccagtctcaaactgggcattcatttaaatctattgtcttagatggagatatctagtatactcactcatttaaagtagagccgtaaatcctgaagttaaataagcaaaacaaaaggcctcccaaagctgagaaaacacttgccatagagtgcacatactgtaggaaagtacaaggattattctccggctgtcacccagcactgctaacttagaattatagataaaatatgctgtaattttaataattaatagctgactatgcaaaaatattattttctcctagcttcaaccaacaggtaacatatctgcctttcatgtcaggtactgtgctaggtactaaagatataaatatgaacaaattatagtctctgtcctcaaagagctcccattctgattggacaaacaggcaagtaagccatccgagtatgatgtggaaagtgtctgataaaagcatgtctgggctattacaggagtctaacctcactttacctgagcaagttagtaaaattccctccccttcccccaaaaatgattggtttgacacttaaagatgaattggagggagaaataggaatttatcagatggacaagacggctaggcaggaaggagggtgagaaggagagggaagcagagggaggtagtatgcaccaagatccagaagcatgagggtacccctttggctgcagaataccgagtatactatagtgtagagtatgctgaaatagaagtgtgagagatatatgtggggacaaagtttttgagggccttgaacatcatttaaaagagattggaatttttatccttaaggtactagcttgtaaacagaaactttagaggcagtgaggttaatggaccagaagacgggactgttgtaagagaccttgaaggccagaactgacgcagttccaaggcagtatcaatggaacaagaggggacattaaaaaattaaaaataggctgatgaacagtgatggggtcctttaatgcatgggcttaaagtgctacatatatagctctctgaagcaagagtgcactggacaatgatggcatggcactatttaacagaagtaagcagagtctatgtgtcaggaggattgagtgtaagtctcaaatctgcccttaccagttatgtaacttctacaagtcacctctttaaacctcacttttttatataggtgtgaagatcaagattcatgctttttcttctaatatatccacttttatatgccaaaattttcctactattgaagtggtattgttggaataaatgtgatcacaaatagaatgtatttaattcattaatttattcacttgccatttattgaatttttttttctggcaacaatgggctgtcctcttggtcccccaaaataaaaagctggtgaaaattaaatgtatccacatattcaactcacaaggcaccagagagctactaaaggacttgaggggccaagatcaaaagagaagcctacagagctgggttcaacatttccacccttttatacgctgagcatttactgacttgctgagatttggactcaacatttccaccattttataatacactatgagcatttgctgagttgaaacctgcaactcagaggccaagaagctaaacaccagtttgggcagtctgcaggctggaagtatatatatttgagtttggacatcattgaagagggagaatactagtaaatcctctaggtgttatttgggaccccgaaagtcagtgtaaactaaaaatagacaaactttacaaaggccaaagcctgggtttgwattaaattaacatctgattaaattcagatcatctatccctacttgagctaactgcaagaagcaaggttatatcctttctagaggtaggtaacataatcagaagctcaagttataactaaaaggtttcatatgtaatgtctgcattgagtagaaaataagcatgtaaaatatgaataatttcaaaaatcaagagtaaaaacaaagccacagaaaagtccatatgctggtggtatttgacatgaactctaacatatctgtgattaatatggtcaacaaattataggagaagatggagaattcagcagagatctgggaagtagaaaaagaartggggattctagaattgaaactaataactgagattaagaattgactaaatggagtaaagtcaacagcatacaatataattgaaaagagaattagagaactgaaacatagatctgaaaaatctatttatactacagccagtatacaaaaggatggaaaatacatgaaatacacaaacaagtatgagatatatggagcatggtaaagaggtctaacagaggtgtagttggagtccaagaatgagagaagagagataataaatcatacatagaagctatatttgaagagatattggccaaaagtttttcaaaacttataaaagaactcaagtgagttattttaacttttgaataatcaattaatgcaattccatattaaaaggatgcaagagaaaaattaacagttgtttacaaatgcttttgatacaacttagcacatattcatgatttttttaaaaatcatggcaaactacgagtagaaaggaacttattttgattaaggatatcaacaaagaaaaaaacataatgcaaatatcatacttaatggtgaaatattacaatgttccaattcttaccacgtttattccacagggcctatctagtgcaacaagtcaagaaaaataaatggaaaatataagaattagaaagaaagaaagctaacatcatagatgatacaattatacacatatagaatgtcaaaagaatctatagataaaatattaaaattaataagtaatttagcaaggttgctattgcagaaagtcaatacaaaactctattttatttctctaatccagaggcaaccatttagaaaataaaaattttagggaggagccaagatggccgaataggaacagctcccgtctacagctcccagcttgagcgacrcagcagacggtgatttctgcatttccgtctgaggtacggggttcatctcactagggagtgccagtcagtgggcgcaggacagtgggtgccgcgcaccatgcacgagctgaagcagggcaaggcattgcctcactcgggaagtgcaaggggtcagggagttccctttcctagtcaaagaaaggggtgacadcacctggaaaatcgggtgactcccacccgaataytgcgcttttccgacgggcttaaaaaacagcacaccagattatatcccgcacctggctcggagggtcctacgcccacggagtctcactgattgctagcacagcagtctgagatcaaactgcaaggctgcagcgaggctgggggaggggcgcccgccattgcccaggcttgcttaggtaagcaaagcagccgggaagctcgaactgggtggagcccaccacagctcaaggaggcctgcctgcctctgtaggctccacctctgggggcagggaacagacaaaaagacagcagtaacctctgcagacttaaatgtccctgtctgacagctttgaagagagcagtggttctcccagcacgcagctggagacctgagaacgggcagactgcctccttaagtgggtccctgacccctgaaccccgagcagcctaactgagaggcaccmcccagcaggggcagactgacacctcacacagacctgcagctgagggtcctgwctgttagaaggaaaactaacaaacagaaaggacatccacaccaaaatcccatctgtacatcaccatcatcaaagaccaaaagtagataaaaccacaaagatggggaaaaaacagagcagaaaaactggaaactctgaaacgcagagcgcctctcctcctccaaaggaacggagttcctcaccagcaacggaacaaagctggacggagaatgactttgaagagctgagagaagaaggcttcagacgatcaaattactccgagctacgggaggacattcaaaccaaaggcaaagaagttgaaaactttgaaaaacatttagaagaatgtataattagaataaccaatacagagaagtgcttaaaggagctgatggagctgaaaaccaaggctcgagaactacgtgaagaatgcagaagcctcaggagccgatgcgatcacctagaagaaagggtatcagcgatggaagatgagatgaatgaaatgaagtgagaagggaagattagagaaaaaagaataaaaagaaacgaacaaagcctccaagaaatatgggactatgtgaaaagaccaaatctacgtctgattggtgtacctgaaagtgacggggagaatggaaccaagttgaaaaacactctgcaggatattatccaggagaactcccccaatctagcaaggcaggccaacattcagattcaggaaatacagagaacgccacaaagatactcctcgagaagagcaactccaagacacataattgtcagattcaccaaagttgaaatgaaggaaaaaatgttaagggcagccagagagaaaggtagggttatcctcaaagggaagcccatcagactaacagcggatctcttggcagaaactctacaagccagaagagagtgggggccaatattcaacattcttaaagaaaagaattttcaacccagaatttcatatccagccaaactaagcttcataagtgaaggagaaataaaatactttacagacaagcaaatgctgagagattttgtcaccaccaggcctgccctaaaagagctcttgaaggaagtgctaaacatggaaaggaaaaaccagtaccagccactgcaaaatcatgccaaaatgtaaagaccatcgagactaggaagaaactgcatcaactaacgagcaaaatcaccagctaacatcataatgacaggaacaaattcacacataacaatattaactttaaatgtaaatggactaaatgctccaattaaaagacacagactggcaaattggataaagagtcaagacccatcagtgtgctgtattcaggaaacccatctcacctgcagagacacacatagactcaaaataaaaggatggaggaagatctacctagcaaatggaaaacaaaaaaaggcaggggttgcaatcctagtctctgataaaacagactttaaaccaacaaagatcaaaagagacaaagaaggccattacataatggtaaagggatcaattcaacaagaagagctaactatcctaaatatatgtgcacccaatacaggagcacccagattcataaagcaagtcctgagtgacctacaaagagacttagactcccacacattaataatgggagactttaacacctcactgtcaacattagacagatcaacgagagagaaagtcaacaaggatacccaggaattgaactcagctctgcaccaaggagacctaatagacatctacagaactctccaccccaaatcaacagaatatacatttttttcagcaccacaccacacctattccaaaattgaccacatagttggaagcaaagctctcctcagcaaatgtaaaagaacagaaattataacaaactatctctcagaccacagtgcaatcaaactagaactcaggattaagaatctcactcaaaaccgctcaactacatggaaactgaacaacctgctcctgaatgactactgggtacataacgaaatgaaggcagaaataaagatcttctttgaaaccaacgagaacaaagacacaacataccagaatctctgggatgcattcaaagcagtgtgtagagggaaatttatagcactaaatgcccacaagagaaagcaggaaagatccawaattgacaccgtaacatcacaattaaaagaactagaaaagcaagagcaaacacattcaaaagctagcagaaggcaagaaataactaaaatcasagcagaactgaaggaaatcaagacacaaaaaacccttcaaaaaattaatgaatccaggagctggttttttgaaaggatcaacaaaattgatagacctctagcaagastaataargaaaaaaayaagaatcaaatagatgcaataaaaaatgataaaggggatatcaccaccgatcccacagaaatacaaactaccatcagagaatactacaaacacctctmtgcaaataaactagaaaatctagaagaaatggataaattcctcgacacatacactttcccaagactaaaccaggaagaagttgaatctctgaatagaccaataacaggctctgaaattgtgtcaataatcaatagcttaccaaccaaaaaaagtccaggaccagatggattcacagccgaattctaccagaggtacaaggagtaagtggtaccattccttctgaaactattccaatcaatagaaaaagaaggtatcctccctaactcattttatgaggccagcatcatcctgataccaaagccaggcagagacacaaccaaaaaagagaattttagaccaatatccttgatgaacactgatgcaaaaatcctcggtaaaatactggcaaaccgaatccagcagcacatcaaaaagcttatccagcagcacatcaaaaagcttatccaccatgatcaagtgggcttcatccctgggatgcaaggctggttcaatataggtaaatcaaaaaatataatccagcatatacagaaccaaagacaaaaaccacatgattatctcaatagatgcaggcctttgacaaaattcaacaacccttcatgctaaaaactctcaataaattagatattgatgggacatatttcaaaataataagagctatttatgacaaacccacagccaatatcatactgaatgggcaaaaactggaagcattccctttgaaaactggcacaagacagggatgccctctctcaccactcctattcaacatagtgttggaagttctggccagggcaatcaggtaggagaaggaaataaagggtattcaattaggaaaagaggaagtcaaattgtccctgtttgcagatgacatgattgtatatctagaaaaccccattgtctcagcccaaaatctccttaagctgataagcaacttcagcaaagtctcaggatacaaaatcaatgtacaaaaatcacaagcattcttatacaccaataacagacaaacagagatccaaatcatgagtgaactcccattcacaattgcttcaaagagaataaaatagctaggaatccaacttacaagggatgtgaaggacctcttcaaggagaactacaaaccactgctcaaggaaataaaagaggacacaaacaaatggaagaacattccatgctcgtggataggaagaatcaatatcatgaaaatggccatactgcccaaggtaatttacagattcaatgccatccccatcaagctaccratgactttcttcacagaattggaaaaaactactttaaacttcatatggaaccaaaaagagcccgcatcaccaagtcaatcctaaaccaaaagaacaaagctggaggcatcacgctacctgacttcaagctatactacaagggtacagtaaccaaaacagcatggtactggtaccaaaacagaratatagaycaatgkaacagaacagagccctcagaaataacgccgcatatctacaactatctgatctttgacaaacctgagaaaaacaagcaatggggaaaggattccctatttaataaatggtgctgggaaaactggctagccatatggagaaagctgaaactrgattccttccttacaccttatacaaaaatcaattcaagatggattaaagacttaaacgttagacctaaaaccataaaaatcctagaggaaaacctaggcattaccattcagaacataggcatgggcaaggacttcatgtctaaaacaccaaaagcaatggcaacaaaagccaaaattgacaaatgggatctcattaaactaaagagcttctgcacagcaaaagaaactaccatcagactgaacaggcaacctacaaaatgggagaaaattttcacaacctgctcatctgacaaagggctaatatccagaatctacaatgaactcaaacaaatttacgagaaaaaaacaaccccatgaaaaagtgggcgagggacataaacagacacttctcaaaagaagacatttatgcagccaaaacacacatgaaaaaatgctcaccatcactggccatcagagaaatgcaaatcaaaaccacaatgagataccatctcacaccagttagaatggcartcattaaaaagtcaggaaacaacaggtgctggagaggatgtggagaaataggaacacttttacactgttggtgggactgtaaactagttgaaccattgtggaagtcagcgtggcgattcctcagggatctagaactagaaataccatttgacccagccatcccattactgggtatatacccaaaggactataaatcatgctgctataaagacacatgcacacgtatgtttattgtggcattattcacaatagcaaagacttggaaccaacccaaatgtccaacaatgatagactggattaagaaaatgtggcacatatacaccatggaatactatgcagccataaaaaaggatgagttcatgtcctttgttagggacatggatgaaattggaaatcatcattctcagtaaactatagcaagaacaaaaaaccaaataccgcatattctcactcataggtgggaattgaacaatgagaacacatggacacaggaaggggaacatcacactttggggactgttgtggggtggggggaggggggagggatagcattgggagatatacctaatgctagatgaggagttagtacgtgcagcgcaccaacatggcacgtatatgcatatgtaactaacctgcacattgtgcacatgtaccctaaaacttaaagtataataataataaaataaataaaaatgtttaaatagcatgatttacaataaaataaaaatattaagtacctaggaaggaagatgtgtaagacatctatgcagaaaggtataaaacattgagagtaactaaagaagtcataaataaatcgagggatatatgatgttcattgattggaaaacagtattataaatgtgacagtttcttcccggttgttctatagattcagtgtacttcagttcagcattctagcagatttgtgtgtaagaggatggaaattggtagacatcctaaaacttagatggaaaggatcaataataagacagtcttgaaaaagaacaaagttgggaaaactccataatgccagatagcagaacatattacgaagtaattaagaatggtattgagggaaggacagacaacccagaggaaaacagattaaggagcccagaaacaaactcacacatgtatggacagttaatttgtggcaaagatgccgttgccagagctgtaaggaagcaatgtatttttcagtgaaatagtaccctgccgattggttatcactatggcagaaattgaattttggcccttctccttatactrtgcatacaaatacattccaaacagattaaaaacttaagtatgaaatttaaaaaaataaagttcctaaaagacaaggtcttcatgacyttgagatagacaattttcctaaataggacattaatgtaagtacaaccataaagaaaaggattggtaaataagactatgttaaaataagaaacttcttttcatcaaaagcttccattaaaagagtgaaaatgcaagccacaaagtggaaggaaatagttgcaatgcatataacaaaagatgtgtatccagagtatgtaaagaatgtctacacattaatgagaaaagaacaattattttgacagaacaatggttaaatgtgtataaatgtgtgcatatatacatttgagcagctttgcagaaaagaggatatacaaatggacaataagatacgaaaaattgtccagccttgttagtcattaggaaagtccaaattaaaaccatactatgatatcactacacaccctgcaggttggctaaaatcaaacggtttgataatgccaagtattgatggggatatcaaacacctgaaatgctcaagcattgatgtggaaatatgaccacactttgggaaagagtttggcagtatcmtgataggctatgattcagcagtcctattcttagayatatatccaacagaaatgtgtaccagaaaaaatacrtatatagtaatacatgtaaaaccattatttgcaataggcaaaaactgcaaacccccagttcccatcaataatagaattcatcaatgtttggtatattcgtggagtaaaggattttatggcaacaaaaatgtacaaaatattgctacatgcagcagtgtggttgaatctcacaaacatgggtgactgaagctggcacaaagaaaatacaccgaatggtttaaaaattaagcaaatcctgtggtgtagacatctggacagtggttatctctggcaaggcatggtatttggaaaaggacatgaggtttatttcttgatctggataggtgtgtttactttgtaagactccactaaattctatacttaaaatctgtagctttttaatgtaggttatacttcattgataaggtttattaaaaatatcaaaggctctgggccgccctgtgctaggcactgggaatgcagacatgagtatgaaataacctggctctgaagaacggagaggaggaggtgagtgrtaattaataaacaattagagaaggagtttgttagaagtgaagtcagggtgtgtcactttatatgtcagcacacaaaggagcaactcccaactcaacacacttcctgcctgtattaggtgcttcataaatgttaaattctactcccaccttgctatactcataatcatgagtaatcaagtaagggaaaaattatgttatgaatcctcttttttagtgcacaatccatgttagtgatagtggtggcaagtaggcttttttatttgtctgtttgtttgtttgttttttgatgtctttaacagtgagccttcctcaaacaatgtattagatagaattgcaacttcctcagctgaaattatttcatcagtgattactttctccatggaatgttaatacattgagtttctcttgtatatataaccagggattctgagcctctttcatctctgccttgggccacacagccccatagaaagatgatggaagggagaagaagggaagaacacctgccagcctgccagaatttcggctatagattggcaagcagacagctgaatggagggaggatatggacaatgaaaaggaccatctaacttgagggcacagtgcccaccgacagcacagcaggtgctgccaggcctgtacagagctggaaatcctggcaagatggtagctgctccatcttgtctggcctagttactgcctctggcscatgctgaagggagtctggggagttaccattccaaagaactcacaagaaaacagaactgacttggatatattccaggtttgcctagtggtacttcaaaatggyagattgaatgttattttaaaagtcattttaaaattatttcctttgaaatacagaatttaataggagaaaaatcagaaggagaatgaaaaataatatggatatgcagaatatatccgaaagaaatgtgtacttcaatgtaccaaaaatatgtacagggatacagataacaccatttcaacagcttaatggttagaaagaagtatgatttctggagccagactacctaagtttatattccatgctgtcacctactgtctttgtgatcatgtgtcagttactgaacgtgctgagtctaaatatttcatctccaaaatgggcatcatcatagcagttgtaagaattaaataagttaatttacctaaaacactcaaaacagcacctgkcctgcgtaaatactacacaactactagctgctgctgatgataacagctaagccatttttgtggctgagagtcagcagccacagccagggtggaggagatccttgtaatcataaggtcagaggaaagagggcctcagtaaagaaggcttcttaggcccatacagcgggaattacttcttgccaaaaggcttgtttgtcctctcttgaagccatgattagtctgcctctgccatgtcgttggctcctcaggagattacaagctctytgaggacagagattacattttttttcaagtattatttccccagcagtgctgagcacagtacctgatgtaaagttgtgctctgtaaatgtttactgaattgaatccttctaaacagaggagggagatactattaatcagggctgaacgtgtgacagcactgttctttcaagccaagactatatgtatgttctttactttttttttttttttttttttttttttttttgagatggagtttcactcttgttgcccaggctggagtgcgatggcacgatcttggctcactgcaacctccgcctcccgggttcaagcatttctgtctcagcgtcccgagtacctgggattacaggcatgcaccaccacgcccggctaattttgtatttttagtagagatggggtttctccatgttggtcaggctggtctcgagctcccaatctcaggtgatctgcctgccttggcctcccaaagtgccgggattacaggcatgagccaacacacctggctttttttacttttaaatcatcatttcccttttagagatgggatgtcagaggcccaaaaaactcagttcatttgcgtgaggtcatgtaartggtgatatctggaagtgtctccctcaaagtcagtgccctccctcacaggcactcattccctaaggcwcctaggatgggcacagagaaaggagaaccaagcttggctggggctgctgtccagagaaggtgggcaggtgtcaagagcaggtgcagaggtggagaggagagctaaatcttgtcctcagtagaagcagagatgtcatttcaactgcaggttttgaaaaatgtcagtgcatacttcatgagattttctgaattcatttttactctcatcttctacactatttatctaagctgttgttctctttgaaactatgtcagccacatgtcattcattgtgccacaaccctgggctttttatcctgcttagggttttgttttgttttgcttgttttttctccccagctgctctgcctatcacttaattctctgagccctctggcctgagtcttatccggtggtgtgggtcaccttacaatcccgtttctagtctcctgggagtagtggtggcaggcgagggatagaatcaacatccaggttcagaatctatttgtcttttttggtcttattgtccgaagcttgagtcaaggataaattaatcagtctagakgtgggagagccctctaaccctccccagggaaaatcctagcctttatagaaacttggcctggttttggctctcagatttaattccaagctgtgaagaatctgtcaatgttcaactaaccctgacaaaacctttggaagtttctgttgcaaccgaaactcttatcacaggaggtggtactgagcttggcatcagaggttggagagagaagagagctagcctgctaattaatattttttttccttaaatttcaggcttttttttttagtttaaatgttctaaagaacctgtcctgtcacttcccatctgtttcctggtgttttcctcaagcatctcactggtttgttttatgtttttgaggggattatctggggtgctgattactttccctaccttcaaggagcctttgaataattttataaatgagaccatttgtctaggggcaagagaaggttgctgaaggcaacctagtcctgctttctcccaagagaaattgtacactaacatttgtttagtagtgcctatatcccaagtacaaggctcttgccttatacctaggatgagcarctattccagtttgccccaagataagctggggggtttccttgggtcctggaccttaaatagagtgtagacgaggagagttatcttttcttctgtctatcctaggttcatagctggggcccttttaacaaaagatagattaacaagagagaagcatacacatttatgtaatatgttttatgtgatatgggaggtatcatacagaaatgtagacccagaggaacagttaaacatgagtatttttatgttaggcttgatgaagagtagacagacatggaaaaatatgatagggcaagaagggcatgatttaatggtaataaactggggaacttagcaaagcctgttagtgcagtttcatccgtgtgatccttcatctccagatacaaggatggtgctttcctttgagtacagggagggcacctctcacatgagggtcttatgacctgcttcaggggacagtcagaaaatcctaggtttaatgacctgctttaggggagaatggtgggggaaaggtaagagtgacctctatgcctctatgattttctcagataccttcagcttaaactattcaaaatactaacatgccatattttgggatagcatgtcctgaaccccatcaagtgcagataccaggaaaaatgaccctgtaaaggaaatgccattatttccaccttacaagtgagaaaagtgagtttcgaagaggtgtgttcacttacagaagtttgcacaggaaactggtggtgagaaagaatcaaatatacatctgtcagacttcagacccagaactttacactaaccaacttcttcagaatgcagagttccatctccttcagactgtgtagctcaacagttttgtaccatctggctatttttctctactgtgtatttgactttgtctcttttgtctcagggtgtacttgaaagcctttacctccccatcttccttccctgatggctgatatacttctgcctcacctgctttaggagcccctgcctccaaccatccaaactaggtcaggggctggggctccttccttctgttagactattcagatctgagtcactggtcattcgcatagtgtcttataaatgtctgcctgtgtatttttccaccactgctagactgggatcttgtagaatacaaggaaacaactttcatctttagatttctagcacccagcatagttcctggcttataattggggatcagtaaatagctgttgaattaatcaatttataaattttcaggaagcatttgtgtgccttcgagtcacagtatttgatctatttaaggacttattccataagatgcatttgtgatgcttaggccagttctcttaatttttttttctatttttaatttttacaaagtaatttttgtgagttaacttggctgtttggattagatttcaacctgatactttaccatgcctaatgtstgagaatgagaaattgtcttttctgaagtcatagatgataatgtccaagtaatctagaggctgtgttgaagttaggaagaaaggaatttctgacatcaagtttttgctttgtcttcactgtggatttttctagttttctctaagtctcaaatttccaagctatacatattagcctacctttgagatttgatctttctgggtaggaaggagaaacrggagtgagacccagttatcagaaggtctgttctttgttctctccactcctcgcaatacaaccagcctcttgaattggtttctgattgctctaagtcatggaggagtgtggcatgaagacagaaatgatgaatgccatcccaagttaaactgcagtatgcatggtgctacatgtaattgtggcttttcatgaaataagcagattttggtttattcttaatgtttaaaatgctagcctgggttatacctactacctggtacctcattttccttattcctttgggcccgcaattattttgtcatcagttgtatagtcaaggacagaaaacagatgttccaatcaatctaagtaaacccaaataactctggcaaagcacacaccgtgctgaaatcaaatgaactgttatgccaagccttgctattaacaccaaagattggaagttgttggtagtaacatcaaaaatggtgaaaatatattgagtaaactgtcccagacattgttcccctcagttaatctccatgatagccctataagccacattctatcatcattccaattttatagatcaggagactgagacataggaaacttaagtgatttgacctacttgccagacttgaaaccaagcagtcgagttccagtgcccttgctttgaaccattacgccctaactagttcatatatctagtaaatgtctgtttacatctcatgtagaaaaagaccttccctattatcttgctctgcagagggtgggagggttggggtggggagggggcagtggcagtgtcaaggtgtgtaaaatttctctgttgacttaaagcataggatgatgatgatgatgatgatgatgatgatgatgatgattattattattattattattatttgagacggagtctggctctgtttcccagtgcaatggcgcgatctcggctcactgcaatctccggctcagtgcaagctctgcttcccaggttcacgccattctcctgcctcagcctcccaagtagctgggactataggtgccgccaccacgcccggctaattttttgtatttttagtagagacagggtttcactgtgttagccaggatggtctcgatctcctgacctcgtgatccaccctccttggcctcccaaagtgctgggattacaggcgtgagctaccacacccagtgcagtaaaagtaaacctactttaggatttagttggggtaagttctagaccacatttctttcaaggtcaaagcaatacttcatgaaacattgggattacctttttgacttttttttttttttttttttgagatggagtctcgctctgtggcccaggcttgaatgcagtggcgcgatctcgattcactgcatcctccacctcctgcattcaagcaattctcctgcctcagccccctgagcagcttggactacaggcgcgtgccaccatgcctagctaatttttatatttgtagtaaagacggggtttcaccatattagccaggctggtcttgaactcctgacctcatgatccacctgcctcggcctcccaaagtgctgagattacgrgcataagccaccatgcccggccacctttttgactgttttactccccttcatttgctaggcttgaggttaaccctttgggtttgctttagtggcattttgacagtaagtcctgaaagagatctgagttcagctatcctattgtctaggaatagttggagttcttgtaagtagttgaaaagaaaggaactagcttctgtgaactccacgagataatgtaggataaggtagaattagagtcaggtagatctgggtgtgatatagtcccaccccgaggtcccccacaatttagtagtgtgggaccttgtagaagttgcttggaaaactttactctccttttctctatttgtaaatyaaagtgataataactaccttgcagtatcactgtgggaatcaaatatgataatatttgcaaagtgtcaagcacaaagcaatctcccaataatcaaggatcttagaacctttagtctttaccagtgatttttgacaaggtatgttgtgaggctccagtaattacattattacccatgagttgtcactcaaaaccaatcaatatttttcacctttattcatatttaagacacggagcctttgtccgtgattaaatgtgctattgttacctagaaaatgtcttgtgctttactagtatgtgacttctgccacacacattcatttattcattcattcattcatcaacaataacaacaaaaaatagtgagctactgcagtgtgaagacttgccctggcctccgtttgcttatagtgtagtagagggatttgtttgtgttgtctgtgcagacacataaactaaagttacagtgacagaatctgtagagagtcagaagatgggctacaaaggaaggaggcttggtcggttctgctggtctggggtgttttggggatgtggggagatgtgatcaggaaaggcttctgatgctgcaactgagtcttcaaaatggagttggtgttccccaggattgttatgggatraggtgtattggtggaaaggatatcctaggcagagggagcaaagtaaacaaatgcttagtggcaaggaccaccaaatcacattcaggaataaggagaaaaggtcccaaccatatggaaccctgctcatgccaggcaattctgcaggtcgtggatggcgtatctcccatttattgagtactggtgtgttccacctaaatctcatttaattctcacagcaactttgtgggtgagtattgctatccaaattcttcagatatggaaattgaagttctaaggggtcaaggcatctttgcccaaggggatgaaagagggattcaagtctaactctgaagaagtagataaacaacaaaaacagcaataacaataataaaagtaataaaaacagcaaaggttcatatagtactaggcatgttttaacctgtaccgttcaatataatatccactagctatatgttgctacttaaatgtgaattaattaggatagaataaaaaattcagtcctcagttgtactagccacattttcagggctcaattgccacatgtgtctggtatctattgtatcagacagtgcaaatatagaacatttccatcatcacagaatgctcttattagcactgttatgggtactttacacctatattaacatatataatttttataatctgtgaggaggatactattcatattgtagagatgtggaaattgaggcataaggaagataagaaacataaagaagataagaaatcacatgatgaatgagtccttatttttaagcactgtgccataatactaactcaatatattgtgttctgtttaacataaatgaatgttagtcaaaataatggacttcagtgtctgcgtgtatgtagtctggtgttaagtcttctgcagagaacacgtctttgatatgattcttatccttccagaagcatacagttgtcaatttgcatgtataaagctggtggtcactagagagtcttctctggagcccttcctctccaggaactccagaaacctcccagccagctttggcaagaaactcactggatgggattcatcagtcagttcattcatccaaatgactgaatcaagagtctcaaacagatgtagtcttaaataatgttcaaaacccttcttatcctttttgatacttcagagaaggtgcctgaggttattaaaagagaatctttttcaagatgccaacacatcagactcaaagactgaaaatcctagttgagtccaacttctacctctaagttactaaataaactcgactaaattacttcacctttctgaaattcaatttcttcaactgtgaactggaaataaaatacacatatcacaggattttctaaggactaattgaaggttacagtgtttgaggatactttrcaagctataaagtactttatatggctataaagtgggagataattataacacaaatgcgagaactcaggatgtttttcttctatataaccttgtaagctttcaaaactgccacagcgtgataaattataggaaaatgtactcttaatcataacatttgcaaagtctcttttttattttacataaatatagtagggactcaatgcttgggtggaagtattgttggttggatgaatgggagagatgaagggagacagcatattaaataagagagctgttcatgaagttttaaatgttccttttttaacattctttttaaacattgcttgatatgaactatgtgtgttacatggagggttgggagacatttaattcattgagttagcctgtttttctgctatttgttttttagttcaacaaacatttattgagcaactgccatcagttgggcattgtgcaagtttcagggaaaacacagttgatgatgtcactgtttttttatgcctgtttcttcatctgctaatttttctccttaaacattttgaggattgcagaataaactgacactggtatggtcatatgaagggccccagcggtaccgagggctgcacttgtgtcaaattgtttcctgatgtacacatgcagcctgtgagttctctgtggatggcaaaatatgtttctccggaaagaagaaagctcctcccaccttttcttgcttttccctgcttatctctgaacctcttttctcggggatagcccatcaaagcactgtgtggccaaaggaaaaataagatgtcagctctccgactcatgtggtcttgcagtgaacatcagctatgcatggctgctgaattggggtggacattaggcagagtgtagagaacctcttgaggggaaatgaggccagtcctgcccaatatatataattttaggtaaggagatacctcagcttgtattttaggagaagcactgtgtatatactgagaatggctgaggaaggacctccatttgtaattcatttctctcattgtggggatgagagaaccagttcaaacttttaggccatttgtggcagaattggggctgaaactcttgtttttctaactcttagcccatggctctcactgagtttcatggtgaactagcacttccaagtatgttttcattatgtaagacaattataacatcataaagtgaggagtatagaaagaacataagctttggagtcagacagaacaaggtcaaatcctggcactgcttcttaaatccatgtggccttgggcaagttacctgaacactctgctctgttcttctacttctgcatctattaagaggaagaaagaatgtttaccttttatggatgttgcaaagattaaatgagagaacattcaaggagctcagcacagtacccagcctatctttgatgttgatatgtttactagaaaggaagaatccagttgtctcttgagagggggttcagatgatgatgatggtgatgatggtggtggtggagagagtgatggtagtgatgatggtgacagagctaccattaaacatctctttttaagcatttctgcaatatcacaacaaccatgtgatgttgtgattttcctcattttatagcagatccttctgtctccaaattccatccttttctcataatagcacactagttctcaggttctaagtctagatatagcagcagtgaatctgccaacccaagaagaaacaaataaatatttcctacacatttctttttccttcattttaattcccttttcgtattgactgaccctgtaacattaactttgcctgtactttatgtttatgcaaccagtaaatgtgggtgattctcaggaattccttgaacctatttatgatactgtggagcagcgtggccaactccttttctgtcaaggatctcagaatcaatatatttaagatcccaagattttgagatgtacagataagtgaacattggttgcctggctattsgatttttatcttagagaaaaacctgtgagtcttggtggggaagaaccagcactttggaatcagattacctgaatgtgaatcacagcccagttccttgtgagctgcatgaccctggtgaagttactactcatttctaagcttcgattttcttatccataaaatgaggataatactaataccaatgacattagtttgttgtaagaataaaatgagacatgtatagaaagagcatgtaaaaagagctcagttaaaatgagctcatatcttgggttattcctgtacaaaagcctttgtgccctgaatggagaatcgtgtcactcaggattcactcagcaaaacacaaaccactctaattgtttaaaaaaccagtaacttaatacccaaaaatggcgatcctgatgatggaggagctgagaagggctacattccctgtgaagcaaatcagagatcagtgaaatggaagcagctaccatccccaggctggagggactaaggagggaggagggaggtggtgttctcatagtctgagggcaggggacaccagccgatgctggagccatggcagccctgtcaacagagcccgagtggtggaggggaagcagctgctgcctggcacagaagagaagtagataggctcttgcttccccttgcctgcaggggtagccccacaatactgagcagagcagcggacttgatctgaaaacacataggccaaggattcttgcaggctaaagtctcagacttctattgcctggttgtggatatgtaactactgtgataactaacacagaaagtttggaagagtcttacttccccctgttgctagacctctgaacaatagcagagattcacaggttgctgtgccccagaaggtagaatttggaaaaagcagtggaaaaccctcgaaagctgtaagaggcctgtctctggcctttttctcacattactttctagcaagtatctgagcagccagtgccttcagtatctggggatttgtggtctgatgagacattcccaccctgccgtttacctggctaacttctgcagaattgagtatagactgaacttccttgggcccctataggtgggttagctgcctttgtggcccctcctgtgatacactgatttccctgcactgaaatactccatttaggcttccrtctccttcccaccagactgtgagcagggacttgtcttcttcatccttgcatccccaagcatttgtactcttacttcctgtattgagctagctactgtggtaggtcctgggctatgcatgtaagtaagagtgccagctactagcaacttttattatagaagggaggcagatgggatatatgatgttttaaaattacccatgtcttttgtgctagggaagtccattgcatgagactatttaacagggagaatcgtctgtcctagagggtcagggaagccctataattaggagtcggcctgacagcgaggttgggggaatggcattccaggcagagggaagagcaaatgtgaaggtcttgaggtgggaaacagcattaaggattagagattgagagcaaacgtggcattgcctgggagctgatgaggtcagcaggacctgttctctcctgtgtccaagtctctgcgtcctgcctgagcactttccacccccagctttgtgttgtagtcctgcaagtctgcgtgtttgtggcttccacatcacacctagtatatatcgttttgtgcatagaaggggcttrttggatatttgaacaaatgaatacaattccaggccctaaagagtctttctagctttcttgtcayatttrtaactttagttgccctgcaagtatcaaggaatacgagctctatggggaagaagcctgaatttataccatttatgggaaaccctctgctatttggcattctgttactaggaactcgctctcagtcattctctccttcacaattggagttctgcgataagtagtagtaagaatggtgacctagggatgccagaaagattcagtcatcagaccatcctttgcttttgcttctttgggactgagatgtgatgtgttaaaccagattccwtttggctccgctccttcttagcagtgaccttgggcaagtcagttaacctctgcagaccttagtttctcctctgatgtctaacattaataatatctatgatagtgttaaaatgagaccatgtatgcaaatatgtagcatagtgcctggtatttagtgagcagaaaataactgatagctgctgcttttattatgacaatcacaattactgccattattataacgttgggtgccatacattgaccagaacaaagcaaaatctgagcaggcttccgaggtttcctatgcaggcaagtatgccctttgggtttctccttgagactgccctacacacaggacccttcctccatgttgtttgactattaaaaagaagatttgttaatgcttgtttttagctttctctccctctttttttatgtgttaaagaggatttgtttttgttytcctttctcacaggagtgattggggcagatgtgagagggcacggcctcatctgtgaggggcagccagtgaygtcacggctggctgtcatctgtggaacgtcttcttgtcacatgggggtgagtccactgagcacaaaggcaaggccaccacacagcaggaggtagcctggaaggagaccctgagtgctggcttcttcaccctttcacttctttcctcttttccctgcctgccccttgtgctttgtctagccagaagcccagctccccactctacctcccttgcttaacatttgctggatctttttccaggggccaaattcttagtaagcatgaaaaggattgagtgctccctttgacgtcaccctggccagagagcccaggcatgaatggtgacatctgatcctaaggtgacaaagtctagctcccccagactgatctgtccctaatgggtagcggggtcttctcggcaaagagtgtctgttttccttggccagggaactctctctcaatcaatataaatccatctccctgggagcgtcctgatgatctatagaattagcctgcgtatcatgacttcaaaagaacactgataagcaattttcactttgttaatttttctccatgaattagtgaaaaggctttctccaagattgcagttaaaatttagtgcctgccctaaaatttatatcttctttaaatgcatgagtctgaaagcattccattccgataagtacccatttctaccatatttttatttaaaagtcattactctgttaaacttaaatcgacgactctttggaattttcccagataagtataatagagggcagagtgggggaggagcagggagatgagcagagattagagcgggacacagcccagggcagaaccaaagcagctatggaggaaattaagtgggatgtgagactgttttgcaactgtagggacccctgagcctttttaccatcagatattctagttcagttgatataaatacatgtacttacttatcaatccctgctcttgtgctaaactgtggatataagaatgacatcggctcagtgggatgagatgaagttataacaggtattagaatataatgtgaggccccccaatgtagatacaaattgaactcatgatactaagcatctgttatgtgccaagcaatatgcgaggtattcttgcacatggcatcccattttctatggctgagggagccagcccgagtggtttccagtcccacttcctcagtttactaagtgtgggcctttgggcaaggtacttaaactctctgggtcccagattcctcatctacaatatgtagagagtgacagcacctgtcagagtgctgcaagaattaaatgaggtgatactaagtgctccacatgcrgtaagcacatcacaagggctcactcttaatcactaggactgttgttgttactgagcagaaagcaaacagtggctgactctgcctgggagggtgcagggtgatagaatcttcttgaggtgacatttgtgctggactttaaggaaatagatttccttctgtttgggctctgggcagtcttgaatggaatttttctaagtttaaaaattgcagcatatttggccagacacagtggctcacgcctgtaatcccagcactttgggaggccgaggtgggtggatcacctgaggtcaagagttcaagaccagcctggccaacatggtgaaaccccgtctctactacaaatacaaaaaattagccgggcgtggtggcaggcacctgtaattccagctgcttgggaggctgaggcaggagaattgcttgaacccagaaggcagaggttgcagcaagccgagatagtgccattgcactccagcctgggcaacaagagcgacactccatctcaaaaataataataataatttcagcatatttcttctgctcagcagcccttttgtaaggctcagctgtccctgaagggagagatctgcagaggcctgaggcctctttaagccagaaggcaccagcccaggagccagcccttctttcccttgatatgagtctacacttgttagattgtcttcactgaatactgatttaatcctgtttaaattatctcttattttcacagggatacatctaatcaggcttctcctgggagatctgaatctcaggcatttttaccccactcaattcagatttctgaacagaagcaaatctaaatggatgcaagtgtctctgtgatggcctgcttcttagtcttactgtctcttaatggagatgaggctggctttccctacccatttaatgtacacatttgggacctaaagcgtagaaaagtccagtaattttcccaaagtcacaaagctttgaagttcttgagctaagaactgaaatctaactctgattccaaagctcatactcctccttgcctccctgaattgtgcatgaagatgatgtacccatagaggaatggtgagaacatgggcttttacattgtccagaggcaagcttgaacatctgctcatgcatgttttggccctctgacctgagtgagctacttaacttctctaagcttcagattcttcatccatcaaattggggataatgatgccagtctcacagggttgttgagtaacatgcattatgtaggtttgtacctagcacacagcagacactcaaaaatggtggagattgttattaaactttcctagtgatgtaaacggctcacatgaagcaactgtttgggctttaacgagtttgatgggcagctgcagttggttgcgatgaatgagggccataaaaggccagtttatgatggctgtgttgtgctggaaataaagtccccacccccatcctgctttgtacttgggagtgggaagggaccctctgggccaaggggattaatcatcagctttaatgttatgtcatgagggtgagactgtggtcatgctggcatgggaaagtgcctttgatctcctcaggtgctgggaacccagcaacaataacacctttgtgaggtctaggagaggtgcaggtctgaggaaacactcccagggagactcaaggaccccctttgttgtggttctggcaaataaaaccgccactgtgaggaaaaattaaccaaacagaacacagggaccaaagggtgatgcgggcttttcaaaaagtggttttcagcatgatctgaaggatcctctttcttcctgtctgctyacttctgatgtttccaatttagtagattgagacaaaattcccaggaacgttttgtgcttgatccaggttgcctctttctagatcacccaaaaagaataaatgaatgaaygaatgaccacataagtgagtattggtaaatacttagaagcttcgtacctccaggttcctgttgcttccaggaatctggagaaaaagcctgaggttgaacataagacatgttaataaggcctttgatattttagaagatacaagcatgggctgcacatttatcttccttgtgggtgatttaattaacaggggaaaaatgccattctttttttaactccatgaaagcagagctgcttgttcagagttaattactaccaagtcaccaaaaccccagataatacacagcaggggttagccagaggttgaaaagtcatggggtaagatggagctgatccttgccattgtactgacatccttttcttgagctgtcaggttgggttgtaacttggcaacttgtcttccagttagcatgtcagatggggacaggaccctrggggggtcggggtagggagaaacactgaggaggtaagatttgagcagaacaatacctgaagagagctgggaactacatctgcatcttaaatcgctcagaactgaagttttttcagtcttaatattgagatagtggttctctatcattgaagggatgtggagactcaaagacataggctcatacgctgcccccaccacttactgtgtgaatttaggcaggatgcttcatctttcagtgcctcagtttctgcatctgttaaatgtgagtgatagtatttacccataaagttttgttcaggttcaaattaggccatctttgtaaatgacttggcactgtacctggcacaaaataccaaatatgatattgttattaaaaatgagttgttaatcacatgaacaatccatgtggttatggaytagaattagagacatcagtatgaactcatattgggggaacccacccccaatwtttcaacgtaggttctttctattttccgtaagtgtcagccggctgagaaataaagagaaagagtacaacgagaggaattttacagctgggctgctgggggtgacatcacatatcagtaggaccatgatgcccacctgagccttaaatccagcaagttttattaaggatttcaaaaggggagggggtgcaagaacagggagtaggtcacaagatcacatgcttcaaaggcaaaaaggagaacaragatcacatacttctgaggaaacagtacaagggcaaattcagaactactgataagtgtctatgttcagctgtgcatgtattgtcttgataaacatcttaaacaacagaaaacagggttcaagagcagagaaccgatctgacctcaaatttaccagggtgggttttttccccaccctaataagcctagggtactgcaggagaccagggcatatttcagtccttatctcaacctcataagacagacactcccagagtggctgtttatagacctccccccaggaatgcattccttccccagggtattaattattaatattctttgctgggaaaataatttagcgatatcttccctacctgcacatctgttttaggctgtctgcaagaagaaaaatatggctctttttgcccgaccccacaggcagtcagaccttatggttgtcttcctatgttccctaaaatcactgttattctgttctttttccaggtgcactgatttcatattgttcaaacacacatcttttacaatcaatttgtacagttaacacaatagtggtcctgaggtgaagtacattctcagcttatgaagataacagggttaagagattaaagtaaagacaggcataagaaattattaaagtattaattttgggaactgataaatgtccatattaaaatgaaatcttcacaatttatgttcagagattgaagtaaagattggcgtaagaaattataaaagtattatttgggaactgatatatgtccatattaaaatgaaatcttcacaatttatgttcctctgctgcagctccagccagtcccactgtttgaggtccctgacttcctgaaacaaactcatatttagtttaacatagatgcagatggatgcatatagaaatagttatggatatatatacatatacaggttagtaaacacatatttatttcctggctctgttagctgagatggtctagaaataaggatacctcaagagctagtttttacaagcacatagtgtccagatcatggtatctaataccattatccaatacaaagaaccaggactccttggagaaatagttgattttaggattggaataggaaatatacaagatgagcttggagcatttgcagtgccagaaagttaggaagttctcaacaaaaaagatgagaatatgtcacagggagccaactgtgggagctcccactagccaaaactggaacaatttaagcagtaaaatgaagtattatgaattataactcaaagtataacataaatatccataagaccatactgacataaattattttgaataaataaatcaatgaaaagaagagagacatctcccatgcagaaagattccaaataatttatataaatgttccaccatcaaggaggtggagcataactttccactccttaagtgtgggctgcacatagcgatttccttccacaaaatatggtatggaaaacgggggaagagtaattttacattggagaaatatgagaaacagcatccacgtgacaaggtcaacatcaacaatgataagtcatgttgatagtacgtacccttgatatgatgtaatgaaaatgacactttgtctctgttgtgttcatcccccaatcctataagcccagtctaattaccaggaaaacaccaaacagatcttagttaagggacatcctataaaatacttgaccagtatttctcaaagctgtcatccaggtcatcaaaaaacagggaaagtcagagaaactatcacagccaagaggaacctaaagagccatgataactaaatgtaatatggtatcctggatgggatcctggagcagagaaagaacattaggtaaaatctaaggaaatctgaataaagtatggtcttcagttcatgataatatatcagygtcattcactgtgacatatatacttgacaagatagtaatgataggggaaatgtaactggatgtgaggtatatatgatctttacaaccatcttatattgtaaaactattctaaaatttaaaatttatttttaaaatattcattaactattcactcataaagaaaacttttttttttaatttacctggctaagtgctaaaagtcttcataagataaaatgtcatgcctgccttcaaagagctcaggcacattgagaaagacagacagaaaaaggagatactacaatacaaaatggtaactactatagttaatgcatggctggagtgtggtggaagtaggaagaaggggctgtcccaagtcttgggtagatgaggaggttttcctataggaagagatatttgcaggatcatggcttccccgcccccactgagacactgttcctgccagcccaatttctgtagtaggccctttcctcagtcttctccactttgtttttctttgctgtgtccacaaagcctcacagctgacttcccctgaggcctgagcaggatgtgggtgtgtatgagccctttgggagggcaccacagggagacagcacagtcatgtattatgaactgatggtcttctgttactagctgagaagagtgggcaagtgggaccagtttctctgtcatggtctctttaacaagtgacattggcagaagttaccagaggggtggagtgggatgggattccacacggtacagtagaccactgttacacctaacaatgaaagtgctgaggtgctgctcagaaggtgcctcgcttcctctttgtttaccaggacctgttgtcgtcagccctctaggaaccagcattctcaggacactctctgtgtcaagactagctctcagactgcatgttttgaaaacaaagtatatgctaggcattgattcggcgaggagagggttgatgtggttcagtggacaatgagagacagactgtgcactcaagaagctcaaggtagcttgtttttcaagacatttgagaaacatagaaacattatgctggactgagtatgtttaatatctctgaacccaggcagtagcaccctttcctcaatcctcatgaggagataagcagtaatactacttgctaccatctgttgaccacggaccatgtactaagcaccttactaaaactttgtatcatgtaaatagctcaacaatcctaccaagtaggcaccatactgtccctcattttacaagttaggagactgaggcaaagagtggttaagtgggtcacacaatgtgtaggaatgcaacactttgagccctctggaagactgaccagagagtccttcctcctccctttcagctgtatagcttccctcaaaggcctagaggaaagggagaacagactcaattaaaagggccaaacatgagcaaatgtttgaacagacatttcaccaaaggagaaatttgaatgaaaagcactggtcattagggaaatgcaaattaaaaccacagtaagattctctactactcctactcatcttagaatggctgaagatgtgaggaactgtagctctcacacaccactggtgggaatgtaaaatgatgcaaccattttggaaaatggtttagcagttacaaagttaacatattcctactacgtgatctagccattccactcttacaaaagcatgtattcatacaaaaatttgtacagtaatgttcataccaacaaataaagctttgtaatagtccagcactggaaacaaccgagatatctttcaagagtgaatagatcaactcttggtgtatcaagagaacraaatactactaagcagtaaaagggaatgaaccataatataaggtacaacatggattaatcacacaaaataattatgctgagtgacagaagccattaattcttccaggcaacttgcagtcttttgtggaaaagtgggctcaggccagctgataggtagattccccctaaaggcttttgttcctggccttctgagatgctttgtttcacctgactttgccatgttcctggtggactttcagaaacatgaggccagatatccctgcccagcttttatagaaatggaatgtctggatcacagggtagatgtaagttttaagaaactgccaaactgttttccaaagtcactgtaccagaaacgaatgcaaactttcttgaataaaaaatagttccattatttaaattcttgcaaaagcaaactaatatatagtgacaaaaagcagatcagtagttgcctggaatcatgaaatgggcacaacaagggccaggaaagtaggatcaaaaaggggcacaaggaaagatttgggtatgtttatcttgattgtggtaataacttcactgatctatgctatgtcaaaactttccaaatcagacatcttaaatatgtacagtttattgaaagctattagctcaataatgctttttaaaaacagaaaaaagatcgattttgtatctggagactttactgaagttgcttatacacctaaggaattttaaggctgagatgatggggttttctaaatatacaattatgtcatctgcaaaccgagataatttgacttcctctcttcttatttgaataccctttatttctttctcttgcctgattgccctggccagaacttccaatagtatgttgaataggagtggtgagagagggcatccttgtcttgtgccggttttcaaagggaatgcttccagcttttgcccactcactatgatattggctgcgggtttgtcataaatagctcttcttgttttgagatatgttcattcaatacctagtttatggattgtttttagcatgaaggggtgttgaattttattggaggccttttctgcatctattgagataatcatgtggtttttgtcattggttctgtttatgtgacgggttacaccaataatagagagtcaaatcatgagtgaactcccattcacaattgctacaaagagaataaaatacctaggtatacaacttacargggatatgaaggacctcttcaaggagaactacaaaccactgctcaaggaaataagagaggacacaaacaaatggaaaaacattccatgctcatggataggaagaatcaatatcgtgaaaatggccatactgctcaaaataatttatagattcaatgctattcccatcaaactaccattgactttcttcacacaattagaaaaaactactttaaatttcatatggaaccaaaaaagagcctgtatagccaagacaatcctaagccaaaagaacaaagctagaggcatcatgctccctgacttcaaactctactacaaggctacagtaaccaaaacagtatggtactggtaccaaaacagatatgtagacccatggaacagaagagaggcctcagaaataacaccacacatctacaaccatctgatcattgacaaacctgacaaaaacaaggaatggggaaagattccctatttaataaatggtgttgggaaaactggctagccatatgcagaaaactgaaactggaccccttccttacaccttatacaaaaattaactcaagatggattaaagatttaaacataagacctgaaaccgtaaaaaacctagaagaaaacctaggcagtaccattcaggatgtaggcatggacaaagacttcatgactaaaacaccaaaagcaatggcaacaaaagccaaaatagacaaatgggatctaattaaactaaagagcatctgcacagtcaaaaaagctgtcatcagagtgaacgggcaacctacaaattgggagaaaaattttgcagtatctccatctaacaactgttcagaaatcagttagagagcctctggccttagtgtctttgggctctaaccacagaaaagccacccttcagaccatgctacgtttttagagctgtgttctctgggtgatgtctataacagcactttacagcttcctcagaacaccaaagaaaacgttccccagaggcaaagggtgtggcctgggcctggggggcccatgtttcatccaggaccatgaggcactgcacagtgtttgtttgttagaggagcagaggatgctcaaaatcattagtcgttagggaaatgcaagtgaaagacacagtgagatccactccacacttactagaatggctgaagttgtggtgataatgtggggaactggaactcacatgccactggcaggaatgtcaaatgatgcaacgactttggaaaacattttagcagtttcataaaacctactctaccctgtgatccagacattccatttctataaaagccrggcagggatatctggccccatgtttctggaaacccactaggaacacggcaaagtcaggtgaaacaaggcatctcagaaggtcaggaacaaaagcctttagggggaatctatctatcagatggcctgagcccagttttccacaaaagactgcaagttgcctggaagaatggtgtaagttcttcctctagaagtagaggacgaaaatggtgcagctgtgttttagctccctcctgattggcagcatgggttcttctcccaagggtacaagggaatggggtgggatgggggtggtatatgggagtggaaagttctggaggactgccttgattagcagcaatgacaataacagctaatatttattatatgtttatcatggtctatttggatttttttaaccctcataataaccttatacagttgtcagaattatcttaccaatttatggggactgaaactgaggctcagagagacaagtgacttatccaaggctgtctagctagtaagtcctttctttttttttaagacagagtcttgtcgcactcttgctcaggctggggtgcaggtgcgccatctcggctcactgcaagctctgcctcccgggttcacgccagtctcctgcctcagcctcctgagtagctgggactataggcacccgccaccatgcccggctaattttttgtatttttagtagagacggggtttcaccgcgttagccaggatggtctcgatctcctgacattgtgatccacccgcctaagcctcccaaagtgctgggattacaggcgtgagccaccgcgcctggccgtaagtcttacagataggtttgccactcaggcagttggattccagagctcagactctcaacaataagcagaatgatgagacacaggctgtgggatgggttgaccataaacacacgtgttttgtgggaatgaggtagagtgattacacagcagatctttcccagagcctgatgagaactgcacagttaaggctggatcacagctagaccgcagtgctttcattttccctttttcccagtcttccaaatcacttcctttcaagaagccaccagcctaatgataacaataaaaataaacaacatcacttgtcaccatcatcccctgggaagagagtatttatgagactccctatttaatcttcccctgttccctgctgcgctgtggtcaagtaccaaatttggcaatgtgaagacatgcggctgacttcccaactcatgaagatgtttttctatttgtttggagagcatgatgaaaaccacattgattttttttttccttttcctatttaccacacatctgttgtgtgggtgattctgatattgtggctgctgagggttacctggcagtaaccctcagtaagaggagagggtttgtccttttccagaagtttggtgtggatgaaatagatgatgaggcagtcatggtggagccctaaccaagcattgggtcccgtgccaagtgcctgcatgcatgagctcatttagttctacatacatttagttcagaggctttagtatttatgccttgtttttctcttagtttttcatcctcttctcctattctgtttgtgtgttccaaatgtctgttttttcatacattacatttttatatcttttgaaagtactcttaagagctgtcagaagtttgaggtagtttctactctttcacttaaccaatggttagarccccaggagaaataacagtgagatcaaagaactcagaagaaccaatgggaagctttttgagcaatcagcactgaaggaatgaaattgaaagtccctacgtaattaaccatcagtggctccctactgccaatagaaaaaaaaaagttcagatgagacaatgagtggaccttctggctgtgttcttatgggtttgggatatattgcattagaataaaaccgaagtcttaaatcctaaatgaaagttactgtcagttatactgacagtgatactgtcatgtatgttgtaaatctttttgttgaaagataatttacataccatgaaatttatccccttgtatttttaaaacatctagagaactgagtatagtgatgtttgagaaagaggagacttactgcccattttttaggttacattatgggatgatactagtgtgtggtctttattacttagggagataacagaaggatatcatacaatagtacattgccatttacttgtatgtacctgacacataataggtgtccgttaaataatagatatatacatgagcataaggacagacagaaaaataccagttagcaactgtaaaggtttgttggagaagaaatcgtgccatacctatttgatttctgttctctgatggagtgaaaggctgggcagagaaagggagatacagcatataaaccaccaagttattggtcaggccttaggttctttccttgattaactgacccttcccacatgccacagcagcattggttaagtcagtcacacaattttatctgtgcacaaccgagttgtccactgaattatacctcaaagcaggccaaaaatatatatatatatgtaaaactgattgaaaagcattaagaacaactaattgccaatttgtatttgggctgtttagttgatcgttgtagccttgtgtggcaccaggcaaagactaagccacaattctgttggttgaggaaatatttaactggaagatgcttttgaatgaatgatcagctacccaggtactatttgacatacagcagtcttggggcttccatgacttattctcctatcatctgtttgcatgataaaattacaggtttccatgtaatctttagcagatgtatttgctatgatcttggaagacagggcatagcttctctggaattaagggaatggcccaggaaaaagaagaggtgcccacagataaaatggtcagttatttttatatatgtgtgcattcttctgtggtgtgcagaacaccaaattgcttggacctgtttattcccacagactcacagtcaaactggtcctgaatattaaatctgatggtttcattctcctgataaaaatcctttgtcgataaaaaatcctttgtcaagtctcctgaatgctagctaggcatacgagatccagcattattgcccctgtctacctctgataccattccgtgctatccctcaccattcatcctgtgttctagcaggtgcatctgcacacgcttgtttgaattctatggaaccagagatgtttgagcatagagaatgaccagattttaggcagttaatactgtatatatacaatataatgcataacactgccagtgaagtttggagcagcacctgtaatcgtgcatactaatatctctacagtaaaacatatgaatattcacaccaaacaggttaagtcagctttaaatggcttgatccattcagatcagattttaccatcaaatgaattgtgaaaagacttttggtayttgaaatgctttgggttgaagaagtgtggtagacctgtacttgcttttcttgaaaagagcctgtgctctcttattcatctggcctttgggcatgttgttttccctgcctggaatggccacatctccctctgcctgttgagtagcatcattactagaatcatcattgcatatactgaggatttactatgttgttactcccagcaaattctatggtcgggggggcgggggggggtgttcttattgtattacatccccccagtgtttagatgaggaaactgaagcttggagaggtcacagagctaggaagaggtagagctgaggttgaaccaaaaagtatggagacaacaaaccttgggttcttagttactacactgtccgtgtgtgcgtcttccccaaaggtccagttcaggtgtcaccttcctaaggccctcttcccttcctccaccacgtttaatagattatgactcctctgggccttcacagctgttyatgcatagctgtggtgcactgcttctcattctctgtctttcccatgagcctaaactccttgagtagttggggaaaaatgtctacttcagtgttctatctctagggcatacagtaggtagtcaacacatagtttataattaagttagtttaaagtgatacggtaacagataacaatttgtatcatcattaaaataaatagtaaacaccaaatcacaagttcaaggatataaaatttggatttacaaaagaaaaaaatactcagaaaaaaaaaggctgctcatttttatgcatggtatgtaaagaagaggaatttggggacaacagttcaagaatgggcaaggaacacatttatacttaaaaattatgacagctaggatttattaaatacttcacatgtgacagtttctctgctaggcattctgtgtataaactttctaatcctcacaacaaatatgtaaggctaattgtcgaatccctgaatggacaaaaattatagctatataagaaagagaaagatatggtaaccatgtcttagatcagaataaaaagaacaaaaggtaatgatcctaatatattcagatttaacataaattaagcatcattagaggacagtcacataaaattgcacaatagaatatatttccacatctgagagatgatggaattgaggtcaaagagattacaggctagtatgtggtattttatacccattccttgaattatgttaacatggtaccagaagtatatcttgctgtcctcctcagaactgggtgcagttttgagctctgcttttgtaaaaagctgttagaacctgaaagaaccacataacacagctgtaatattcaagagaaagtgggtcccacgaacaaagattgagattgttcagagaaatggggtggttctgattgcttaatagaaacctcacaggttggctctattattttcttgtttatggaagtttttgtgaccgtaagagctaacttttccttggtgctttagagtttattaaacgtcttatggaatttgatgctcagaataactaagtgaatcagtcagagcagatgttttctttttttcaaatgagactcaaagaaattaagtgatttgttcagtgtcccacagctaataaatgatagggccaagactcagatatgtatctgagcagacccctgagccatgtccactgcaatcttgcaatccttggttcatcttcatttactcaaattgaaggatcctgcggctggtgaatgtctggttcattgcagaagagttcctggttccttgtctctaatttccattgtgactgtgaattctccattgagctgcaagccagtgactgtcaattaatgtgcacaaaatatacctgggtaactgttttaaaaatgcaattcctcaggcccctctcccacagggtctgattctctaagtcttgctggaagggatatatgagaatctgtaattttaacatgtgcccaggtgattctaatggaaaactttcaaaaaaactgctttaagctctttcagagtagcaattatatctttacttcattgtttccgtagtgcctagcagagcaccttgtacatagacagtactctaaatttacacttgatgaatataagagtgaagtaaataaatgtaaaattaatgtaaaatgaaggaaaacaagtttgagaatcagtcagttcctgccagatttggagcacactgaggaatccctttatctccatcctttcaaataaaatatctcttggtaggtctgggtaagacatactgagaagtcatgacttggacaaagtacctggtagaatctgccaacaattagagattgtggaattcttattttctcatggaaagcaggatggagtgaaacagtgagagatcctgtttgtagttctgtgcagacaaacccagaaaccagaacgcagacacaccaggacgcaacaggaaaccacaaaggcctgagatctttcaatgtaaataggaagtcagagtttacttccgaacccacagtgccaagctgaagtgcagtgtttaatccagctctctacccagcccttccttgagcctgggcacagatgaaagatgatgatgccacctgggtaaaagcattcaaaaatgtttgttctgatcaggtcttggagtgagcttcttttgtttgtgctagtgaataatttgggacacaggtgcactttgcatttgaaagcgttaattggtctccttggttttccctgccatgatatttgaagccacatcttcctccacaaagtaattttaatccatatacattcaaaaagcacttgtcatggacagccgtctttcatataccccatctgtggacccctgggtccaggtgcagagtagtggaacattggtgatgcttaatatgtactctgtgttcattgcattgacatctgtaatctcatttgattactactattacactgggaaataattaataggatacgatcatcaccattttgaaataaggaaaatgtagtctggtagaaaacacatggatgttaaagttaggcagatctgtgttcatgtccaaaagacttaagctttcttaccagactgctttattttatgtagccagttgtttagagcattcactctgtgccaggtactggagagaaaatggtgagcagtagacctagactgtacagtgtagtggaggagatgaatactcagcaaacaattacaaaaatgtataattacagaccttgataagtgctttgctttcataccctgctgggggaagtataaattgggcagtcactttggaaaacagtgaggcattgtctgatcaatttgactgtgcacatgccctgtactctaccaattccattcctaggtaggaagctggagaaacaattgtacttgtgtaccagtaagtgcccagagacaagtaagtacaagagtattcatagcattattttttataatagctacaaatttgaatcaactcaaatttcatcaataatagcatgaataactaagttgtattatattcatacagtggtagacatacttaaaatgtaggaactacagctacatatgacaacatagatggatcaaacaattttaagtggaagaaacaagacatgaaagagatacatacagaattatttcattcatagaaaattcaaaaagaagcaaaaaagacaatgtcttttaaaaaatgcctacaaaagcactaagcttagaaaagacaagcaagggaataattaccacaaatatcaggacactggtgaattagatggcttggaattgcaggttgttgaggttaaaagatgctttcaggaagagcttgagggaactagcatttgcttctgaaggatacatgagtacttaacagtttttttaatgttcacataagttttatacactcctctgtatgtatgatatgtaagtgctagaaagcagagaagctatcagaacatagagccaagtgccatataatttgggtggtctagaaggcaaggcagtgatgtttgagctgggagattttgattaggtaactaagcagagagcctgacggggagggagtagggttgtgcatggcagtggtcaagagaaaaaatttgttcagaaagagagtacagaagaataagcagaaggaaattggcagctttggtgtggggcaagagagaagaatgctacaagtaaaggctggagaagcaaaaaggggtagcatatgctgggcttgtaagccttctgagggattttagtcttttatgtaagagaaactgaaaggttttaagcacagtggataagataattgaattacaaaggatggaaataattccagtttggagaacaaattggcaagagacctgagtggtactaggatactaggaaaccagaagaagactgggagtctgtgtgagagatgatatcatactaacttgtctcagattatggtgggggagatgagatgtcgatatattggaaagatgtttagaagataaaatcagcagcacttccttggtgtgaaaactgttgaggctgcagggcaaacacaatagaggcttattaggtatctcacccaaactcctaagatgagctgctccccagtgagtagagatatctggagagagagcagtagtcgttcaggcattccttggacagactggattcactagagagaaacatttttggtttgcactgtcagctttgtttttaggttgttttaaatattttacccttgtctcttatgaaaggtcttctcaagaagtagccatgtggacacgatattgctttggtagtaattctgccaaaaatgcctgacttgaatctgatcatgaggaaatatcagaaacccaaattgagggagattctataaaataacttgcctctagtcttcaaaaatgccaaggtcataaaagaaaaactacaggaagatcaaaggagacgaaagagacatgatatctgaaggacatgtgtgatgctgaattgaattggagaaacttttttaaaagttttattgtaaaggacatttagtggataatagatgacattctaataagatcagtagattagataatagaattgtatctatgtatacttcctgataattgtattatggatatataagagaatatccttgttattataaaatacacactgaattattgaatattttggagtaaaaggacattatgtctgccactttcaaatggttcagaaaaactacatacatatacacatatgtgtgtgtgtatatatatgttcatatatatacacacatgtatgttcatatatatatgtttatgaacaatatgtgaacaatatgtttatgtaaaacattgggaaaatctaggtgaatattatacaataattctttgttctatttttacaactatttcataagtgttaaatcatttgtaataaaacattttaaaagtgttttttaatagaaggaagtagtcatgtgaaggccatgcttatatttggcataaccatgagttaatataccactcattgtgccccatataaaatcccacttgagaatttattttagaatttaccatttggaaaagtgttgttcaatctcaaatggtgtattttcatctttccagtaataaaagctatataatggattacatttttcttctggccctggaagccaaggaaactcagagttaaaaatttaacactcaagctaaactgttgagccttctactacatagcatatttccattcttctttttgctgtaattgtcttgcattactgtttctagtcactctgtactatattatctgtgtatgtatgtttgtgggagtggtagataaaatatctcaaactctttgtattagtttcctatggctgctattgtagcaagttgccatacacttggtggcttaaaacaacacacatatattttcttatggttctcgagactagaagttcaaaaccagtttcactcagccaagatcaagtgtcaacagggccgtactccctctggaggttccaggggaaaacctgttccttgcttcttccagcatctggtggctgctggcattccttggcttgtggccacatcattccagccttgccttctgtggtttcattgcctcctcctcatctgtggtcacatctgcctctccctgtctcttacaagaacagttatgattgcatttaggccaactcaaataatccaagattgtctcctcatgtcaggatccttaatcacatttgtgggtcctttttttttctttcttttttatttttttgccatatgagtaacattcataggttccagggatttgaacatggtgatcttttcaggagccattattcagcctaccataccctttatggaaagaagtgacatttaaatgtgttttttaaggtacataaaaataaagtattaatttatttggaaaatataaagtacttctgcactctgtgtatagtgaaggaacaaagataaaagaaatcaaatttctgtttagtgatttttcattgcttttatgaattacattgaattttctattatatttcctatttggttatttctggaatagagaaatatatttgactttttttagaaagtaaattatttgttaatatgaatgaataatacctgtgagatttccaatgaaaagaagcaaagttttatacatcaaatttgcttccaaatgctaatatactaaaatcagtgctarttatgtttaatatasgttgctgagaaaaatagttatcttttatggtttttaaaaagtgtatgttaatttatttttatcgtttatttcttactgacaaatgcaaattgtatatatttatggggttcaatgtgaattttgatatactatatattgtaaaatgattaaatcaagcttattgacatattcattacctcacatacttttttgtggtgagaacatttaaaatctactctcttagtaattttcaaatatacaatacatttttattaactatagtcaccatgctgtgcaacagatcttcaaaacttattcctcctgtctaacccaagcttagtacaatttggccaacatctctgctttaccccttggcaaccccaccctaataaccaacattctactctctacttctatgagttcaactttattaagctttacatataagtgaaatcgtgcagtatttatccctctgtgtgtggtttattttacttagcataatgttctccaggatcgtctgtgtcactgcaaatgacagaatttccttcttttttaagactgaatagtattttgttttgaatctatggcacattttcttgatctgttgatggacatttaggttgatttcatatcttggcaattgtgaataatggtgcagtgaacatgagagtgcagacatctcttcaacatattgtttgcatttcgtttagatacacccagaagtagaattgcctgatcacatggtaatttgtcatttttttgaggaaactccatactgttttacaaaatgcctgtactagtttacattcccacagatttttaaaaagttaatcttctacccactaaccttgctaaactttcttatttttttaaaatgtgcatgtattatatatgctctgcatgcattataaatgttacagtaatttttaggtacaacactaaatattctcatatggtttggatggtcagtgaaggcttctgtaaggaagtgatatctgtgatattttggttaggaaaaaagtggtccaaacatagaggacagtatgagctatatatacaagatcatatcatctgcaaattttgcttctctcttcccttctttatatcttcttttgctgttaatttttgtctaattgtgtttgctagggcctctggtattatgctgaacagttgtggtgataaaaagcattctcacatgcacacatatgtttattgcagcactgtttacaatagcaaagatttggaaccaacccaaatgcccctcaatgatagactggataaggaaaatgtggcacatatttaccatggaatactatgcagccataaaaaagaatgagttcatgtcctttgcagggacatggatgaatctgggagccatcattctcagcaaactaacacaggaacagaaaaacaaacactgcatgttctcactcataagcaggagttgaacagtgagaacacatggacacagggaggggaacatcacacactgaggccagtcggggggtagggggaaaggggaagggagagcattaggacaaatgcctaatgcatgcagggcttaaagcctagatgacgggttgataggtgcagcaaaccaccrtggcacatgtatacttatgtaacaaacctgcacgttctgcacacgtatcccagaacttaaagtaaaataataaataagcattctcatcttatttctaatcttagagggaatgtatataaaatttttccagtgagagtgatatttgctagagattaymkacagacagacagacasacasacacacacacacacacacacacacacacacacacacatttccttatgaaattgagtaaatgatcttccaaagcattcagggcaaatagcagcccatgttttaataaccctaagaattattttatatgatagtcccattccatggccatggagctctgtcactatactgtgaacttctctatggcaggaactattcattcaccattgtatccttactctgaacttctctagggcaggaaactgttcacttgccattggatactcagtatctagcacaatgcctgtaagttaggcattcactatccattcaatgaatgaatggatggatgaacgatagttaatatctgtttcattctcaaagctagcaaattctttttaagcatgagccaaaaatatcactactttccattttctttattcaatgagttgagctcattttgccgccatccttacctcctcccagcacctggtacagtcagtagtcatttgacatatgaaggaataaatgaatgagtcaatcacagagcattctgctgccagttratagactttgcccctaaagattctgaactttatttgaactgaagccaggtggttaaagatgatttaatcaggacaaaaataaaattctactctctttaatggaataattgcttrttgcattttcttcttaaagttggccattcatctccttaaagttggccactgtctttcaatttatatatgttgtccatgaattattgaaagtgattattctgaattaagccaaaattattcacaaagaattgtcttggtgtgtgactagagggttcagaattccagtattacttggagagaggggttgggtatagtggtaaacttaaagtttacctgcaaaaaaacagtgttgaatgcctgagtatggcaaatccaaaaagtaagtatttggatttattggtgaataagggagagaggttggttatcaaaaaaagagcagttaagtaggaatatgttagtagttttaaatactttatgatggctctaatcatatatgtacttcctatttcaaaaggtatttcatttcataagttagagtaacacccaatattagaatttcagtgtccagaaattgattaccttctcctgacttggaaytctctgctcaaaagcctttgatgactcttcgttgcctggagagtaaaaatttatttagccctagccagcgctgtccacctgcactcctaccatacacactctctgtttcagccacatgtaacagaatgttaccatagggctcttcctatcttggaggtttcgaacaggccccagagcccagaccacctatgcagagcttgctaaaagattgtgaaacttgtgctaaacgtcaccctgaggatataaaagaggtggaagaagtcagaggtcaagactaaggaaagaggctgaggttgatgattgtatctgagagagtagagcaaaaagtgaagacaaggaaaaggtgtgtgggtccagcacaagggagccagctggggatatcttaaaaggaatcccatccataaggttcaactagaggagcagaatgatcccagagcaggasttgatcacctgaaggccaggactgaaagggagytgtgggcagaccactggacggagagatagccagctttggacaggcaccacaccctgaggacataatgaagccagataayaacgtatatgcatcaagtgagaccttccccaggcaccttgacccctgtatggaggaaccccaaaacacccagctgtccagcaggaaaaagtagaaggaggagagagagaagccagcaagtccccttcttgaagtgtgtatacgctaagcctgaaatatactgtagctgcagaagggagaattttcaattagccaaaatgggagttttaattattataatrgagtgtacatatttactgctagaagctggcctgaggacttttataattgaagagtgtaggaatacagtggatccccctgaaatttcatcccaggaatgaggaagaacagttcgtggaacaaatttaccaaggagaagagaatagagctgttttttcctgcacacccataatggtactacagatccttcaataaaccagaacacacacaaggctggggttgtcctctcgtccctctcctacatcagcaaatctgtctctacgtaatcatgtaagactacagcttgctttaatagctcccatcttaagaatgggagggggagagcgaggtagaagaaaaaccttgaccttatatttcgccctcctgttcccccatttattgtctttgccacacagcttctcaagtgctgtataatcccattcctcccctcccactctctcttgagcccaatcagacatttgtacaaacttctccatgaaaataacccttgaccatttgtttcgggctcctgtgaccagggtctgtgttcctaaatccagtagtcctcattcagatcgttctgttggcagcattgggcacagctgcgccctcccttctcaaaacccctcacttgcatgtagttgactctttggtcccattgtctaattgctctccatcaccagtttctaaattttggaaggcgttaagcctctgcccaagacctcttccctgcccatttccccttgcttcttcagtgacctcattaagactcaaagctttaagacaccatctgtagagtatgacctccaaacatatatctccagcctgaccctgatatcctaatatatttaatcacctactcagcatttcttcttggctttctaatagatacctaaaatttagcatgtcaaaagcctaattcctctcagcccccaggaaatctcctctcactgtctttcctagaacatgaaagaacaattctattcrtacacttgcctatgtcaaaacaccttgaaaacatccttcatccctctctttttctcatattgtgctccartaaatgctgtcagttctactgatggaatscaccaatgtggaccacctagttcaagcagttgtgctccctctcttggtttattgacacagtctcctgactgtctccctgttttyaccactgggccctggattctgttctcacagcagccagggtggcctcttgaaaacttgcctcagattatgtcattcctctgctcaaaacctttcaataattttgcatttcactgagaattaaagccaatgtccttaaaaataaaagatctgttcctcttacttttcagctctcatcttctgtcccctttctcactgttcacaccactgcagctgccctgattctttgctgttcatgtaagatagcaagcacacctctgccacagggcctttgtacttgctcttatctctccacctgcatcactcttaactgcatgcttcactcactcactcccttccagtctctgctgtaatgtaacctcatcattaaggtctatccagaccaccctatattaaaataacaacacttgccttcactcactgcttaacctctctatccttctttatttttctacacacrgttatcgtcctacgctccactggactgtaagttccatgaagacagaactttgttttttcaccactgaatccccagccccttcaaagtgccttgcatgtaatagactctcacaaatagttctcaaatggagggtgcttcctaacttgctttagcctttccacatgctgttctttctggcaagagttgcttccctttaccccccgccttgttacaccccagccccaagtgagcctgttagaatcctgtgcatcctctcagactccagtttcatacaacctcctctgtgacaccrcgtgagtcagatttaattcctctttccccagaactcaaagttttcagttttattttgctttaatcaagtttgtacccttaaccactacattgtgtgtctttcagactcttgttctttcttgattttaaggctttagagatgacaaattcagcaaccgcaggtccttctcatgttgtagaattgtaaagtagctgttttttaactgcatgcaactgtatgaatcctaaacctagaattttcaatccctctattctaccgcatgtattttcatttctccttctttttctactacttcctcttcatcacaaaaaaagtcccaagcacatattatatgttattcattttcttcaaacatctttcacttaatagtttagagaaaagcccatctattccattgagtgacctttcctatgactatagaaagtggtcagtttttctgtcccttggcctgtttagcagttgaaatgcacctgacagtttgtattacaaagctaaatggtggtggccagtaaggagtttgataaacttttcatgtaatttatacataggggaaatgacactggctgttgagcacatgaagtcattttctttcttccctgaaatgctttgggggagaagaccaatcagtcatcttagtgctgcacctccatagtgagatctgcattaggtttttgaccaagaagacagtaatattttatgacaaaacttggaaaagttaaaaattcacagatgaacaaatgctttttctcattatttatctttttattctttcctatttttattccctgagaccatttgcatgaggggaaatttaatcaggatccctagttgagaacatttctattggagaaaatggaacctggatatcaaattatctcacaacttcttctgagtgacatacactgaattttatcttaaatagcttgtttagaagctattggtcaccagcttaaatagcaccttttcattataacattgcttctgttgttgcattcataacattttatttgctaaaaatgtattaactgtgtctctcccatcagttcttgagctttggagggctgtggctgtggcttattcatctctccatacccaaagactagcatrtaatagacatacagtaaaaatggaaagactatattgagctgcagtctaccctgtccaattaaaagtcagtggacatttgttgaataactgctatgtgccaggtattttgaaatatttggtgttatttaatcyttatagtgaccctaaaatgcattgttatcccttagttatagatgagagaaagtacataagtggtttacccagctagtaagtagcagacctgtctttgaatgtaacccatgtaaagcaaaattttctgtcctttctcctttattagagcttaagtgatctttcagggaccgatatgtttagctatcaactctgtaataacatgaaaaatatttatttagctgtgatcatctatttgataaattgtcagagtgataaacccaaaaggagctttaaagatcattcagcctgtaatcccaaggtggaaagatcacttgaggccaggagtttgagaccagcctgggcaacatagtgagacccttctctcttaaaaagaaaaaaaagctggatgtggtggtggtgggtacctgtagtcccagctacttgggaggctaaggcaggaggatcacttgaacccaggaatttgaggctgcagtgagccatgatcatgcccactgcattccagcctgagaacagagcaagaacttgtctcaaaaaaacccccagaaatcatccaattcagtattctaatttcagatgcaaaaattgagtcccagaagggaaaaggtcttggccattatttcttctgtcagttggaatcatgttattcttctccttttgcactgtccttacagtaattacttttaaatccttagcaagtctgattatcccctgcatggtatggcctgtgatgacctctccagcctcacgttgcactactacccctcacagtttctgtccttcatctgtggcatagaacacactctattctctgcttcctgtccctctgcctatagcacccttccctctactccttctcctaagtcctacttacccttcacatttagctcaggcatctaatatcctctcgctggaagctttcagactagattaggtggtgtatctatgtgcrtccatggtacatacctgtcatggtgcgtatccttctgtgtttgttgttagttaactggcttatgtcttccttgctgtgaattccttgaggacagatattgcggagcattcatttctatatcaccacggcctcataaagctcctcacacaaagtcagctttcaggaaattttgaaagaaataatcactcacttggattcaggtctgaagtgaggcaaacattagagatgtgatggtgttgaatactcatcgtttttgatattttgaaggctctcccatgcttgaggatccaaaggagtttaccattttgtaatgccacagatgtgtactggtgtctgtaatgctcaggtcccatccttgagcttcaccaggaacatcagtaggaagatctggcacaggctatgtggagagcctcctcaccccatgctgatgatctcatagtatctggtcactgccactaaggaaaaataaatgcctgcaggtccttttataccatgatgtaactaactataggaagtgtccctatgcaacatctttcatcttacctgaatcaaagcttcaatgaatgaagttctcttcggcccatcatcctgcaagaaactggtaggatgatggcattgggaagctataagggtgattctgacttctctgaaatgacatacattccttgtcaatattatgtcagcggaaaacttgctagccttagaaataaaaataaaggtcttatttttacattgacactttcaatctaggtaaacttgaataattcatttgatatttcagaggcttcatttcttcatctaagaacatgaggatcttttctatttatggaggtatcttgaggattggttgaagtagtgagcatgaaaggtctctagaaaaccttggttgtttagacatgttttagggacattgaaatggactgcgcatggaggaagcttcatggggggcacacctgaggggcatttcctcaatgggagagcacctttgcccttcacaacattcacacacccctcctgggtattggtgccaggctagtgccctgatctgagtccacctctgaacagtcaccctcaccaagataccccgagccaggagagccagtggagcacatctaagccaaagatgtcaaagagagtgaggagtgagaggtccaaattcaactggagaccctcaagatgagacctgttttgaatgagagagagatgaccgtgcagggtggaagcaggtctgatgcagctgacagctaaccactgctgctcggaagtgtcgacggctcaccacttatgtgttggcttttgttcctggactactcaggtggtttaaaagaccaggtgaaattgaggcaataatgaatagcttaccaaccaaaaaaagtccaggaccggatggattcacagccgaattctaccagaggtacaaggaggaattggtaccattccttctgaaactattccagccaatagaaaaagagggaatcctccctaactcattttatgaggccagcaacatcctgataccaaagcctggcagagacacaacaacaaaaaaaaagagaattttagaccaatatccctgatgaacatcgatgcaaaaatcctcaataaaatactggcaaaccgaattcagcagcacatcaaaaagcttatccaccatgatcaagtgggcttcatccctgggatgcaaggcttgttcagcatacacaaatcaataaacataatccagcatataaacagaacaaacaacaaaaaccatatgattatctcaatagatgcagaaaaggcctttgacaaaattcaacaacgcttcatgctaaaaactctcaataaattaggtattgatgggacgtatctcaaaataataagacctatctatgacrracccacagccaatatcatactgaatgggcaaaaactggaagcattccctttgaaaactggcacaagacaaggatgccctctctcaccactgctattcaacgtagtgttggaagttctggccagggcaatcaggcaggagaaggaaataaagggtattcaattaggaaaagaggaagtcaaattgtccctgtttgcagatgacatgaatgtatatctagaaaaccccatcatctcagcccaaaatctccttaagctgataggcaacttcagcaaagtttcaggatacaaaatcaatgtgcaaaaatcacaagcattcttatacaccagtacagacaaagagagagccaaatcttgagtgaactcccattcacaattgcttcaaagagaataaaatagctaggaatccaacttacaagggacgtgaaggacctcatcaaggagaactacaaaccactgctcaatgaaataaaagaggataccaataaatggaagaacattccatgctcatgggtaggaagaatcaatatcatgaaaatggccatactgcccaaggtaatttatagattcaatgccatccccatcaagctaccratgactttcttcacagaattggaaaaaactactttaaagctcatatggaatcaaaaaagagcccacattgccaagtcaatcctaagccaaaagaacaaagctrgaggcatcacgctacctgacttcaaactatactaccaggctacaggaaccaaaatagcatggtactggtaccaaaacagagatgcagaccaatggaacagaacagagccctcagaaataataccacacatctacaaccatctgatctttgacaaacctgacagaaacaagaaatggggaaaggattccctgtttaataaatggtgctgggaaaactggctagccatatgkagaaagctgaaactggatcccttccttacaccctatacaaaaattaattcaaaatggattaaagacttaaatgttagacctgaaactataaaaatcctagaagaaaacctaggcatyaccattcaggacataggcatgggcaaggacttcatgtctaaaacacmaaaagcaatggcaacaaaagccaaaattgacaaatgggatctcattaaactaaagagcttctgcacagcaaaagaaactaccatcagggtgaacaggcaacctacagaatgggagaaaatwttcacaacctactcatctgacaaagggctaatatccagaatctacaaagaactcaaacaaatttgcaagaaaaaaaccccatcaacaattgggtgaaggatatgaacagacacttctcaaaagaagacatttatgcagccaaaagrcacatgaaaaaatgctcatcatcactggccatcagaaaaatgcaaatcaaaaccacaatgagataccatctcacaccagttagaatgscaatcattaaacaggaaacaacagatgctggagaggatgtggagaaataggaacacttttacactgttgttgggactgtaaactagttgaaccattgtggaagtcagtgtggcgattcctcagggatctagaactagaaataccatttgacccagccatcccatcactgggtatatacgcaaaggattataaatcatgctactataaagacacatgcacacatatgtttattgtggcactattcacaatagcaaagacttggaaccaagccagatatccaacaatgatagactggattaagaaaatgtggcaaatatacaccatggaatactatgcagccataaaaaatgagttcatgtcctttgtagggacatggatgaagctggaaaccatcattcttagcaagctatcgcaaggacaaaaaaccaaacaccacatgttctcactcataggtgggaattgaacaatgagaacacatggacacaggaaggggaacatcacacaccggggcctgtggtggggtcgggggagtggggagggatagcattaggagatatacctaatgttaaatgacgagttaatggrtgcagcacaccaacatggcacatgtatacatatgtaacaaacctgcacattgtgcacatgtaccctaaaacttaaagtataataataaaaaataaaagaccacgtgaaatgagcaggcttgggcaattcaaagcctggaaaaaaagtggtagagagggggatttggggaagagtagatagacagaatgaggtgacacattgaaggacttcttagagaaatgcatttgaggaagaagcagccaagatggccgaataggaacagctctggtctacagctcccagcgygagtgacgcagaagacgggtgatttctgcatttccatctgaggtaccgggttcatctcactagggagtgccagacagtgggcrcaggacagtgggtgcagcgcaccgtgcacgagctgaagcagggcaaggcattgcctcactcaggaagcacaaggggtcagggagttccctttcctagtcaaagaaaggggtgacagatggcacctggaaaatcgggtcactcccgccctaatactgtgcttttccaatgggcttaaaaaatggcacaccaggagattatatcccgcacctggcttggagggtcctgcacccacggagtctcactgattgctagcacagcagtctgagatcaaactgcaaggcggcagcaaggctgggggaggggcgcccgccattgcccaggcttgcttaggtaagcaaagcagcctggaagctcgaactgggtggagcccaccacagctcaaggaggcctgcctgcctctgtaggctccacctctgggggcagggaacagacaaacaaaaagacagcagtaacccctgccgacttaaatgtccctgtctgacagctttgaagagagcagtggttctcccagcacgcaactggagatctgagaacgggcagactgcctcctcaagtgggtccctgacccctgacccccaagcagcctaactgggaggcaccccccagtaggggcagactgacacctcacacggccgggtactcctctgagacaaaacttccagaggaacgatcagacagctgcattcgcggttcacgataatccgctgttctgcagccactgttgctgttacccaggcaaacagggtctggagtggacctctagcaaactccaacagacctgcagctgagggtcctgtctgttagaaggaaaactaacaaacagaaaggacatccacaccaaaaacccatctgtacgtcgccatcatcaaagaccaaaagtagataaaaccacaaagatggggaaaaaacagagcagaaaaactggaaactctaaaaagcagagcacctctcctcctccaaaggatcgcagttcctcaccagcaatggaacaaagctggacagagattgactttgacgagttgagagaaggcttcagaccatcaaactattccaagctacagaaggaaattcaaaccaaaggcaaagaagttgaaaactttgaaaaaaattcagatgaatgtataactagaataaccaatacaaagaagtgcttaaaggagctgatggagctgaaagccaaggctcgagaactacgtgaagaatgcagaagcctcaggagccgatgtgatcaactggaagaaagggtatcagggatggaagatgaagcgaatgaaatgaagcgagaagggaagtttggagaaaaaagaataaaaagaaacgaacaaagcctccaagaaatatgggactatgtgaaaagaccaaatctacgtctgattggtgtacctgaaagtgacggagagaatggaaccaagttgaaaaacactctgcaggatattatccaggagaacttccccaatctagcaaggcaggccaacattcagattcaggaaatacagagaacgccacaaagatactcctcgagaagagcaactccaagacacataattgtcagattcaccaaagtcgaaggaaaaaatattaagggcagccagagagaaagggcgggttacccacaaagggaagcccatcagactaacagcagatctcttggcagaaaccctacaagccagaagagagtgggggccaatatttaacattcttaaagaaaagaattttcaatccagaatttcatatccagccaaactaagcttcaaaagtgaaggagaaataaaatactttacagacaagccaatgctgagagattttgtcaccaccaggcctrccctaaaagagctcctgaaggaagcactaaacatggaaaggaacaaccggtaccagccactggaaaatcatgccaaactgtaaagaccatcgaggctaggaggaaactgcatcaactaacgagcaatataaccagctaacatcaaaatgacaggatcaaattcacacataacaatattractttaaatgtaaatggactaaatgctccaattaaaagacacagtctggtaaattggataaagagtcaagacccatcagtgtgytgtattcaggaaacccagctcacatgcagagacacacataggctcaaaataaaaggatggaggaagatctcccatgcaaatggaaaacaaaaaaaggcaggagttgcaatcctagtctctgataaaacagactttaaaccaacaaagatcaaaagagacaaagaaggccattaaataatggtaaagggatcaattcaacaagrgctaaccatcctaaatatatatgcacccaatacaggagcacgcagtttcataatgcaagtcctgagtgacctacaaagagacttagactcccacacaataataatgggagactttaacaccccactgtcaacattagacagatcaacgagacagaaagttaacaaggatacccaggaattgaactcaactctgcaccaagcggacctaatagacatctacagaactctccaccccaaatcaacagaatatacattttttccagcaccacaccacacctattccaaaattgaccacatagttggaagtaaagctctcctgagcaaatgtaaaagaacagaaattataacaaactgtctctcagaccacagtgcaatcaaagtagaactcaggattcagaaactcactcaaaaccgctcaactacatggaaactgaacaacctgctcctgaatgactactsggtacataatgaaatgaaggcagtaataaaggtgttcattgaaaccaacgagaacaaagacacaacataccagaatctctgggacatattcaaagcastgtgtagagggaaatttatagcactaaatgcccacaagagaaagcaggaaagatccaaaattgacactctaacatcacaattaaaagaactagaraagcaagagcaaacacattcaaaagctagcagaaggcaagaaataactaaaatcacagcagaactgaaggaaatagagacataaaaaacccttcaaaaaattaatgaatccaggagctggttttttgaaaggatcaacaaaattgatagayygctagcaagactaataaagaagaaaagagagaagaatcaaatagacgcaataaaaaatgataaagggaatatcaccactgaccccacagaaatacaaaccaccatcagagaatactacaaacacctctactcaaayaaactagaaaatctagaagaaatggataaattcctcgacacatacaccctcccaagcctaaaccaagaagaagttgaatctctgaatagaacaataacaggatctgaaattgtggcaataattaatagcttaccaaccaaaaagagtccaggaccagatggatttacagctgaattctaccagaggtacaaggaggaagtggtaccattccttctgaaactattccaatcaatagaaaaagaggttatcctccctaactcattttatgaggccagaatcatcctgataccaaagcctggcagagacacaaccaaaaaagagaattttagaccaatatccttgatgaacattgatgcaaaaatcctcaataaaatactggcaaaccgaatccagcagcacatcaaaaagcttatccaccatgatcaagtgggcttcatccctgggatgtaaggctggttcaatataggcaaatcaataaatgtaatccagcatataaacagaaccaaaggaaaaaaccacatgattatctcaatagatgcagaaaaggcctttgacaaaattcaacaacgccttatgctaaaaactctcaataaattaggtattgatgggacgtatctcaaaataataagagctatctatgacaaacccacagccaatatcatactgaatgggcaaaaactggaagcattccctttgaaaactggcacaagacagggatgccctgtctcaccactcctattcaacatagtgttggaaattctggccagggcaattaggcaggagaaggaaagaaagggtattcaattaggaaaagaggaagtcaaattgtccctgtttgcagatgacgtgattgtatatctagaaaaccccatygtctcagcccaaaatctcctcaagctgataagcaacttcagcaaagtctcaggatacaaaatcaatgtgcaaaaatcacaagcattcttatayaccaataacagacaaagagagagccaaataatgagtgagctcccattyacaattgcttcaaaaagaataaaatggctaggaatccaacttacaagggatgtgaaggacctcmtcaaggagaactacaaaccactgctcaatgaaataaaagaggatataaacaaatggaagaacattccatgctcatgggtaggaagaatcagtatcgtgaaaatggccatactgcccaaggtaatttatagattcagtgccatccccatcaagctaccaatgactttcttcacagaattggaaaaaactactttaaacttcatatggaaccaaaaaagagcccgcatcgccaagtcaatcctaagccaaaagaacaaactggaggcatcacgctacctgacttcaaactatactacaaggctacagtaaccaaaagagcatggtactggtaacaaaacagagatatagaccaatgtaacagracagagccctcagaaataacaccgcatatctataactacctgatctttgacatacctgagaaaaacaagcaatggggaaaggattccctatttaataaatggtgctgggaaaactggctagccatatgtagaaagctgaaactggattccttccttacaccttatacaaaagttaattcaagatggattaaagacttaaacgttcgacctaaaaccataaaaaccctagaagaaaaactaggcattaccattcaggacataggcatgggcaaggacttcatgtctaaaacaccaaaagcaatggcaacaaaagccaaaattgacaaatgggatctcattaaactaaagagcttctgcacagcaaaagaaactaccatcagactgaacaggcaacctacaaaatgggtgaaaattttcgcaacctactcatctgacaaagggctaatattcagaatctacaatgaactcaaacaaatttacaagaaaaagcaaccccatcaaaaagtgggcaaaggacatgaacagacacttctcaaaagaagacatttatgcagcaaaaaaacacatgaaaaaatgctcaccatcactggccatcagagaaatgcaaatcaaaaccacaatgagataccatctcacaccagttagaatggcagtcattaaaaagtcaggaaacaacaggtgctggagaggatgtggagaaataggaacacttttacactgttggtgggactgtaaactarttcaaccattgtggaagtcagtgtggcaattcctcagggatctagaactagaaataccatttgacccagccatcccattactgggtatatacccaaaggactataaatcatgctggtataaagacacatgcacacatatgtttattgctgcactattcacaatagcaaagacttggaaccaacccaaatgtccaacaatgatagactggattaagaaaatgtggcacatatacaccatggaatactatacagccatgaaaattgatgagttcatgtcctttgtggggacatggatgaaattggaaatcattattctcagtaaactatagcaagaacaaaagaccaaacaccgcatattctcactcataggtgggaattgaacaatgagaatacatggacacaggaaggggaacatcacactctggggactgttgtggggtggggggacgggggagggatagcattatgagatatacctaatgctaaatgacgagttaatgggtgtagcacaccagcatggcacatgtatacatatataactaaccggcacattgtgcacatgtaccctagaacttcaactatagtaataataaaataagaaaaagtaaaaataaaaaaataaaagakaaatgcatttgakgcaaagcctcttttcctctgtgtagaactgatgatggggtaaaatagaagaaaccacacatatacaccctgatgctgatctagagcccagtagctccagagagctagggaaggccccactctgtgtgggacatttatgtggcctgtgaccacaagaaccgtcagcagcagaacaggtgatgagcatttgttgagtgaatcaaaacagaaatgaaccactgtgcaggttcagctgggttcccctgaatgcatccttgagagggtcctcagtgtgtttgtggacatctagttacaaggcaatcaacatataaatggggatcatcttcccatcgccttcaagaaaaacagaattctatttctgcatgtcatgaagggttctttaggatctgacacatacctgcccttccactcagaggtctgacattttattttcacatctgctccgtggctgcctgtctttgggcaagttacatraccctgctaatcctcagttccctcatctttaaaatggggataaagatacctatctcaccggcttgtgataattataaaatgagaaagtgcaaataaatccactgtcttttcatcacacatatgccaatccagcatttgtgatttttaaaaattcttactgtatagtttacctttcagccaaaccatgccttcttcaagctgatattatactaagaacttttatctttattgaggtgcttatcagaatatcttgccattcttgcattaactgttagatatcccaactgcatgggaaacaaggacaagcacagtatctttttcatctctctttttcacaggacctgacacatagaaggtgctcagctgaatgtttgccgaagggtcatgtgaagtgtctctgttctggagaatcttgattcccaagagccccagataattcctggcccctactctcctatcccatattaggcagctactctgtgtcagaaactaagccaggggctctgcacaaaaggctgtagttcatagctctgcaaccctggggggcagctattatataaactycttacaacaattaacacaaatccctcaagtgtaaacatctgatgtctctttaccttcaacccactagggacacaaattgagaacccagcaaccctcatctggcatggaaaacttaagacctggatttcttccacctgcacctgctgcgtttgtagccatcccctcccctcttccagcacctttgttgtttgtatcttaccaggattaaccatactagtctggactctgaactcagaaacatgtagattaaacatttcctagcttaaaaaaatagagtgcagaaagttaaatagttagctctcacatgttgattatttactatgtgaaggcagtatgtagggtttgtctaacattgcctccaattttcccaaatatccggtaaggtgaatattcttgtctgtcttttacacgggaagaagccaagattcaagagggcctcataacttgctgcatggatctgtgattcctgacctgggtacaccccaacactgcttcttcctggcaccaggcacccaaggaatcagttccactagcccccacgcctcagcaaccagcactaggcatggaggggtgcttcctcccaccaaggctgagtgctcagtcacaccctatgagagcaagccaatgaaatggaaaaatagctcttactcctgactctgacatctgccctgcaggtgagagccaaattctcaaattgccaggccaatggcaaataagcccacactatgcacagagggtatcaacacaaagagggttctgygggaattcacacatcctggaagccaggctgaccctggtagacagtttcattttatcttgtctcagccacatgatgagtggagagagagaaggaaagtgcacagatctccagaaatggggtttgggttcactcttgagaatacccctgggcagtactctgacccttgggcccctctctgtaaacacacaagaacagctaaaatgtctggaaaggggaagggctggttccactgatgcccctgcattcattgagtttcctgcttcccaagtagctgagaggcagctggatataaaaggaacaggctttggagtcagacccagatcaaatccccattctgctacttggtacctgtaggacaatgagcaaggctttgaccttctgtgagccatggtttatctgtaaactaaaggaaatggtagattatcatgaaaattatagataagaatatgaaacagcacatagtagctgcttggcaaatgttagttgccttccctcccttttcccccactgcattcatttgtaatgcctttttttaaaaaaaaatgacagtaagagcaattataattggcacaggttgctttatgagctaaatatgttacagatcaataatacacaatctctggcctggcgcggtggctcatgcctgtaatcccagcactttaggagaccaaggtgggcagatcacaaggtcaggagttcgagaccagcctagccaatatggcgaaaccccatctctactgaaaatacaaaaaattagccgggcttggtggtgagcaactgcagtcccagctactcgagagactgaggcagaagaatcctttgaacccaggaggcagaagttgcagtgagccgagatcgcgccattgcactccagcctgggtgacagagtgagactccatctcaaaaaaataataataaaaaataaataaaaaccacaatctctatttaagccactctcacaggactgactgtaccctatatcatgtcatatatttgacagacagttgcttttcttccttttattcttctaaagaagtccagatgagccccagatacaggttcataccctagatagcctattccaagggttaaaatcaggcctgcttcacatcgaaggcattttgttatgatctgttcataacaaaagctgcctcctggctgttgcctgcagctgaatactgttactctgaagccatcatttcatttgtttctgattgttctgcagtgtttacataccttacatattagcgtgatcttttatagagtacaggcagaggttaagccctcccggatccactttccctctgagggctctttcttcttttttactgtcccttgcctctgtgttacaaaccatttctcttttatagaaattcatttaaatagaaaaacaatttttaagtgttttcttttttttttaacatgaggctcacttaacatttttagaaaatgttgaatatggagaagagggaaaagataccaccaaaatgtgtgattttttttttcttttttcctgacataggaaaatcccattacctctcttgaatttaccaagggacatattccatttagggcatagaaggacctgggctgcctccagacctaatgtggaagaaggtgctgtctgcctgctatttccttgcttctccttatttcaatcttttttttttctccaaaaaaaaaaaaaagtgwcttaggaaggatatggacttgtgagtcagatttgggtctaagtcttggttctgccctatgtgtaatcccaggaaggaacttgagttgattttctgaagctcagtttccttttccattaaaactgggagtgactcaggcttgcctagtatcttagctggaagaatgtgtgtgaaactggcccacctttcacagataggtcaccctgctgattgcagtggcttccaggcacccaggcctgggaaagattcacaggcctagtccagacctggcaggaaagaggctgtgagcagttctgcctgccgcagatgtgctggcacatgtaccgccgtgtgctgccccaggtaacatatcaggcrgctagggaatgtaggctttcagrccctctctcttcagttctcttctgctgacttcctcccatccagccatcatactttcttaatcctctcatcaatcccctttgttatagagaagatggaagggttaaattccttcaccctcatcacttccactgatatttgataaacacctctcagttcataatacttttgcactcaagcaggggagctacccaggtgtctatggaaagttttgaattctttttgcctattcagtttagtcttctcattttctatctggccagaaatggagaaagtgttttgaaggtcaggattcttcaggtctagacttgtagggatgtatcctgaattcctctgagctaagcctgagaagcacaagtgggttctattgggaaacacttccaaaaggcaatgattgatgcttatgcmcagaaattctgacttttagtaaaagatgcttggatataaatcaagcaggactctccttgcctttatacaatatgcggtaaacagggtaaatcctcaattttacttatgcccactgacagatcttacaagtagaaattaacccatctgagtgatcgtgttgattctttctccctcttctctagagccattataacctctgtaccctacttcagaattctaatcaagatagtgtcaagtcttttaaaaaaaagttaaacccccrcatgagctccaatccataaataagaaactcaccctggcttgtatggaggtgatgatattaacacaggctacatttctctgggtcactgaatgtacccggcactgtaccaaggccagtaatagactgtgccacatttaatctttacagatctgtaagagaggtcttatttgtcccatttttcagatgaacaccccaaagaccaaggtcacacagcagagactctcggctggagactgccctcaggcatccttttaacggaactctaaagtctgcaggagggagccatttttcctaccagccagtttagaatcaaaaaagagcattggttttgccgtattagagaactaattcataattagtactatgctcactcctggaggatttgacagaaatagaagatatggttctgactcaggatccacctcactacgtgatgtcagagcaacagagctaagactgcaactgatgagtattgtgcagatggagcacgctacctcctcgttagctctctcccctgcacccactctgccccacccactcctcctcccttgcgtgatccatagaatagaccaatatgtgtttacccaccacagattgtttggattgtgaaaaatgcatgatataattttatatctttgaaggcacacagctctcagagctttcaaagctgaaaaccagtctgggctcactggagccagttaggcatttgtatatagaaggccaagtgtggcttcttgtctataggagagagaaaatgtggaggaacttttggaaggcttcagagtttttttggctattctctctctcttgcaaagcaatctgggtgcattaactataaatgaatgagaaacatatggattaaattttatctgtgatcacatatgagtttcaagaatgataaagaataaggaattcagtgtttaaggagtccagaatactttgcaagtaattcaggatattgcaggcaacatttggctgcctccctctatccaaatttgaggactgtttggtagggtgacagacctgctcagtgccctccccacccactcagattgctaaacctcaggagatacctgtggataggttttgtgtgtatcttgttttgctgagactgaaataaagagattgggtttctaggaaaggcaaactctatgagaacactcttaaccactttgaaacccccaaatagaagaggaaaatttggtaagcccgatctttattaaccatgtcttgcttacagataatattagatgtgttttatatcctattattgcccttaatgttagtgtcattgtcctgttaatgataatggtagccatgtcctgcacttgtgtagtgatctaatttacaaacaggtacacattacctgttaatacacattacagatgtatttgtagagatgtacacttacaacatatgcagagtatgttatgacaagctacaatacaggaattacagagttaagtgaagatgcaggcaggagtacctaacccagcattgtggtagaagtcagggtttatggaaggcttttcagaggagataacattgagttcagtcctacacatgttcgtttgtttgtttgtttgtttttgagacggagtctcaccctgtcgcccaggatagagtgcagtggcacgatcttggcttactgtaacctccacctcctgggttcaagtgattctcctgcttcagcctcccaagtagttggtactacaggcacgtgccaccacacctagctaatttttgtatttttagtagagccagggtttcaccatgtcagccaggctggtctcagaactcctgacctcccagtgatctgctggccttagcctcccaaagtgctgggttatgcatgttcttaaaagaatatgaataagtaagtggctgggtgcagtggctcatgcctgtaatcccagcactttgggaggccgagacgggcggatcacttgaggtcaggagttcaagaccacctggccaacactggtgaaacccatctctactaaaaatataaacattagctgggcgtggtggcatgtgcctgtaatcccagctacttgggaggctgaggcaggagaatcacttgaacccaggaggcagaggttgcagtgagccgagattttgccacttcacttcagctgggggacagagcaagactcaaaaaaaaaaaaaaaaaaaaaaggaatatgtataagttagctaggggaaagcgagagggagtgccctctaatcagtgagacaagaatttatgaacactaagagttgagaaagaaaayggcacaaggggaatttcaggttcacttaagtctgaggcctagcttrtgatgggcttggtgcaataaaaatgatgggggcagaggattgggaaatgataacataggggatttcaggagacaaaaaggtaaaagctasatcagacagtcccatatgtcgtggcaagctgctcaaggactttagtaaggagaatgatagaattaaatttgtgtattagaaagatcattgtggtggaggtatgaaagattctctgagtgacgcttaagagagtacaggatggaggacactatttgggtcagggaaacgagtttaatccagtttcatcacccttgtaataatccaagcaagaaatgatgaagggctggactaacgtagtggcaatagttggaaacaggaagacttgtgtttgaaaaatatttgacagagcaccgtgacctactgtggggcagatgagagcgatgaatgatcaggaagtcaagaatggtatcctgagacagagatacttctgacatgtcaaaaatataacgtgccatccttcatcccagagctacagaacaagacatgtcgattagccatccaggtcaaaggttccatgtggagctcaggagcaaggcctgagtgtgggataaaaattgtcattgcacacataggactggatgagctgaccctaagagatgtaggcagtgagatgaacataggagagaatccaggagggaagagaaagaagagcctaccaaagagacgaagctaataatgagtagaggctggacctgcacccagctctttggacaccaaacttttccaccgtcccagaaagttgcagaattaagccatctgtggcttaacatgccttgagagcatactgtgtcctaggatctttatacacattaccccatctaggacttagacacagctctgtggttaatgagatgatccccatcgacagataaggaaactgagtctcaggtcagcaaatgacctaaccagaaatatccaagtttgtcagactcctaagtctgtgctcatgttactaaaccatgtttctgcctttaagataagatatggctcctcactatttcctgggagaggcagacattaacagctatttacaattcaatctgagaaatgtagaaataaaggtgaatgctgagagcccccattcataaacaaaattctctatgcttttttttttttttttttgtaccatgtggtgatctaggagttggctggattgtgtataaatggtttttctctagtaagacgatagcaccgtccatttggagggtgagatgagccaccatggaaatacccggtcccacacatgcctgtggctaccctctaaaattcccaacctggccggaggcactcaaaacaaaacctcctgttccctcccaggacgactggcgcctggagcctgccttttgcccctgccagaggcttaggccagcctcggagtgatggcgttgcagggaggcagaacaaacggagctggagcagctccccactctgagcccagtcatctctcccagaagaggtgtgagcaggcttctgggctttgtcaccacagggaaactcggctgacgggcacattgccttagatgaaactaagccaatggcatgcactcatggagccagcttgagcrtagacaaaaagagaggcaggagcacatggaaagaggcttctaatcccagctccatcatttctgatctttatgatcctgggcaatttgcttaccctcttcatgcctgtgtcttcagctataatatgggctgactgtgtttgactctatagactgtcagggtaactctaagtctgaatgcaaatgtacacctacaagtcacttgatatctgagttatgccccagcccatactgaattccaagtccccctagattataaacttcgggaggacggagactacatcacttattggctctgatgtctgtctttctatatcttttcatgtttaaaacagtagtttgaaatcagtgtgtatccaataatatttactgaatacttaatcagctaatgtaagatgttttagatagtagccattaaatacaactcatgaagttgacagaaaaacccacaataatcttggccacaggttatggagcaaagcaagtactaggggtactaccaacagagcaaagtaagtrcttcaagaagccccaggagttagcccaagacaatcccatgaagcccaggccatgtgagggcagagtctgtgttgaaatagctagctgaagagttctgattgaccagctgggctagaacaactcagcttcatgaaatcttagaaaacctcaaagacaaaagagatattaaatatttctagtccaatcaattgattttatagctaaggagagttagttatagagagagaaataagttggtggttcataatttggatcctgaaagccctcctcttctatttactagctatttgacctcctgcagcttctatttcctcatctgtgaagtaaatataataataggacctctctcattgggttgtcatgagtgttaaatgtgataatatatgtgaagaacctagaagagtctgtagcatatgataaatgcaaataactcttagcaatgactattttattatttctatatgatttattattataattgttaactgatttaaaggctcatttcagtgggttttttccccaaccataattgttttaaaattggatttttgagaatcagtaggatctgttgatgcaaaactatacccatccttcaaaccatgcgatcttttatttaaagtaaaatgcagaactttatatggggccccctgaaatcaaaatgtgtttacagcttcatgactctgagccttgtctacatgactgtttctgcccgggctgcccttcctctctgcccaagcaagtatgtcctcctcgttcaaagccttgcttcaaggtggccatctctgtgaaatgctcactcttttcccaggcagtgagttattccttcctttgggctcgtactgcactcctctcttacctttttgtagcacttgccatgttttgttgttatttttttatttctacctggctgccctgtcagattaggaactccctgaggtaagcgaccatgccacttcattagtagtagtagtaatagtaatagtaatattttgccttattgttatagctttattgagctcagtgtctgacatacagtatgcaaccaaagtttttattactgtttttgaagtttttataatgatatttatatcagacacaargagtacaccagatgtctaagtacagtttaaacaaaataccaaaatgaacaccagtattcccaccaccaaacctgtgaaagagaatattgccaataccttttaagtgtaagtttttaactgtgtgagtaaataaatgttacytgttttcttaattttgcttagtgttttagctctttgaggtaattttgaatcttgatttgaacatgtcccataataarctatttttccaagtgttagcatctgaaaatataagcttttcttctgtatcatcttctactccattattaagcatattgattaaaccaagaccaaggacaaatctagagacccctttacatggttgtgattactattgcctgtggttgttcagccagtcacctgactattccatcatacaagcctcatttcaaggagagctaacgtttatttggtgtttaacatataataaaccattgatatgtgacagcttacttaatctttacaaaagtcccccagcattcatgcattcctcccattttggagttgaggaaactgaggctcagaaaggctaccttacgtaagatcrcctagctgagaattgggcagagtcaggactagaatcacgatgggcctttgtcccgacccatagtttctcttctgttgttcactggtatatcagggaacacttaatggaaactttttagaaatgaagattccctaacctacttgtcatcaaggccagaaggttatgttcagtttgagtaagtctgtgttggctctaatggcccttgctttctgctcttcaaaacagatgaaagactcaaagaagtaatggtagcctaaaattaagactataatttggcagagacaaatatagaacctgatgcctgactgctttcagtttttgtaacactgggcatgttatttaactctctgcctcagtctacatatctgtacaataggaataataacagaatttttaagtgatttaatacctgtaatatgcttagaatcaggcctttactaagtacacagtaagtctcaactattgttgttgttgccaacagtgccgttattactgggaagtcagtgtcctgcatggacacctgtcatcaatgtagtatgatgagctccccttctttagggtcatggagcagtctccaggccaagacagccatcagcatggaaggggctttcacaaaaagatttttaaatatttaggtttgttgcaaaagattaaacaacacataagtacacaagtgtacattctttctctctctctcaaaacaaactaggaattcctagattcttctaagaacacagggtttgagagtgactagaagtactctttgtttccttgctttacacaggatgtctgaggagaagcatgtgctattccagatgagtgggcacaaacagaggtcaactcaaaactttctccctggacagagccaagcaaaaccattctctgacatttctgagcagcaaagcagcaaagccacaatcttctaatgaagtcttgctgcagctgatgcagtaacatccccaaattgtgggacaggggatggggagaagggaggtgaagtgtatccttcctaagcaatttatgcatacaagtaaagagcattatcatagagtttgaggtcaacatctgcctcagttgaaatcccatcgtggtcatccatgtactaaccatagacaacttacacaacctcttggggactaatctgtcaaatggggccaagagttctggaggcaaggggctgcaagacacagaaagagatgacttggctttggctctacctgtgcaaaccctgggtcctaagtggtaatgartatggactgcctcattcatctcaaagaagctctgggacttaggaaagcaatttctagaattggcacgtgataaaattttcactgggcaaagaaaggcagagtggtgaaaataagtaccagttagtatgctctccttgtggctggaacattcaccatagctcactcgtgcattctttctctctcatacacacaacactcacactcacccacctgaataatttccatgcatgttttaaatcttaattcatgtaccatttccttggagaagcattccctgtcacctagactgaattaggtacctcccttgtgtgctctcttactaccttttggctttccctcatttacttctcacagttggtaattacatatttgtgtaatgatctgattaatatttttcttaaggtagccagttgccccagtttggctgaaactgaggggttttccagaaggcaagactttcagcgctgaaactgggaaagtcctggccaaacctgcgtaattgttcactctggtctgcttccctctcaagatcggatgctctttgagtacaggcactatgctcttgttcaccatttatctctgtgcctggcacagacctggactgggaactcaggaaacatctgttaaccagtaaagaagtaaatgtatatgttaatctaagctgaacttacttttcttatgaaagcctatcttttttctccctgaaattattctattttgatgttaaaatatcccttttgaaaaactgtccttatttgacaaaatttaaagttcacaatgttatgctgtttttgttttttgccttccttcccccccttcccattttgkggttggaaatcctaytgatttgaggaatcacttgtttagtaaagagagaaccggggtagctgaggtcaagacaaataaggtctgtccccatgctaaaatgctagtaatcacttctgtatcctctgggcctagcacattaccaagcacatagtaagggctgagtaaatatttgtgaaatatataaatgaatagattttctgcccagcctcaagacctgctggaatacarcttgtatgcctaactcccttttcttccctaccctctagctaaacatttctgtgaccataaatgtgacttcagcattccttactgctgaatagatgagaarcatgtaccactgcagatgaatgaacacatggtctatccccacctgttctagttcatctctttaaatgctttccttactgttgaagggactgctatggtctgttaaaaaataataataataataaaataaaaaattttwaaaaaatggcactatcttgattactgagagcacctctcttacccacatggctttgttcaagctcctccctctacttggaacacctgtttcactttagcaaaatcctactagtcttttcaaacttagcttatgtccctttctctaagaagccacctctgtacccttccacttgtcaaaagtaaaatgagaacaagttagggaaaaatttgaaagttttctatcttacaaaaagtaccaattgccatcagcaagacttcaagtggtaagaagctcaccttacggcagttacagtgcagtttatgaagcattaaggagaaagtattttgacctttttagtcattggctgttatgtattaacatttttttttcaggggaaacaggactgtttaaactgatttgtctatagttgattgatttaattttcctgaatcatgctgacaaggacctaaagcttatgttttaatttcatcaaatcatgctgacagggagataaagcttatgttttatgctttgtttataatgagagctagcaactcagggaaatcagaatgacttaagttttaccacttgactctgggcagttggccttggggtatatatctaaatggcggcctctatctttgtataatctttagtacattcctcacctcctgtgcccatccacaatattttgtattttgtctttaccatctcatgaaccacactatattctatttgtctatttttttgtatagctcctccactagatgggagcttcttgaaagtaagaactctgattcatctttgtgtccccagcacccaatagggggacaggattgctattaggtagcagtacatatttgtaaaaggaaagaaatctatcagttattatagtcccccaaatgctaagttacagacaaatagaaaaccttagtgacaaacaacagtagacatttatttttgctcacaagtttgttggttggctaggtgagtctgatgatctgggctagtcaatgctggtcacctacaaatatttgctgatgttacctgggttctttcatatatgtgggacatcacctgagacaactgaacagactcagctctgttgcacatctcctgtcacccagcagccttgtagggcatggtcttgtggccaagtttgaggagcraaagacagaacagaagcacacagcccttttgagacctaggcttggaaaactgrcccagtgtcacatctgcctcattctcttggcaaaacaagtcacaagactggcayagattgaaggggtagggagatagacccacatctcaatgtgaggagctgcaaagtctcattgcaaagagtgttgacacaggaagggtggagaatggggaccacctttgcaatctctgccatagtgagggagccaacagggaaacaccttatcagtttctttccaaaatgaccatttttattaccttaacatttaaatgaatttatcaggaaagtttctaaaaaaaggagccatggcctttcttgggagagagtgacttccccaccataaaaggcattcaataagaagctgaattccatggtcatagaaatattaggaggagaacccttcccctacccctgagagtcaatgttttcacatattttccatctttctttccagatcagcaaagacccgatttttgtaccaggcgtctgggggccttatttctcagccatggtacctgggttctggctgmatgaaggtggtcagagcgttactggaaaattggtaagttgacactttctcaatagggtcatggatgtttttatgtcattgattagtccattttgtcacatgacccatatacccaatatctggaggatttgcagacccctgaatcggggtgtactttctcttagtgcacagcctaacatgtcatacacatgcagcatatattgcttaaggaagaagtgttacagcaggcagtgatgaccagcccttcttctcacctgatctttccttacatcaatccatttttctcagagtgatgagaatgatattctacttagagaaaacgacatgttactccccagcccaaatccttcagttttccccatagccccttgagacatggctcagataatattctggctgcattatacacttcatggtctatcccctccagtcccacacatgtgcctgtaatttacactaggttgctctcctcacagcttctccatgcctcctgtcattgcacttctctgtccctttatacaggcttctttccctgcttggggagttctttaccacctcaataattttacttgtcctttaagatccaactccagctcttagcacactctgttattcttattggttactaatccccttttctagaacactctgagttccttaaagacaagggccatgcggtacacagtggctcatgcctataataccagcactttgtgaggctggggcgggcagaccacctgaggtctgaagctcaaggacagcctgaccaacatggtgaaacctcatctctactaaaaatacaaaaattagctgggctcgatggcrggcgcctrtaatctcagctactcagatactctcctragacaggagaatcacttgaatctgggaggcacagattacagtgaactgagaatgcaacactgcacttcagcctgggcgacaagagcgaaactccgtcttaaaaaaaaaccccacaaaataaagacaagttctctttgtatccacctcagtgccaggttcatagaaggtacttaatacaaacttgttgaattattaaggctgtccaataggggagagagaagattcataaaagtgagatgagtgctgtaacagaagtacacggtacagagttggcacaaagctaggttaggaaactctttacaggggagaaggcattggtgctgagccttaaaagataaataaggacaaaccaggtaaagaagggtacagatagtctacttggtaggaaacttgtatgggaaaaaagacatggaagtgaaaaataacggctaatttgagggtaatggcaaatagtccagaagttcagctgtggcacaaactattcttagaaaaatggcttacgataaaagttagagagtagggcagagaccacatccctgtaaaacatgctaaggaattgaacttcgtctagcagaccaagaggaaccagtgaaaggttagaagagtatgtggacatgttcataactcagttgtaaaaatctctgcttagaagccatgagggtaaaggcctgaggacacatggccagaggcagggagactagttttagtaggttagtcaacagacaaaaagccacaaggacttgaatgaggacagtaataatgatgactgggaattgaggtcaagagattggcaggcttctgagagatcaaatgtggaatacagagaaagtgagacctaggctcagttacacacactcacatttactgttaaattggaaatatctgcttatgttatgatgtgatttgcctaccaactcttctaaatgttcagccaattggaaatgatcttattcaaagctggatgtatatgcaaatatctgtgagtttacatttcttagtataatcctattttatacatgactgcctcaaattctctttcaaagtaaatggaagcataggtgggtagatggattcaaagggcatgttctgtacgttactgttgtgccaggctacagaaatgaattaaatgaattggacctcatcagtccctggttttaaggagctcatacttggatggggaatccctgagtatgaaataaatcatgtttgattggtctcagtaaccagtgctagaaaagttgagaaggaagacatcatctatggctacagtacagtagaaatgcagcccactttatattctcctatttaaacttgtgctatgtacttagtcaacttattttattttactttcagttccgggatacaagtgcagaacctgcaggtttgttacataggaatatgtgtgccatggtggtttcctgcacctgtcaacccatcatctatgttttaagccttccatgcattagcaatgtgtcctaatgctctccctccccttgcccctaactccccaactggccccagtatgtgttgtccccctctctgtgttcatgtgttctcattcttcaactcctgcttatgagtgagaacatgcagtgtttggttttctgttcctgtgttagtttgctgaggatgatggcttccagcttcatccatgtccctgcaaagagatctcatgcctttttatgaaggcatagtattccatggtgtatatgtgccacaatttcttaatccagtctatcactgatgggcatttgggtcggttccatgtctttgctattgtaaatagagctacagagttccaagatggccgaataggaacagctccagtctacagctcccagcatgagcgatgcagacgaccagtgatttctgcatttccagctgagatactgggttcatctcactggggcttgtcagacagtgggtgcaggacagtgggtgcagcccacagaccgtgagccgaagcagggcgaggcatcgcctcacccgggaagcacaaggggtccaggaattccctttcctagccaaggaaagccatgacagatggcacctggaaaattgggtcactcccacacggctactgcgcttttacaatggtcttagcaaacggcacaccaggagattatatcctgcgcctggctcagagggtcccacgcccacagagccttgctcactgccagcacagcagtctcagatccaactgcaaggcagcagtgaggctggggtaggggtgcccaccattgctgaggcttgagtaggtaaacaaagtggcctggaagctctaactgggtggagcccacctcagctcaaggagacctgcctgcctctgtagactccacctctgagggcggggcatagctgaacaaaaggcagcagaaacttctgtacacttaaacgtccctgtctgacagctttgaagagagaagtggttctcccagcacagggattgagatctgagaatggacagactgcctcctcaagtgggaccctgaccccctcagtagcctaactgggagacacctcccagtaggggccgactgacacctcatacaaccaggtacccctctgaaacaaagcttacagaggaaggatcaggcagcaacatttctgcaatatttgctgttctgcagcctccactggtgatactcagggtctagagtgaaacgccagcaatctccaacagacctgcagctgagggtcctgactgttagaaggaaaactaacaaacagaaaggacatccacaccaaaacccaatctgtacgtcaccatcatcaaagaccaaaggtagataaaaccacaaagatggggaaaaaacagagcagaaaaactgaaaattctaaaaatcagagtgcctctcctcctccaaaggaacgcagctcctcaccagcaacggaacaaagctggacggagtatgactttgacgagttgagagaagaaggcttcagacgatcaaactgctccgagctaaaggaggaagttcgaacccatggcaaagaagttaaaaaccttgaaaaaagattagatgaatgtctaactagaataaccactgcagataagtccttaaaggacctgatggagctgaaaaccatggcacgagaactatgtgacaaatgcacaagcctcagtagccgatttgatcaactggaagaaaaggtatcagtgatggaagatcaaatgaatgaaatgaagctacaagagaagtttagagaaaaaagaataaaaagagacgaacaaagcctccaagaaatatgggactatgtgaaaagaccaaatctacgtctgattagtgtacctgaaagtgacggggagaatggaaccaactgggaaaacactctgcaggatattatccagaacttccccaacctagctaggcagaccaacattcagattcaggaaatacagagaatgccacaaagatactcctcgagaagagcaactccaagacacataattgtcagattcaccaaagttgaaatgaaggaaaaaatgttaagggcagccagagagaaaggttgggttacccacaaaaggaagcccatcagactaacagctgatctctcggcagaaactctacaagccagaagagagtgggggccaatattcaacattcttaaagaaaagaattttcaacccagaatttcatatccagccaaactaagcttcataagtgaaggagaaatgaaatactttacagacaagcaaatactgagagattttgtcaccaccaggcctgccctaaaagagctcctgacggaagcactaaacatggaaaggaacaactggtaccagccactgcaaaaacatgccaaattgtaaagaccatcaaggctgggaagaaactgcatcaactaacaggcaaaataaccagctaacgtcataatgacaggatcaaattcacacatagcaatattaaccttatatgtaaatgggctaaatgctccaattgaaagacacagactggcaaattggataaagtgtcaagacccatccatgtgctgtattcaggaaacccatctcacgtgcggagacacacatagtctcaaaataaagggatggaggaagatctaccaagcaaatggaaaacaaaaaaaggcaggggttgcaatcctagtctctgataaaacagactttaaaccaacaaagatcaaaagagacaaagaaggccattacataatggtaaagggatcaattcaacaagaagagctaaccatcctaaatatatatgtacccaatacaggagcacccagattcataaagcaagtccttagagaactacaaagagacttagactcccacacaataataatgggagacttaaaccaccccactgacaacattagacagatcaacgagacagaacgttaacaaggatatccaggaatagaactcagctctgcaccaagtggacctaatagacatctacagaactctccaccccaaatcaacagaatatacattcttctcagcaacacaccacacctattccaaaattgaccacatagttggaagtaaagacgtcctcagcaaatgtaaaggacagaaattataacaaactgtctctcagaccacagtgcaatcaaagtagaattcaggtttcagaaactcactcaaaaccactcaactacatggaaactgaacaacctgctcctgaatgactactgggtacataacaaaatggaggcagaaataaggatgttctttgaaaccaatgagaacaaagacacaacataccagaatctctgggacaccttcaaagtagtgtgtagagggaaatttatagcactaaatgcccacaagagaaagcaggaaaggtgtaaaattgacaccctaacatcacaattaaaagaactagagaagcaaaagcaaacacattcaaaagctagcagaaggcaagaaataactaaaatcagagcagaactgaaggaaatagagacacaaaaaacccttcaaaaaatcgatgcatccagaagctggttttttgaaaagatcaacaaaattgatagaacgctagcaagactaatgaagaagaaaagagagaagaatcaaatagacacaataaaaaatgataaaggggatatcaccaccgatcccatagaaatacaaactaccatcagagaatactataaacacctctatgcaaataaactagaaaatctagaagaaatggataaattcctggacacatataccctcccaagactaaaccaggaagaagttgaatctctgaatagaccaataacaggctctgaaattgaggcaataattaatatcttaccaaccaaaaaaagtacaggaccagacggattcacagccgaattctaccagaggtacaaggaggaactggtaccactccttctgaaactattccaatcaataggaaaagagggaatcctccctaactcattttatgaggccagcatcatcctgataccaaagcctggcagagacacaactaaaaaagagaattttagaccaatatccctgatgaacatcgatgcaaaaatcctcaataaaatattggcaaactgaatccagcagcacatcaaaaagcttatccaccatgatcaagtgggcttcatccctgggatgcaagactggttcaacatatgcaaatcaataaacgtaatcctgcatataaacagaaccaacgacaaaaaccacatgattatctcaatagatgcagaaaaggcctttgacaaaattcaacaacccctcatgctaaaaactctcaataaattaggtatttatgggacatgtctcaaaatagtaagagctatctatgacaaacccacagccaatatcatactgaatgggcaaaaactggaagcattccctttgaaaactgtcacaagacagggatgccctctctcaccactgctattcaacatagtgttggaagttctggtcagggcaatcaggcaggagaaggaaataaagggtattcaattaggaaaagaggaagtcaaatttttcctgtttgtagatgacatgattgtatatctagaaaaccccatcatctcagcccaaaatctccttaagctgataagcaacttcagcaaactccccggatacaaaatcaatgtgcaaaaatcacaagcattcttatacaccaataacagacaaagagagagccaaatcatgagtgaactcccattcacaattgcttcaaagagaataaaatacctaggaatccaacttacaagggatgtgaatgacctcttcaaggagaactacaaaccactgctcaatgaaataaaagaggacacaaacaaatggaagaacattccatgctcatgggtaggaagaatcaatatcatgaaaatggccacactgcccaaggtaatttatagattcaatgccatccccatcaagctaccgatgactttcttcacagaattggaaaaaactactttaaagttcatatggaatcaaaaaagagcccatattgccaagtcaatcctaagccaaaagaacaaagctggagacatcacgctacctgacttcaaactatactacaaggctacagcaaccaaaacagcatggtactggtatcataacagagatatagaccaatgaaacagaacagagccctcagaaataatgccacatatctacaactatctgatttttgacaaatctgacaaaagcaatggggaaaggattccctatttaataaatggtgctgggaaaactggctagccatatggagaaagctgaaactggatcccttccttacaccctatacaaaaattaattcaagatggattaaagacttaaatgttagacctacaaccataaaaaccctagaagaaaacccaggcaataccattcaggacataggcatgggcaaggacttcatgactaaaacatcaaaagcaacggcaacaaaagccaaaattgacaaatgagatctcattaaactaaagagcttctgcccagcaaaagaaactaccatcagagtgaacaggcagcctacagaatgggagaaaatttttgcaatctactcatctgacaaagggctaatatccagaatctacaatgaactcaaacaaattcacaagaataaaagaaacaaccccatcagcaagtgggcgaaagatatgaacagacacttctcaaatgaagacatttatgtagccaaaagacacatgaaaaaatgctcatcatcactggccatcagagaaatgcaaatcaaaaccacagtgagataccatctcacaccacttagaatggcaatcattaaaaagtcaggaaacaacaggtgctggagaaataggaacacttttacactgttggtgggactgtaaactagttcaaccattgtggaagtcagtgtggtgattcctcagggatctagaactagaaataccatttgacccagccatcccattactgggtatatacccaaaggattataaatcatgctgctattagacacatgcacacgtatgtttattgtggcactattcacaatagcaaagtcttggaaccaagccaaacatccaacaatgatagactggattaagaaaatgtggcacatatacaccatggaatactatgcagccataaaaatgagttcatgtcctttgtagggacatggatgaagctggaaaccatcattctcagcaaactatcacaaggacaaaaaaccagacactgcatgttctcactcataggtgggaattgaacagtgagaacacatggacacaggaatgggaacatcatacaccagggcctgctgtggggtgaggggagtggagagggatagcattaggagatatacctaatattaaatgacgagttaatgggtgccgcacaccaatatggcacatgtatacatatgtaacaaacctgcaggttgtgcacatgtaccctaaaacttaaagtataataaaaaaataaataaaatattataatgatggtaatattaattgtaataattgtagcttactgagtatttttttgtgagagggatttatagacataattctgttaaactttgaatgatagtcataattacaatgcctaatattattttgaaggcttgtttccaatctcagttccaagaacttttcatgtattatctaattaatattctcaaaagtcctatgatcatacctatagatacagtcattatctgtattttatagttaagtgactaaaggtagcaattacagcctggagagtctcctcacccaccagtgatggccttttaatatgttttatttactactcacctttccttaccatttactaattcttgtttattctcttgtaaattccaatctctggttttaaaatacatcattgtcacataggacatgataagaaaaagttgcatcttttttattcccgcttgcatatgcacatcttctctaataagccacatctgaaggtgtctgctccagtagtacattgtccatggtttcaacgatgccacacagtcataaatacaccacctaaagcataagagacgggaagtgagaaaacagagaaaaaggaaagtaaaggagaagaaacaatagaaaaaaagagaaggaaaagaaatgaaaaatatattaaaaaccatggattttaaaaaaagatatttgtctcatttttacaattaaatgcagatcttccattacaaagcaattatttcattctaagtatrtgaatagatttgtatttttaaaaaaaatcttcatctggttatcctcagaatgaaggaaaagaaacaggacaggatcttttgatatttacttcttcttagaaaacacatactcccttcctaaggatgattgattttagtttcatcacacatcaaggcctgtctcatgcttgccgatattctcttctgaatagttgtgcaaaaaagcattgctttttccccagactttgtccacagaacactgaccccgtgcagttcctacatccagatactgaagcttatttccagctggaccttggccatcaccctttccaggtgctcttgtttgtctcacgtggagtgatttttattggggatggcattgggtaaggaaggctaagacaagttcctaagccactgctatggtggcattgactttctggaacaattgtgcttggattgagtcacaaggtcacaatgcaacaagttactatgtgctcttgggattttaggatgtgtacattgtgagtgtctatctgcctcctgcgtcattgccaaggctgggactagcctcaggatgtcacctatggaagacattctgctataaatgggtgtatggaatgacttgcagtgtgcacagtgtagtacagattatggagataatgatttcatgccttcattcattcactccttccatcgcgttacagagatttcctgagtgattccactgggccagccaagaatacggtcactccagtcatccaccatcaaataagaaagttggatacagaactgatcattataatttattgtaggacataaaaatagatagtacaatcactatagcctactggaaaaatagaggctaatactgagtacctattatgtaccaaatatttttaggcccattaggatttggtatttcatctgatcttcacagcatgtgtatgtggtcagtgttgttatattagttttactgatgaagaaataggctgagaatgtcaaggtaatctgatcaaaatcttacagttataagtaggagagccacaatgcaaacccaagctggccaccagaggcccaagatctttccaaaactgaatctgacttttgtggaggtgcatttctgagtttttctttcagttctcttgtagacttctttgagaagcaactgttgtccgttaacatgacattctctttaagtgtcttgaaacaaatacagttggcaggctttgtaaggccatgggagaaaaataattaaatacaataaattaaatacaatatctgaaatacatatatagtagatgggcctaagagctgactggagatgacaaaagtgtcctcagtgagaatgagacttagactgggagacttagagagaaagagagagagagagaatatgaatgagaatatacactgaaaaaattaacaccctcagtctctcaggggcatgggagacaatagccaaaggtcaattarcattgacacgatctatgtacagatgtaggtgtgtccccagcatttcacatccactaattataattacttcatggatacaaggactaactctgcaaaaacaaatgcctccctgttcccttctcccgccctggcttttgcttattttttgtatacccacctggattgctacacaacttcctaattggcttcttgcctgtaatctttccccctctaatccctttgttgcattgtaggtatagaagtctttctgaaacagttatgagtctgtcacttgtgatagctcttcagttgtcattagaataaagtcttaattctttagagtgatgtttatttatacagccagtatttacggagtgcttactatatttgaggtactgttctgagtgagaaagtagcagtgagtaaaacagcctcttctgcactctcctgcactccaccaagactcctgtacccttctcaagcttacattctaacaggaggagacagataatacacaaaaaataaataaattccactttatggtataagttattaagacaaatagaggaggtagcttgtgagttcagatgggaaggttgtagttttaaatagggtggtcagggtagacctcactgatgtgacagttgaacaaagaatgaggaaaggaaggaatttagctattttgaaacctgggggaagaatataccaggtcaagggaacaaccagtgtaaagattctgagagggttgcttgcctggggtattatgggaatagcaacaaggtcacaatggatgcggcagagtgaaccaaaatgacagttgcagggaacaagttcagagaggtgatagggtctacattattggccacagtaatagtttttactctcagtgaaatggaaaccattggagaataatgagcggaggagtgatgtgatatgacaggttttcaaagaatcattcttactgctgcctactgtgttgctgattgttaactggggagtggaagtagggggagggaagcacagaagtcagaaagaggctattgtagtaagccagctgagtgaggaggatgatggcatggagctggtaaagaatggttagattttggatatattttgaaggtagagccaccttcaaaccttgaccttgaccttcacaccctgatggattaagtgtgaagtgtgcagaaaagagagaggccaaggcttgaggaatgtagcattgctattaatgggtgaaggtggattcaatgttatggagtcagagggaggaaggagtcaagaattactacgttttctgatggtagtaactgatccccaaagttgaccctccattatcttccttcatcttagtaaagagtaccatcatttatatttttattaaagccaaaaaataaaataaaaaattaggattaattcttgactcttcctttcccctctctcctcacatctaatccatcagtaagtcctaagggttccacctccaaaatatgttgccaatccatctctcttttttcttctcttttcttttcttttctttcttccactcctagcactgttgggcaaatcaccgtggcacttttcctctcctggtctatgtaaagtatattttttgtacacagcatatagttgggtcttgcttttcaattttatgatctctgaattttacttgggttgtttagatactttatataaagataaatatgatttgatttacatctttcattttgttttttgttttctgtgatcacttctgtctttccttcctgacttcttttggattaaatgactatttttcaattttaagaattcaattttaagttatctattggcatcttggctttctacacatctttttgcattattttttaatggttgctctagtaattataataaatatcctaaacttttcagcctactttgaatgcatattatgatacttcatgaaaggtataaatacccttcaactgtgtagttctacttaccactcctatcccagctcttcacgctgtagtttgtgtgtgatatctacatatgctataaacccaataatgaaatagttgtcatattgtttgctttaaacaatgtattagtctactcttgactaccataacaaaataccacaggttgggtggcttaaacaacagacatttatttccttacaattttggaggctaaaagtctgtgatcaaggtgctggcaaatgcagtttctggtgagggctctcttcctaacttgtagatggctgccttctgtgacctcacatggccttttctcagtatgtgtatatgaagagaaaayggttgtattccttccttttcttataagaacaccagttatatcagattaaggccccactgtcatgagctgtttaaccttaattacccccgtaagagccatatctctaaatacagtcacatttgggattgaggcttcaatatatgaatttgaggtgaacacagtttagtccatgtcaaagatacataaatgttttaaagaaattctgagaaataaaccatagtcttttgtatttacctacataattactatttttattgcttttcctttctttctgaaaatttgagtttccatgtgatatcttttcccaagcctaaagaacttgtcttagcctccgtctcaaaaaaaaaaaaaaaaaaaaaagaacttgtcttagcatgtcttacagtgcaggtcaactggcaaaagacattctctctattttttttcaatgcatttattttatatgctgccttgaaagatatttttgctcactatagaattcttgatttacaggtttttttttccatcagcaccttaaaatgttagtattttctattctgacattattatttcttataagaagtcaaccattatttttgtcattctttccctttatataatatgtcatttttttcctctggctgctttcaaattttctcttaatctttggcttttattacggtatggcgtggtcttctttggattcatctttcttgaatttgtaagttgattcctttcaccaagtttgggaaattttcagcatttaatttttttttgtttgtttcttctccttgctctcttccctcttactgtgactccaattccacatatatggtacctttggctattgtctcccatgcccctgagagactcagggtgttaattttttcaatatatattctcattcatattctctctctctctttctctctctctaagtctcccagtctaagtctcattctcacgaggacacttttgttggtcatctccaatcagctcttaggcccatctactatatatttatttcagatattgtatttaatcaatactattacatttgcattttaatagtttgtttctttgctgtttcctctctgtttaataactatgagaatatttttcttttacatccttaagcattgttaaaatacctactttaaaattcttatcttctaacgcctgtgtcacctcagatttggtgttcactaagtggcttttctcttaagtatggattacattttcctgttcctcaatatgtataatgatttggggtcatattttggacattgtgattgatatattctagagacactgtattatttctgtttctcttttgagtattgattttttggtttagcaggcagtttatttggctgaactcaaacttcaagttttgttactctcctgtgatgaacatgtcctaaaatctctgttgcattattttagccttagctggactacttctggtgttcccatgcacatgtaattgagagatcatccagaaattagggtagcatttataggcacagtgttgcattccctttctatggctctctctttctgacatcccctccacaacttacttcctagctactatggttgccttgaactctaacctctcatttcttaatcagaaagactgtgtatttctatctgagtattagttatcttgcatgccactgactggggtccacccatgggcaaaaatgtataaaatcaggaaacacacaaagtactgttttttccttccttgtgtctactcctctccagtttctacctggttttggccactttccagtgtcttcagagaactatttgctgtattttgatcagcatttttaattgttatcaaaatgtgtctcatcattcattcattagagatgtcagcattgctctaggcactgaggagtggaaaataatgatgctcttgctttgaaagagctcagagtatagggtaagagacagacatataactaaggattgtaaaagaacttgatagatgctacagtagagtaaggatagaaaatatctgtgccttatattcccattgccaacctgtgatctttgtctgcatttcctattctccatgcctggtcatctccctgtcctttatacattaccaaatttttcttaacttttcatcatttttctctccaaatcaaaataatttttatggcctttgatctaataaaagtataaactcttatgacattcaagacacactgtctgccttcgccctctttattcatccttattttcaccagtttactaattctgtaatttaacctacagtaatcctatgaccaatgtatgcacaacacaaatagatacaaatgcaaagtgtggtaagtgccaccaaggagaagtacatggtgctatctgtgtttttcctgtggttcactcatcccacatttattccacaaacttttattaaccacccatgttatgccaggcatgaggctaaaccagtccgttaccattcaaatcatatatgtctttccattttcatgtctctactaaccagcctcctttctgtcatgccttgcctctagccctttactcctccaaactctacctatttatggcctctcagctgaagcttcacctactccaactgtataatgattgccaaatgattgatctctcactttgtgctgctatgcatcataactatttcttatttttcagtgtatctccggaacctaggtgcacagttcctggaggcacattaggcatttagtaaatactaaataactgcattcatgcttacaccacacatgctaggttctagctcactcctggaagctcatttaaatctctcttctctgaactcctaaagcacttcccataaaaattagcatcaaatcaagtaatgcctctaattatccattactgttcccagcgagtttatcttgatgctctcagtggattgcaaactcaggggatccaaagtgtgatgaggatatgcttcatcacagtaatgcaaagttgaacctgaaggagataaatattcaataactgcatgagttttttttttcattgaaatgaccaatgtctttgatatcattttgaaacatttccacaaaaactgcaccaatggtattcaacaacgtatacctggaagttcagtagacaatatgacgtggtggttaagaacaaggtcttaaaatatagagactgcagtttgagacctagatttgtcgttactttactgtgaccttgggcaagatattcaatctctttgagctcagtttcctcatctccataatgaagaatagtatcttctccataggagtgctataaggaataaatgaaatagagtaatgtgtgtacaatgcttaagttagtactgatgtatgggaaatgagtcagtatatttcacgtgatatcatttatactactgttggcactatagtagtgtattagtccgttttcatactgctgatacggacatacctgagactgggtaatttatacagaaaaagaggtgtaatggacccatagttccacatggctggggaggcgtcacaatcatagcagaaggcgaaaggcatgtctaacatggcggcaggcaagagggaatgagagccaagtaaaacaggaaaccccttatgaaaccatcaaatctcatgagacttattcactactacgaaacagtatgggggaaactgcgcccatgattcagttgtttcccactgggtccctcccacaacatgtgagatttatgggagttacaattcaagatgagattttggtggggacacagacaaaccatatcaagcagacacacttaacttcctagaaatcctgtttaaaaggaggccatggaagttcaaaacagtttagtgacttgcacaaagtcactcagctagtgagactcagagccagaacccaaccctggcctctgtgtctcctgaacaaattatcttctttacacagccctagctctcaggaaacatgctcagagagcctatccctgtgcagccaaaagaccaaatcttttccttgttggaatgaaaataaatctatcagaatggttgttttagcatcctagaaactcaagtaaacattcagaaaatatacagatgaggttcaggaactcaagcacggtgttgcttgggtgtgttatggcaagcagagtaaatgcatggagaaacatttctgtccctgatacatatttcatactattttgtttagagccaccaagtggattaaggaataagatcctagacctgggatttcaaatgagaggtgattatctgcagagctcagacatttctgtccttggagagctgtgtttcccatgtgatgattgttcagtcaggagagtttctcctgacaggtctggggcatctcaattttttttaactgagagtttcaaaaaatttttttaatgagggttttttcaaaaaccctcatcatagtctctttcattcagcttctccattagtaagacacagtgagtaattcaaggtttgacattgcccagggatgacagcctagatcaagaaggggaaatgatgtgatccagaaaaggttggtgcttttaacactcagaccccccccatttgacataagttacccttccttctcattcttgggcctgttgctaacctgcttctaccagtttagccttggaaatttcatktctgtttactcttctctctaaacttctttgttttatgtatttaagaggctagcagtaggttaaatcaaagctaaatttcttttagctgaggcactcttgctacattggcattttaatgttcttggaacccgtatggacaaagagttgaaagaaacatatactcattttaatataaatttttctatcttatacataaattaaagaagctataaaattgacccatgtctcttatttttcagatagaccacatggtacaaggccatgctgcttttccagaactacaagtaaaggccacagccaggtaactgctgtctctgttccctctaaaattttccttgtgtgactgtattgagagaattcacgttgggcagttgggtgattttcagatcctacagacaatgaaaatgcctgttagtgcttgaaagatagtcacctggatgatccagaagatagatgtattaattctttaaatgaggtaagagaacttagagaacctagagataccccaagaatatacccagggactatagataagaaactctgatgtagaagaaggaccatggattctggagtcaaaacttcttagtttcacatcccagccatactccttaatagatacaggaccttgagctagttacttaacctctttatgcctgtctcttcatctgtaaaactgaagataataactgatatggagtgatttctagaatattttgaagcaagctgagtgcaaaaaaaatttacgatatactccctttcatgtaaaaagaaagacataggaaaatacatgtgtatctgttcatttttgcaaaagaaatataggaagtggccaggtgcggtggctcactcctgtaaccccagcaccttgggaggccgaggcgggcagatcacgagttcagagatcgagaccagcctggccaacatggtgaaaccccatctctactaaaaatacaaaagttagccgggcatggtgatgtatgcctataatcccagttacttgggaggttgaggcaggagaattgctcaaacccgggaggtggaggttgcagtgagcagagatcgtgccactgcactccagcctgggcaataaagtgagactccgtctcaaaaaaaaaaaagaaatacaggaagtttaaaccagaaaataataagattagttacctacagggggtgggtaggaatggggtggaaagaatgtgggaatgggaccatggtagtaggaagaaatgacacttctctgagtatacctttttatataactataactcttagaattattgtcatgcctcatgtccctgataccccgataaaataggtgatagataaccaggatatatgtgtatgttggcatgggcaaaatgaaatgcacacagtaaaaactgaacctactgtattacaaagggggttgggaaaagaaaagaaaggaaaagaaaaaagaaaagaacctaagtaaatttgggaaagaatattttgactatatgccatatggctaaagagaaaaataaccatacataaatattatactctaattggtaaatctgtttttcataggtgtatatgttagctatagtgacaactctttatgtgtatgctacagttgagtgaagaaatcaatatattgtggataataagagccaggttcctcacaaatgggaaaaggagaaggttagaatgaacctcatggtgtcaatatcaacttatgattttatatatatatatatatatatatatatatatatatatatatatacacacacacacacacacacagctggatataaatataagtaaatatagatatgtatattcatgcatgaatatacatgcatatactccctaggtctctctgctgagatggcttggaagcaatgacacgatagtagcaatgtgtgtacctagctcacaggtactgtattctaagtaccattctcccatttctccaataaaagtaatcaggacttcttagaaagatggctgagtctacgctgcggcagtaaaattatggtgccagaaagaaaaaagttactcaacaaggaattgtcaaggtacattggaaccaactttaagaatctctcagtggcctactcaggataaaataaacagtaatagcgtaaagtaagtccataagtaaataactttgtaagtaaactactgaagaaggaaataaacgaggacgaaatgacaggtcttcctcttcactgtcaggacagtagccttacaattaataaatgtagaagaaataatggaaatagataatcaacattaggtaaacactacagagataaatgttgtaggcaagaatcattaatggatgctaaaattagtgagtaaaagtgggaagcaggatattttcataaacccagaggatttcagtacaagatactgagtaataggaagaggaaaataataactttccagtagtatataagtatggcagacaccaccttacccaagtgatgaaagtaaacaacaccagcaataacatgtagtgatatcatgtatctccttttatgaggcaccgataaagatacaacatcatttctgccatgttcttgcccaaaatgattaaactcagtgtaaatatgggaagcatcagacaaacctagattgacattccacaaagctattagccagtttgctccaaaggaaaattaagaaacttaaatactgaagaactgtcctagattggaggagacttawggaggtactacagctgtaagcagtatataatcatggattcaactctggaccagagaaaggacattggtggaggaaaactgttgaaattcaaatagagattaatagtattgttatttatggcaatttcttaggtgatgagtaaaagggaactctgtgtattatttttgtaacttttgtgtaaatctaaaattattttgaaataaaaagtctaaaaaatartgaatggattttcatgctgataatgcttagttgtcaggctgtttaagtaaagtaagatatttttatagaattatcagagaaacccatgtagctagctagcacaggacaaaagagagatagtctaaggtggccactaatagactctgaagccaaattgcctttgcctcagctttgtcgcttattcactttctgtttctgggctatttacttaacctctgtgccttagtacctcactgtaaagggaataatagtaaacatttcataaggttgttgagaaaattaaatgaattagaataatgggtgatacagagtgatgattaagagtcaggctgtaataggtgttcaactaaaaaaatggtaatgataaaaattactgttggggaacatcacacaccgaggcctgtcgtgggatggggggataggggagggatagcattaggagaaatacctaatgtaaatgacgagttaacgggtgcagcaaaccaacatggcacatgtatacatatgtaacaaacctgtacattgtgtacatgtaccctggaacttaaataaaaaatgaataaataataaataaataaataaatgattgttgtagttagtatattagacatttccattctactaagtgacttacattctaataggatcagcacacctacacagagcagaataaatgaatactgtagtaaaatatacgtagtgtgttatcaggctgtgtagaaaaggaggactgattttgacaaggagtttaagaaaagcttcataggcattcccttctaggagtctttagttataatgccattgcaattagtcattaattacaattaccattgagagggattatgtcacataaccttaccaactagcatattagtggcatagagaccatataacctagaaaagggattcctaatttcggatcatcaatgaacctctttaaattgtgtactgttctgctgattacataattctgcatgtatttctgtgaagggaccataacggtcattattttcttaaagggtttaagcatttataaaccactaagccaaagaaaagagcactaaatttatagtctggagacctgaatccaaatctcagctccaacatgtatcattgtgtgaaacccattttcttcattataacataggatagtaatggagaatcaacccgaaacacctctaaggatttattttgagtttagaagaggtaatatatttgacggggccttgtaaactgaattgtgacaataatgatgatcactactactctgttagtccattcttgcactgctgtgaagaaatacctgagactgggtaatttataaaggaaagaggtttaattgacttacagttctgtgggctgggcaggcatcaggaaacttacagtcatggtggaaggggaaacaaacacatccttcttcacatggtggcaagagagagaagtgctgagcaaaaggaggaaaagccccttataaaaccatcagatctcatgagaagtcactatcacaagaacagcatgagggtaaccacacccataattcaattacctccaaccaggtccctcccacaacacatgaggattatgggaactaaaattcaagatgagatttggtagggacacagccaaaccatatcaactactactattactactaatgattgtaagaggaggaagtttggtggtggttgctatgggttcaagcagcatacgtcagtcattcataccttgcctgccttcttatggaaagcatggaggaacagcaaggacagggactgtgaattagagtccttgagttcttgtacctgttctgccctgaatgtctcaatgactactagattcttcatccataaattacaataatgataccctacttacttcattttacaggcattaataggatgaaagcaggtcacaggaatgtctgtatatgaacattttagtgtgtaacacaaacttactgaatatttagttttgcaatgacatactctaaacttccagaactttcttctatagataaacttcatttgagtagcttctgttgcaaatcataataaaaagaagaaagaatttatggattaccatgcaaactcagagaaacaacagtatcgggtggttcagaagcagcaacttacagaactcagtgatggagtcagaactggatttaaatcccacctcttttcacataacttcaaacccacttccagctactttcctgtatttctccttctgtttagagtggagtttctccaaagcatcgcctgtactcttggtctctacttctccacttcctactccttccttgcccactgcagtttgaattctgtcaccatcagccccctgaaacgtttcatattaaggttatcagtgacctctattttgctaagtccataggatgttttttattcccctttctttagttctcagcagcatggggcatcagtgatcactttttcctccttttaacattctctttccttgactttctggaatgtcaccctgtctgttttctccctatatctctgattcctccttcctaaccacttttcttgagtttatagtccttttcttgaccattaacattaatttttgtcacagctagcttcctggccctcttctctctttgccatctcttccaagatgatctcagctatgctcttgacttcatttctgtctatattttgatgactcttttatgtccagcccagatacttagtaggtattcagtaaatgttagttcggtttccttccacttttcttttattgtcttacaaaggaaagtgcatctgtgtcttattagatctatgagtacaatattctaaaactatgggaccctttatgcttccggtcttagaaagaaacaggcatagctgtttttgaaatgaagttagctgtttggaagagtggacaaatccttctgaatcaagaaccatgtgtctcttttactatgacttggggctttctgaaaacagcaatgcaggtcacccctatctcagagcttagggtcagcaaatcctgtttgaaactgtggaaacaagtgttgataaacagattgagtattttatactcttgatttacaataatcctcttaggccccatctctgaagagaagtgttttgcaagcttataaattaagtaaacaagaactggatgtgcccgtacatgtaactggtaaccaaagtttctcttcatgtggggccaaatttgcagatatttcactctttagcagagatcaccttatgtcaatcataaattttgactcttttcctctaaacttgattctcttagaggttcttaactaacagtgtctctgaattaggttctggtgacaacagggtttagtgagaacattttggcataatccacaagtgctagattcaaggttggcagcaaagcaaaacttaaaatccagggtctgtggcccatctgtctgatgagtatcttttgagcatttgtgatacatgaatgaaccaagcaaacaaagtctttgctttcataaaaatatacacacacatacatatataaacatgcagtacatacatgcaaatatgcatactatatacatatacacatatgcatatatacagatatagccagccattgataaatgctctaaggaaaattgtagataaataaggagatatagagcattggtttcaaagcccttaatgttgtctttgttgtgctagtgcatatttttttcctcagcctttcttttttcctactttccctgaatttttctgttattcctctgaggacagctaatttttcttgatctgatttattcctcaaacttcttttgcttttgtaattcccataatcccactaaatatcaatttcttaaaattcactagtcctctatatcgcgaatcgcagatagattaaaacttcccattaaaggctgtacaaatccccctcaagcaaagaaagggaaaaaaaggacaataacatttattaagaatctgcagtatgtttggcactgtgcttagtgataatagtttcacgtatattatctcatttaattctagatgaggaaatgaggattattgggagctctcaaacttcacttctaaaaatttttctctctttccattctgctcttttgtattgagagtcccctttttgcctttatgactttttaaaccttggaccgtcattctgataactggggtgttgagtctatcactgaatatttacttagccttccctgagctaggacagtcagtgtgataatattaacacctttcattcccccatggtatacaaagataatcagtaaattcttgatggctctgagttcagaaagatttcttacagaaattagctggatattattatacatttcttttttttttttttttctttttttttgagacggagtctcgcactttcacccaggctggagtgcagtggcactatctcagctcactgcaagctctgcctcccgggttcacaccattctcctgcctcagcctcctgagtagctgggactacaggcgcctgccaccgcgcccggctaattttttgtatttttagtagagacggggtttcaccgtgttagccaggatggtctcgatctcctgacctcgtggtctgcccgcctcggcctcccaaagtgctgagattacaggtgtgagccactgcgcccgacctattatacgtttctttggtttctgttttgcatgcaaataaaagaaagtgctcagggcattggggtcttctctagaagaccaagggtctgtgctgatttaggacataaatcctcttattttctacctcccaactggttaccagtagctcagcacagtgcctggtggcataggggcatgtgtagggaagtcataagatgcctgttcctttgccctgtccccatcttctgtatattccagcatgtctggaaggctgtgtccatctgaagggttttagatggtgtgggagtaataatcaaggttrcattgtagaagaaccaatcaggaaagagtacagaaagcctgattggacattcttagttgagttgtctttggacatctaagaggaggcatttgaagagtggttggatacttgacctggaactcataagaaagaaatggacaggagttaaggtcatatatttggaagtcctcagcactagatggtaactggagcaatgagaagaggttaggatcatccaagaggagataaagagtaagaaaatggtgaaagacagtagatctctggaagacgtcatatgtttaatgaacaagtgaagaaggagaaacagccaaagaggagggaggaaaatcaagagagaatagtgtttcagaaacaagagaacaaatgaggaaggagtggtcaaatgatgtaaaatgcccaaaatgattcatcggcattaacaacaaagagggtattgttcctcatggtagtaccagtttcagtagaatggagcaggcagaatgcatagtgtattgggttaagaagtaaggaactaggccggttgcagtggctcacacctataatcccagcactttgagaggctgagacgggcggatcacgaggtcaggagatcaagaccatcctggccaacatagtgaaaccccatctctactaaaaatacaaaaaatttagctgggcatggtggcacacgcctgtagtcccagctactcgggaggctgaggcaggagaatcacttgaacccaggaggcagaggttgcagtgagctgagatcacaccactgcactccagcctagtgacagagcaagactctgtctggaaaaaaagaaaaagaaaaagtaaggaactagagacaggcaatatggaagcttcttttctaagactttctcttgttggtagaaaaggcacaagtatattttgttataccatgtattctgattttttggtttaagagtatgaccaccatactctctgggcagcctgtgaacccatagaattaggtgatttatggagagggagaggacatgagagatttcagggatgttgtctgcatttaagatcacaagcaataggtccgaaaaaaaaaatcttctttgattcttggatttttaaaaaactagaaatgagtttcttatgatggcaaagaagaggaaactatttattgataaacctgtcattttatagtgctcagggctctatgtttaatcttcatagcagcctttaagtagacagtattagccccaatagcaaaaaagcaaataggctcagagagggtttgcctacctgatcatccagctggtacgtggtaaagtcactttatgattattgaaactatattttcttcatgatacccagtgggatgtggacagcaaaagtttctccttttgagacaggatatatcaacctggggttcatgagagagagggtgagcgatccacttgggatcacagttaatatgtgattccctagctagaagaaggcaggctgccatttgagaaggaactgataaaacatgcaaaatgacacaaagtcagaaccaaaaaaggcatcatgcaaggttaaaattatgtgaataatgatgtgtattagttagtttaatgtcttccaagtgcatttcattttgaatgatatactcagatagcacacatggtaaggtataattgaaaaaacatgtaggagaatggctgcattcaaagaataaacatacagctgcaaggaggttaggagtcaaaggggtaagcatatgccccatccctcagggatctcattagtgcatgagtggccatatatgtagaggctaaatgaatctcactgtttgcaaagacctgcagtaaatgagacaatgacgaatcaataataattaggcctatacgttcttattgacccagatgtctgaaaccaaatgccctgctcagagattccttgagaggcagaatgaaaagatttatagacatgcgtttccaaaaaaaaaaaaaaaaatccctttactttaagaacagtggctattctgaagtggaaagtcgcaagaattagtgcagactcttgacttctggctagaaaagatgttctcaaggcttttcttgtgaatgtgattcctgttggaccaggagcagagagagcaaagagatggaaaaccaggaggttatcatattcgtgttcgctgatacgttgttctggctgtaccttgtatggaggcttcagaggatcctttcctgaagccataatagaatcattctaaaacagggtttgtgtttttagggctttgataaataatttctgacctaagatacagaaagtccatggcttcagaatcacaaggagaagggtttaaagctggactcagacctgtctcttcacctcttgaagcatctcctctgtatgttagtggtacctccccaactgggcagtgttggaaggtctggtgtacatttagggaatggcaactggtgttaactgtagttgttaagccttttcccagtaatatcttattcctcctaataagatctaaggaagaagatttttgcagatgagaatgagctattacagcaagaagcaaataaactgctggtaggtagggcggttrggctgccctcacctccaccctagtacacatcacacgcactcacacacacacacatatacatgcattcacatttacacactcactcatgctcacacagagcagctttgcttttctatatttttacattgaatatttacatacaatttttgtttaataaaggagttctactggacgggtgtggtggctcaagcctgtaatcccagcactttgggaggccgaggtgggcagatcacgaggtcaggagattgagaccatcctggctaacacggtgaagccycgtctatactaaaaatacaaaaaaaattagccaggcgtggtggcggacgcctgtggtcccagctactcgggaggctgaggcaggagaatggcgtgaacccgggaggcggagcttgcagtgagccgagatcgcgtcactgcactccagcttggtgacagagcaagattccatctcaaagaaaaaaataaaataaaataaaaaataagtaaaggagttctactggtaaatggggaaaaaaagagaatttaaaaatcaatgctctactcattggtttgtttccctacaccaagtacaggaaacttttggcaacttcwtgggatccatgggatcactcacccaatcacaaactagaactagaaatcactgagccttccttctaaaacacttttaaaatgcaaagcataaataatgccttaggtatcttagatattaacctcctttggatattgatttcctatacttttttttctgccattatacaagccatgtttttaacctttaaagagacttccaaggaccccagtgggaagtagcacagatgccaactactgcaatatccactttcttttgaaatcattggttcagaacttttagaaagcagcatcttttaagaggggaaggttgaccagctttcatctttgtgtcatgtggtgtgatttaacccggtgaggtaggtgttattaaacctattttatgagtgggaaaattggaggtcagaggttaagtcactggcccattttaccgagctaggagaggtagtatcaagatttgaactgagtagtgctctcatgcccatcatcttctctccacctcctcttcacctgaacatgtaaagaatgaaggagttggtttgactccctcattctacacatgaagaaactgagacttaaaaaggagaaaaaaaaccaggcgaggtggctcacacctgtaatcctagcactttgggaggccgagatgtgtggatcacctgaggtcaggggtttgagaccagcctggctaacatggtgaaaccccgtctctactaaaaatacaaaaattagctgggtggggaggctgaggcaggagaatcgcttgaatctgggaggcggaggttgtagtgagccgagattgcaccattgcactcccacctgggcaacaagactgaaactccatctcaaaaaaagaaaaagaaaaaacgtacacaatgtcatctggtgggtttaggttgaaaatcaggtctctaactcctgatcctaactgcatttatgacattcagtcactttacttagcaaaatcctatcctgagtctgggaacttataatttctctccatttatcaactcatcatcattattacaattaggaatactgattttaataaattattgacatatgaccagtactgtacagtttacaaaatactgcgccttcacatacataatcttctttgatcttcacaataaccctatgaggtaagttggacagggattatgatatctgtttttacagatgagaagagggtggttcagaaagtttgaataactttctcatggccatacatctactaagagtaaagccattcctggatccagtcttctgactccaaacctttctactaggatgtggcacctttcttggtgatagtacagtgtgatttgagagtacagtgggctagcttctctgaagcttttaggagcctgcttactttcctggatctggaagtacaaatggtttctttctatagaatgatttgctccctgaccctatcccccctttaaaaataaaattcacttctcttccagatgccagagtatatatgcatatttgaacagtcacctggatctgattaagaaggctcagcctgtgggtttccttactgttgatttacatgtttggccagatttccatggcaaccggtctcccttagcagatctgacactaaagggcatggtaagtaacagctagtccttgcacatgggtgaaggcaggccaaagggctacaaagwtkggaagaagcaaagtgaggaaaaaggaaaagaaaaaaataaaacaggccaacagccctctggctttgtgcagatgcattgctgttgctgctccctgggatgagctgctgaaagttttcattgtttctgagccaaccttgaaagcgttaaaagcagcatttcctagttcagctactgctgcctctttgtcctgtggagtggctaaaagtcatgcctatgtaattttggcatttatatcagtttgtaaagtcaaattttccagctgcatctttaggttgcccagtaaatcagtagtaaatattaccacccatggtcttgctggccacagccacacatctgcctaggctctgagtcagggctgttcagattctacactaatatagttaggatttcagattaaactttggtataagtaaatgtaatttataacttatgttggaaaataaatcctgctcttagtgccctttagggtcacttcctctgtggatattctaggctctcctagaggggccagatgaacttggtgggagaactctcaaccaccccagttgagatataaaagtaataacatcttagacaccaggagaatcatgtttgaggtgtgatgaagcaggttaaaggtagaggaggggccaggtgaggccacaaataagaaaataagccatgaatgcaggaaccaggaaaatgtcatgaagctgagaaggtgagtgtgaggtacattaaggcagagttcagaatggaggctgtaaacaaggcaaggcttatgcaaaggaagccgcgtaacagtggagcaggcctgatggagtcaagaattcaagactcaaactactacaattttgtggttagttttattgagattgttttaaatatttttatgatgccagcaggaagacctgaaatttattttcattacctagttgacatgatcaacttctattactaaaagggagtcatggtgaaaagaaaagaaaattagacatgacaaaggttatgttgatctggagtccatgaagcatgcctacacaacaaatcatgagcttggtgtccttttttatagaggcagaagaataatgtccagagagggccatgtggcaacagaccgcaactagaaagtcatactttcagataaccaactctctctgtaaacagggggtaggggaagaacacatttcatatgggtacagaaataagtgtcttaattagagacaaatatctgaagccaaatagagctagatatttaaaatgttgaagcagttaagaagcttgaccagtgttttaaatgaccccaaaacaaagcagtgttgcatagtaaaatggtcattgctctggaggtcatttgttgctttagataaaactgacctaggagccttccctagccaatgtctgtcatacccaaattcagtacccagcatgtcaggcttcatgtctcccagtagcttttatccattttttaaaaccaatcctgacatccaagacctaagaattatcatcagaaggatattctaatacagttgacccaaatgcagaatgaaattccaaagaaatcaatggagtgttctgaagaattctcatatcatgagaataagtatgtatgcaccaaaaggaacttcttacatggggacatatgcccagttgtatctaaaaatcctgggtatgtttacttttttaaaaagttgtatgtttgttcacatacctcatatatcacttggtagttcttggcaatgattccctttataactgtccttgggttaggctgcaatggaacagttatcactccatgaatttgcatcacaacactggaaggagaagatgacctaaataagatagaaggaaagcaattctgagctaaacacttcaccccaaatctccttccttcagtccagttttggaaaacatcaaaataatgaccctgaaattcttctgttatgttatatccttttgctggaaactacgatgatgcctatctccagcactcattcagcaaatattaattgggttcctattgtatgccaggcactgccgtagatatgagtaagatgcaacaatacctaccttcatggagtatgtttaaagttgggagtgggcgagtgcttgaaaaaatgttaataggaactagcaggataattccaataaagcaagatccatgtacaatttcttcttttggcccctaaaacgtttccctggacacagagtaagtgctcagtatatgcttatttataatttataggcaacatagagataataaagaggtcatttgttgccttagataaaacaaacatatgaagaatttaataataccaaatgaattaagtggctactgacactgactatccatatcgtaagtatttaataccaatattaatttccaagtaaatgaagataaactccaattgtatcataattatgagactgtttattcatcaaacaaatacaggccctgttacagttgttgggggatataagagtagctagacacaatcccagccctcaggaatatcaccatctttgggaggcagacaaaatatataaacagggaatggaaagatagtattaagctccagatgtccttcactgtccagagctctccagatgcatggaagacgattgcccaacctggtcccagcggtcaggaaagctccagacaggaagtaacattgacactgagtgaagctgggaagggggtttgaggccaagggaatcatagtatgtgcagtattctagagggaagagagcatggcatgtgaatgtctacaattttggctccttgtatcattgtctaaccaatgatagattgcctttagcattttatcttaataataaaaaaagaaaattttctcggatttctcagagaaccactggatatctgtatattccggctttggcagcgttgcactctcccagttctctactctcccctcaggtgactcttttcttgcrttgttaaacatttacccattcactgtgtttttattgaatacctgctatgtgcaggcctgtgctaaacccaggtaatacaaagaaaacagaaaagtacctatcctaagttcacataaaagtaggggaggtaattattgtacatgtgtgtatgtgtgtgtatataatcattttacagtgtgatctctgtaataatcagtgcaagctgaaggagatgctcaatacatgtctgactttgaaattgtttttatgtggcattgggctagcaaaccctgatgcagcctttttctgcttctcttgaaaatatttgtaaaaatgcaaaaaagtcatgaattcatgcaggccttaggaattaggatggtgttcaactaggaaaactagaattggtattcccaattatatgatgaatgcaacttgtttgataacatcatatatgacataagaacaaagtcatgtgtgatccactgtggaaacagtttggacctcgccaccttctgctcccttgcataaaagcacaaggttcttttaaacctgaaaacagcatagctattcctctactttactgctaatggttgggttttttgttttctttttggaaagcagccagtgagtttaaattcctagatccccccacaaccctgttcccagccactctttcagttcattccatttgaaaactgccagctcaagaatccacccaagcaggaagtgtgaattaggaggaagggtgatggcttgcattctaagcatctgttaatggggcagatgtaggaaaggccttagtagttctgtaaacttgggaggaagggtgtagtttgcactactagttctaggctcggaaagccaggcagtgctgatctacctcagtccaacaaagctacagaaaataaaaactgctgtactctgccaactggcatttagctgtagatctgaagagacaaatttaagtatacagtgagtggggataagagcaaatcacggctgtgtgcggtggctcacgcctgtaatcccagcactttgggaggccgagccagttggatcatgaggtcaggggttcgagaccagcctgaccaacatggtgaaaccccgtttctactaaaaatacaaaaattagctgggcgtggtggtggacgcctgtaatcccagctactcaggaggctgaggcaggagaattgcttgaacctggtaggcggaggttgcagtgagctgagattgtgccactgnnnnnnnnnnnnnnnnnnnnactccagcctgggtgacaagagcgagactccatctcaaaaaaaaaaaaaaaaaaagagcaaatcatgtgtactgtatgctgggaaatactgaacatgtgtacctgtctagttagcgtaaatgttgaaaaataatggccccttagaaaaaccattacatacggctggacgcggtggctcacacctgtaatcccaacactttgggaggccgaagcggatggatcacgaggtcaggagatcgagaccatcctggctaacatggtgaaaccctgtctctacttaaaaaagtacaaaaaaattagccgggcatggtggcgggtggctgtagtcccagctactcgggaggctgaggcaggagaatggcgagaacctggggggtggagcttgcagtgagccaagatcacgccactgcactctagcctgggtgacagagtgagactccatctcaaaaaaaaaaaaaaaaagaaaaaccattacatacaaagaaaaaaataccattgtgaacacttaaaggaaagccctcttgaaaattatttactactgaaaccaaawgaaaatgttagagaactttgtggtatattcaatggaatatttttaatttttttttaagagacaggatcttgctctttgtcactcagactggaatgcagtggtgcagtggcctaatcagaacccactgtaaccttgaacttctgagctcaagcagtccttccatctcagcctcccaagtagctaagactacacaggcacatgtcagcatgcccagctaatttttaaaatatttttttgtagagatggggtctcactctgttgccaaggctggtctcaaactgctggcctcaagccgtcttcccacttcagtctcccaaagtgttgagattataggcatgaaacactgttcccagccagaaattttgtttcaaggcatatctctatgaaataggccagaaacttattaggaaagaacaagttaagatgaaaggacaatggaatgagaaaaagggggaaatggcaaagaccacaagacaactaaaaatgcaatcaaagaattaaaacctacattgaaagcaatagggagtataattttcactgaagaaaataagatcaaggctgtcataagacataacatatgttttaaatttactctataggaaaaacattttgaggataggagcaatggcttatttactttttaaaatatcaacagttcttaggtcagaagctggcaccaaataattgccttatggtcaaacagttatttcaatcactgtttgccaaatgaggaatgaacagtgacctgcccaaagtcacaaagccaagaagtggcagcgcttgccttttaggatgcaaactctggactttgcaaaacgcatggaggactattaagaaagggagtttaaacatgcattatacatggtttcatagtgaaccatgttccttaagctagtccttggctcttctgttcttctgaccaccaaccttgtggcttgtcctcccacttttaccctaaccatggtctttggatttaaactctgaccctgtctcttctcagtaaggtactagtttccttcccaccctaactgactcagatttaaaaaaaaatagccactcgtggtttgacctggttctaatgccttccacactaggtgcctaccttggtaagtaggaacaggacataacccaggaatctcttccttatgcttgatagtatcattttctttttgttctggtaacagttgactcctatcatgtgactagctgtttcatttttcttttgatgatacaatatcagcctgaagcactggactaaagagaggtggaggaggtgggggatgagcagcctaatagcatggctggactaggtaccccactatgtaaacatttctcctttccagttgataaatgaagcacagaaaggtgagggctacacatacgattatttaaaagaagcagaatcttaagtaataacagtcggtctcaaaacagtaagcgctgatgattttaggttcattaaaaacaagacagacacgcccccccccacccaaagaaaaatgcttacttttaaagtaagaaaatgacatggtcacacataaaggtagatgaatataggccgggtgcggtggctcacgcctgtaatcccagcactttgggaggccgaggcgggtggatcacgaggtcaagagattgagaccatcctggccaacatggtgaaaccccgtctctactaaaaatacaaaaaattggctgtgcgtggtggcacacacctatggtcccagctactcaggaggctgaggcaggagagtcgcttgaacccaggaggcagaggttgccgtgggctgagatcacgccactgcattccagcctggcaagacagcgaggctccatctcaaaaaaaaaaaaagatagatgaagataaatactcaccatcaggaatagttgcatgttttagggatttttttggtggttatttttattttaaatgttttgttgaatggtttttaccactgcaaagcagtaaagagggcccaggttttgaaatcggacttatgtttgaacttgtcttgaagatataccagtgtatgacctttggcgggttaactctgtgcagctgatctgctcatgaggaagcaggagtggcccaggcttctttgcagggtcactgtcagcgccagacagtaggtgttggcacgatggacagacagcacaacaatgcccttgaattggcagctcctgcttggtggcctttacttgcatctttacgagatggccagtaggatcctgtgtggcttttgaaccctgagcagccagccgtgggcctcccactttagccccagaactgactggactcaccagcccaaacaaccagccagagaagcccaccagtcccttggtcctcacagaaagcaagtttcatacagctcttgagattgatcttctttgttcaagtccttggccctcagtttcctcatcaatacaacaggaaactcaaatgtggtgtaccttatggaatagctagcattgtaggaattttcaaagagtccttgccgtctggtatatatgagcagtttctattcacaaaaaattggcgtggcctttgttttgtggtgtttgggatttttaaaaattattttcctgaaataaccactcaaccactcaacaaagcaatgaccttggagacatatcaggccctgaaaacacaccaaatgcaccctattcatcattggttgaaacatgttttctctgcttcatgttaaaagtacagaactacccagaacaaaaagtgattttctgcttctttgaagagctgtgacttctaacatcagagcgtatgctactcaaactgctggagaggttgaatgctgctccaacaactcttcaaagcaaacacagagatagtgtgtatgtgggagaccaggagagagtcagggaggaagcactgggagatcttagccagtttccaagggactgaatcccagctagctgtaggcatcactaaacagatccagatgtggaaggagtcagcaactcagggtatctgcaagagctcaatagagagcagaggttgcacccctgtggcttttccgatagggagatggatgatagagctggaagctcatgagctaattgaagtagctttcaaatgatgtatttataagctttggaaacacatggtctctttgatatgagtttgtggatgtttttgctgttatttaacactgatttattcrgactttttttttacatatttttgcttatgaaaaatcaaatcctataacaaagcttaatatcctcagtgtctttacctggttttctgattatatatatataatcacaataccaaattggtgttttccaaattggtcacaaattttactgaatatatatatatgttttactgaaaatacatattttttatttgtatatttatatataaatttacatatttatattttatttaaaatatgtattttactgaaaaaatatatatattttactgaagtgactaattcgccagctggtattgtgatttttaataggtaccatttttcaggcacctgatgcaccaggcaccatggtagatgctttccatgtatcatcaacaaccttcacaacaaccgtgcaagacaatgttgttgtcccatttaaaagaagagagaaaccgaggctcaaggagtttaagtagcttactcagaggagaaaagggtataagtggaacgggaaccagtcaattcaaacctgggtcaatgacattctttggggaaaaagaaaaataaaaaactagatctttgtcattactgttgttttcattgcttctgctttgtttttaatgtgcctggcatctttctttttcattttaatgactttttaaattctatcacagaatcagactttcctttcttactgctcctttatctttcctatatacactaaacaacaagtaaaaccagggaatggactatgggcaggagtgtttcccaaggtcatgtggcatgataaaagactgaggggcgaatcaggtggaatctactgggaaggtccaagacataaacaatgcaaaggaactaaggccagaggaccaaggatagagtccattgtgtataatcttggtgtgcagacccaagacagggttagacaacagcaagtatgggccagaagagttgtacagaccagcttcgagaaacagtatatgagcatatcaaaatggcttagacttaaaccctcagaagcaaggcaaacaaggtgtgaagggcctttgggtaaacagcaaacaaagtagtgttgtgtggtgtagaattcaccaatagagtaaggtcatgaggggcagtgtccatccatcatttttgcttgctataataaattacacaaatctagtggcttaaatttattctcttacagttcttcaggtcagaaatctaggttggttctactggttcctccgtaaccaaagaaagtgttcacaaggccaaaatcaaaggttttattggaaggttctgggaaaaatctgcttccacactcatttcaagtggttgacctaatttagtccccatgcagttgtagggctgaggtcccctgtttcccatgttaaaggtcagccagnnnnnnnnnnnnnnnnnnnnnnnnnnnnnnnnnnnnnnnnnnnnnnnnnnnnnnnnnnnnnnnnnnnnnnnnnnnnnnnnnnnnnnnnnnnnnnnnnnnnnnnnnnnnnnnnnnnnnnnnnnnnnnnnnnnnnnnnnnnnnnnnnnnnnnnnnnnnnnnnnnnnnnnnnnnnnnnnnnnnnnnnnnnnnnnnnnnnnnnnnnnnnnnnnnnnnnnnnnnnnnnnnnnnnnnnnnnnnnnnnnnnnnnnnnnnnnnnnnnnnnnnnnnnnnnnnnnnnnnnnnnnnnnnnnnnnnnnnnnnnncccccacccccaccacagtccccagagtgtgatattccccttcctgtgtccatgtgatctcattgttcaattcccacctatgagtgagaatatgcggtgtttggttttttgttcttgcgatagtttactgagaatgatgatttccaatttcatccatgtccctacaaaggacatgaactcatcattttttatggctgcatagtattccatggtgtatatgtgccacattttcttaatcgagtctatcattgttggacatttgggttggttccaagtctttgctattgtgaatagtgccgcrataaacatatgtgtgcatgtgtctttatagcagcatgatttatagtcatttgggtatatacccagtaatgggatggctgggtcaaatggtatttctagttctagatccctgaggaatcgccacactgacttccacaatgtttgaactagtttacagtcccaccaacagtgtaaaagtgttcctatttctccacatcctctccagcacctgttgtttcctgactttttaatgattgccattctaactggtgtgagatggtatctcattgtggttttgatttgcatttctctgatggccagtgatgatgagcattttttcatgtgttttttggctgcataaatgtcttcttttgagaagtgtctgttcatgtcctttgcccactttttgatggggttgtttgtttttttcttgtaaatttggttgagttcattgtagattctggatattagccctttgtcagatgagtaggttgcgaaaattttcacccattttgtaggttgcctgttcagtctgatggtagtttcttttgctgtgcagaagctctttagtttaattagatcccatttgtcaattttggcttttgttgccattgctttttgtgttttagacatgaagtccttgcccatgcctatgtcctgaatggtcatgcctaggttttcttctagggtttttatggttttaggtctaatgtttaaatctttaatccatcttgaattgatttttgtataaggtgtaaggaagggatccagtttcagcttcctacatatggctagccagttttcccagcaccatttattaaatagggaatcctttccccattgcttgtttttctcaggtttgtcaaagatcagatagttttaggtatgcggcattatttctgagggctctgttctgttccattggtctatatctctcttttggtaccagtaccatgctgttttggttannnnnnnnnnnnnnnnnnnntcacgatattgattcttcctacccatgagcatgaaaatgttcttcccatttgtttgtatcctcttttatttcccttgagcagtggtttgtagttctccttgaagaggtccttcacatcccttgtaagttggattcctaggtattttattctctttgaagcaattgtgaatgggagttcactcatgatttggctctctgtttgtctgttgttggtgtataagaatgcttgtgatttttgtacattgattttgtatcctgagactttgctgaagttgcttatcagcttaaggagattttgggctgagacaatggggttttctagatatacaatcatgtcgtctgcaaacagggacaatttgacttcctcttttcctaattggataccctttatttccttctcttgcctaattgccctggccagaacttccaacactgtgttgaataggagtggtgagagagggcatccctgtcttgtgccagttttcaaagggaatgcttccagtttttgcccattcagtatgatattggctgtgggtttgtcatagatagctcttattattttgaaatacgtcccatcaatacctaatttcttgagagtttttagcatgargggttgttgaattttgtcaaaggctttttctgcatctgttgagataatcatgtggtttttgtctttggctctgtttatatgctggattacatttattgatttgcgtatattgaaccagccttgatcccagggatgaagcccacttgatcatggtggataagctttttgatgtgctgctggatttggtttgccagtattrtattgaggatttttgcatcgatgttcatcagggatattggtctaaaattctcttttttttgttgtgtctctgccagggtttggtatcaggatgatgctggcctcataaaatgcgttagggaggattccgtcttttctattgattggaatagtttcagaaggaatggcaccagctcctctttgtacctctggtagaatttggctgtgaatccgtctggtcctggactttttatggttggtaagctattaattattgcctcaatttcagagcctgttattggtctattcagagattcaacttcttcctggtttagtcttgggaaggtgtatgtgtccaggaatttatccatttcttctagattttctagtatatttgcatagaggtgtttatagtattctctgatggtagtttgtatttcctgtgggattggtggtgatatcccctttatcattttttattgcgtctatttgattcttctctcatttcttctttattagtcttgctagcagtctatcaattttgttgatcttttcaaaaaaccagcccctggattcactgattttttgaagggttttttgtgtctctatttnnnnnnnnnnnnnnnnnnnnnnnnnnnnnnnnnnnnnnnnnnnnnnnnnnnnnnnnnnnnnnnnnnnnnnnnnnnnnnnnnnnnnnnnnnnnnnnnnnnnnnnnnnnnnnnnnnnnnnnnnnnnnnnnnnnnnnnnnnnnnnnnnnnnnnnnnnnnnnnnnnnnnnnnnnnnnnnnnnnnnnnnnnnnnnnnnnnnnnnnnnnnnnnnnnnnnnnnnnnnnnnnnnnnnnnnnnnnnnnnnnnnnnnnnnnnnnnnnnnnnnnnnnnnnnnnnnnnnnnnnnnnnnnnnnnnnnnnnnnnnnnnnnnnnnnnnnnnnnnnnnnnnnnnnnnnnnnnnnnnnnnnnnnnnnnnnnnnnnnnnnnnnnnnnnnnnnnnnnnnnnnnnnnnnnnnnnnnnnnnnnnnnnnnnnnnnnnnnnnctggtacgttgtgtctttgttctcgttggtttcaaaaaacatctttatttctgccttcatttcgttatgtacccagtagtcattcaggcagcaggttgttcagtttccatgtagctgagcagctttgagtgagattcttaatcctgagttctagtttgattgcactgtggtctgagagatagtttgttataatttctgttcttttacatttgctgaggagagctttacttccaactatgtggtcaattttggaataggtgtggtgcggtgctgaaaaaaatgtatattctgttgatttgggggtggagagttctgtagaagtctattaggtccgcttggtgcagagctgagttcaattcctgggtatccttgttgactttctgtctcgttgatctgtctaatgttgacagtggggtgttaaagtctcccattattaatgcgtgggagtctaagtctctttgtaggtcactcaggacttgctttatgaatctgggtgctcctgtattgggtgcatatatatttaggatagttagctcttcttgttgaattgatccctttaccattatgtaatggccttctttgtctcttttgatctttgttggtttaaagtctgttttatcagagactaggattgcaacccctgcctttttttgttttccatttgcttggtagatcttcctccatccttttattttgagcctatgtgtatctctgcacgtgagatgggtctcctgaatacagcacactgatggttcttgactctttatccaatttgccagtctgtgtcttttaattggagaatttagtccatttacatttaaacttaatattgttatgtgtgaatttgatcctgtcattatgatgttagctggtgattttgctcgttagttgatgcagtttcttcctagtctcgatggtctttacattttgacatgattttgcagcggctggtaccggttgttcctttccatctttagtggttccttcaggagctcttttagggcaggcctggtggtgacaaaatctctcagcatttgcttgtctgtaaagtattttatttctccttcacttatgaagcttagtttggctggatatgaaattctgggttgaaaattcttttctttaagaatgttgaatattggcccccactctcttctggcttgtagggtttctgccgagagatcagccgttagtctgatgggcttccctttgagggtaacccaacctttctctctggctgcccttaacattttttccttcatttcaactttggtgaatctgacaattatgtgtcttggagttgctcttctcgaggagtatctttgtggcattctctgtatttcctgaatctgaacgttggcctgccttgctagattggggaagttctcctggataatatcctgcagagtgttttgcaacttggttccattctccccatcactttcaggtacaccaatcagacgtagatttggtcttttcacatagtcccatatttcttggaggctttgctcatttctttttattcttttttctctaaacttcccttcttgcttcatttcattcatttcatcttccattgctgataccctttcttccagttgatcgcatcggctcctgaggcttctgcattcttcacgtagttctcgagccttggttttcagctccatcggctcctttaagcacttctctgtattggttattctagttatacattcttctaaatttttttcaaagttttcaacttctttgcctttggtttgaatgtcctcccgtagctcagagtaatttgatcatctgaagccttcttctctcagctcgtcaaagtcattctccatccagctttgttccgttgctggtgaggaactgcgttcctttggaggaggagagacgctctgcgttttagattttccagtttttctgttctgttttttccccatgtttgtggttttatctacttttggtctttgatgatggtggtgtacagatgggttttcggtgtggatgtcctttctgtttgttagttttccttctaacagacaggaccctcagctgcaggtctgttggaataccctgccgtgtgaggtgtcagtgtgctcctgctggggggtgcctcccagttaggctgctcgtgggtcagggttcagcgacccacttgaggaggcagtctgcgggttctcagatctccagctgcgtgctgggagaaccactgctctcttcaaagctgtcagacagggacatttaagtctgcagaggttactgctgtctttttgtttgtctgtgccctgcccccagaggtggagcctacagtggcaggcaggcctccttgagctgtggtggactccacccagttcgagctttcgggctgctttgtttacctaagcaagcctgggcaatggcgggcgcccctcccccagccttgctgccgccttgcagtttgatctcagactgctgtgctagcaatcagcgagattctgtgggcgtaggaccctccgagccaggtgtgggatatagtctcgtggttcgccgttttttaagccrgtctgaaaagcgcaatattcgggtgggagtgacccgattttccaggtgcgtccgtcacccctttctttgactcggaaagggaactccctgaccccttgcgcttcccaggtgaggcaatgcctcgccctgcttcggcttgcgcatggtgcttgcacccactggcctgcgcccastgtctgggactccctagtgagatgaacccggtacctcagatggaaatgcggaaatcacccgtcttctgcgttgctcacgctgggagctgtagactggagctgttcctattcggccatcttggctcctcctcctgccaccatcttttaagccagcaatgatgggtcaaatctttctcatgctttgaaccactccgatttctatttctgcttcatctctcctgtcttcctcttctactgtgtcgcttgactgactcctctgcctttctcttctgcttttaagagctcctgtgattactctggatccaaccagagaatccaggataatctccctattttaacgtcatctggctattaaataattctatctgcccagttcctttaaagcagggcctcagttagtgtttaattgaataaccagggtacagaatattgaggggacatatttaggattctgcttaccacattgtggtagcacagtcatctgcatttctcaaatgtggataggatttaggcaatgccaagtgttagcctagattccagacacttactgacacctctaaatatttttggtaagatgtgtccccctttctcttccaagcgggtgattatctcagacttgtcctccaatgtcccttttccctctagaggcttcctataaatctttctctgatcctcctcattgccttgtccatcagctccaccttcattattgactgagcaagcagagcatttctgcctctccattgtgttctggaaagctttcagtgaattcccctgagccttggatacccccatcaagctctgatgaccatagaaaaatctcaggacttgtgaatcccattttcttgtcttttgtaatcttttgagatcccttgggaaactatttttaagccttttttttcttgctaatatgtataaacacttcaattcctttaacaactaggaaggaaaaagtgtaattgctaatacatttattaataatctcaactattttagaacctatgaacctataatttataataccaaggtttagagcagtcatttccacaatttattgtgcattaggactgtggtgaaatgcaaattgctggacccacaccaaaggttcagtaaatctagagtaggatcccaggaaacctacactcgactaggatcccaggaaagagttgagagaggtgccgtagtttagacagctactaagttgcaagatttaaggtgaagtccagggtggacagtaaccatctgtctcttctttttatagtgaatggaagtgtgtaggttgataagtactaaggcttcctcaaggagttcttgcaagagtccccccactctgtgtccctgggcactcaggggcttctccatactcctgcatgcctgtacctttaacattatggtcccagcgctgatgagcaacttctgccctggcttccctacactgaacagtcactagtctccagtgcccctcattaatatcctcagtagtacccacagcatggtgaaggagatacgttactcccatatcccagtaaatgaatgggattgagcctttcatgcaattcgagagaaagagaatgaacacttattaagagaaacggaaagaaaatgaatacttattttacttttgtaagtttactttacgttctgggatacatgtgaagaacgtgcaggtttgttaaataggtatacatgtgccatggtggtttgctgcacctatcaacccgtcatctaggttttcagccccacatacattaggtatttctcctaatgctctccctcccctccaccccaccccaccacaggccccagtgtgtgatgttcccctccctgtgtccatgtgttctcattgttcaactcccacttatgagtgagaacatgtggtgtttggttttctgttcctgttagtttgctgaggatgatggtttccagattcatccatgtccctgcaaaggacatgatctcattctttttttatggctgtgtagtagtccatggtgtatatgtgccacattaagaaaatgaacatttaaatgccacctctttgcacagttggcaccataagagttacaggagtatgtagctcttgtagactcagtacagcttactgaaaaaagtaattcactttgcaaatgatacctcatgtaatcctcacaaaaataatttgaggtattatccctttttttgtggatgaaaaaattgagctcatagatgttacaaaattcatatagtgtcatgcagctaaattagagaaaatgtcaatatttaaacccaggtgccttcctctaaagctcattgtttcaattggcatacaccgctaacctcgaaaatcccaatatttacataagtgctttatattcataatctaggaggttaaaattaggcaatgcagttatttgcattgttttggccattatatatagttttcatgcaccctaatattaattgtaagagctttctcttatagttctcttcattacacaatatccaaaatagataaaatgtgcttacccttgcaactctcacatcgggcttccctacacatttgtctgtctcgcccaaacattcaaaataggcacaggcacatcaataaacacactccttctactcatgcttcctctccacttcctcttgttggaaccattcagcctccagctagggaatcagttcatctggcctatcctagccttttcagccatttcaaagctgtgcctctcccaggacttctttggcactcccagggcactgtcaccacctcccttcgaagacagctccccgagggtcctttgtagcctctcaagcagtcttcatggcactccttgcaaagttccgtcatgggttgactgggctgaggtccctggtatttgagagaaaattaaatggacttaacgatcatctgcatatcagatgagatgtcaaggaaacaaggacctcagaccacagtgtctttgcacttgagagataaatatctttcactaagtcacatttcaataccatggctctagtgttagtggtgagggaatactggaaacggttgtatgagaattgtgtttgtggcttcccttttgatactgaataccttctatattatgatccatgcaagaaatctcttctagaatttcttcccaggaataattttgtctcccttcaaggatagctatgttttatttatcagaaaaaaagctatttcaccctcatgtgtccctttttgccatagctgctagcaagctcaggatttaaatttagtgctcaattacattgattatatcattctcagtttctggggaaaaaaattatcctcccgtttctgctctatgatttctgagctctggaggcactggaaatttagagaagggtccgtgatatctttttgcatgaataccaatgctttttggaaattctcgtggatatctgctggggattaaggaagttaaatccagctatgtcacaccctttcttctctcttatggattcttactaattgagaaggatatcagaacccattacattatcagtattattatacaaagcactggggttcctaataaatattgttaggggaatgcatcttatatacaaagtcatattttacccccactcccaacaaaaatcatccaaatctggtcttcaggagtgggtcagccacacagaggatcatggcttaatcctcttcccattgatgaccagagagaggaagccaaagggaggcagcctcctggacaggctctagaacagtgcactaagccatggcccagcaacttccctaggagaccyaatagcagaggtgctgttgaggccaggccagtacaggagagacagagaaaccgtgtgtgaatggtgttcatgactagtgatcattgccaggaccaccgcatgctagcatggtgcaggcagctcgcagaaagtgttcagctcagggatgttcagctcatgactggtgttcatgactagtgatcattgccaggaccactgcatgccagcatggtgcaggcagctcacagaaagtgttccactcagggggctatgaccaggctgaaatcctgcttactctgcacctttttataattcatactcccagatggggtgcctttttcaaactcaagacaaaggctctatatgaggtacagggacccttccttttaccctattctcataaaagccacttctctgatgagaaagggtaagtttagggatggtggagggcaggtggcaacatggagcaagtaactaaaagtgttcttccagtgttcttttctcttggggcatggtctcctcctctctgattgtgtgaggagctgaggcagtaaactttgtccacctgtacttgtagaatttaacaaagaaggataggacataaggagagaaagtggtgtctaaaaggtgaaaagaagcattgaattgtcactggttcatagttcacagtgctgagtgaattgtcactcagcaaatattaactgagtgcttactatgttccaggcacagcactggacattagagctttggtgagtaagacgagcaaagaccatcagaacacctacattctggtgtccattctctgtgttcccttaggcacattatttcctcactgtgaaataaagttccataatgtcagcattgttcatgttctctctgagttccagaattcttaccatatgcttaggtctctgggaaactttgtgaaggatgttctttcacagttaatggcttaggatgattcagcgccagagttcttctcgtgtctctcatttaaattttccatcttcttgtgtattaaaaaatcaaagccatcattctaatctgattgcccaattatttgccaagaaaaactgtcagcaggtagctctactgaatgtaggaatccccgcatcaacagacttagataaataattcagcatagctggagcataggatacagagtgaggagggacaagagtaaacactggagaagaagcaagggcgagcccaggaagaagcacatgagacagtgaacgcatttctactgtgaaatgagggcaatggggagaacgttttacagggagtaacacgatcagatttgcatttaagaacagtcgatctagctctagtatggaaaggagcacaattagaaacagtgagatttgctcagggcctctgtcagcaattaggaaggacataatggtggcttgaattaaggaagtgaatgacagtaaggatcaagaaaaggagatgcattcaaaagagatttgggagatcaaatgtacaaaactttgagactgcttaaatatgggaagacaggggaggtcaagaaagatggcttctggccaggcgcagtggttcacaactgtaatcccagcactttgggaagccaaggcaggtgtatcatatgaggtcaggagtttgagaccagcctggctactaaaaatacaaaaaaattagccagatgtggtggtatacatctgtaattccagctactggggaggctgaggcagcagaactgcttgaacccaggaggtggaggttgcagtgagccaagatcacaccactgcactccagcctgggagacaaagcaagactctgtctcaaaaaaaagagggttcccaagtttcctggtttgggtaactgaatggtgcctgtgcactgtcataagccaattgcagtggggttcagggtgaaatctggagagagtaattaaatggggccagagaatatgaaggaagggacctaggtagaccactcagctcccttattttgatgcaaaccgcatgtccatacctggttgagctcaggacaacacacaccataggaactgagtaaatgaatgttggtgaattaattttataatgtgataatctaaagtgaactatggtgctgatgcccacaaaagttgggctcggcttgaagaacccagcagccctcaccctttagaaatgtcccaagagaacaccttgatgagtgggagacatgaaagcaggactgtgagcaagtcctgatggcatacaaatccggcatcctgttcagttctggactctctcagagattgacatactccatataaacatccgattctgattgactttaatgggatccccttgcaacccacagattctaagttatcccctagtaggtataatatttgtaggagacatattatattaccctggattggacactgaatgctgttacactgaagtctgacagtagcagaactcaaaacaagatcatcttgtactagaatgccactgttagtgttgatttcttgtaagccacagaaaataggtatttgtaagaaaagaaaatgttttaaaataaaaagtatttaattatcgtctaagaaatatcaaacataatcttcctgtggtatttgttttgtttttgtttaaggtcagggtattttctcttggggaggaagggatagtttttcccaggtctggagattaaacaacttaataggcatttcacgttccgctcacaaaaaggggatttgcatatgaacttgtttcggcaagaaaacacatctgaacgtatttcatgggaactatctttatccacggcagcttcttttgamcatcttcttcttttcttcccttcatgcctgcaggtcaccggattgaaactgtctcaggaccttgatgatcttgccattctctacctggccacagttcaagccattgctgtaagatactgtaatgccatttttaaagagacttagagccatcrgtatactctaggccactggctccccaagatacagcacatgcttttgtgacagagattcttaattaaaagattgtttgcaaaaaagagattcttgtatgtctggaaggaagtgttgatgaaaggcctcacctgctttaactaataacctcacataacaaaaagctgaaaggagttaaaatctgtgaagattatacttgtcatttatctaatttgtcttctaaatttaattaaatagaagcaagcaaacagatgctatgtatgcttgcattaagaaaagttgttaagaatgtctgatttataaaatacattatattgttcactttgcaaaaggattcatgataggggtcctttaaatagtaagcttccttagaacatgaaagtgtttgtttttagataattagctgcttaagtgaggttaggatgattagggaggaagaggggaatttaaatctgaaatgttaggagtttctacactaaagataaatcaaaaatggaaatgaaatcctaaaagcttaaccattgtctaaagaatcttcttatctagaggtggctatggatgggctacaagagggttctaatcctgaaatcacatccagaaggttgtgtgtgtgcatatattacaaagtgcattttaggagagtagatcatggtgttcggggtctcacagcaggtatgtaaccgaaattaagttaatccagtgaggcttagccacttctgaaaagagaataggaattaacagaaaggaaaaatcagtttatctaattttaattcaaaatttatttttcagtaacacctgttttaagcaaatatgtttaatgctatacgtacatatatgatattcaattattctgtttcttcacacaactgttttcataactttattcctttaaactatatgtatatttattcacaccaccaacagaagtgcttttttaatgctcagatttgtccatgcaccatgtatgtgcaataaagaatggaacctcccagatagtaataatactaatactgaagggatataacttctttaatgcaactacatagaagtatggaatcagtcaacttgattaaacagcccttttagattctacactagttttactatatcttcctgaagcaattttcttattggtcttaatagcttggccaattcagtgaaatcagtcaaatatctttatgcatggaaacttggtcaaaagcacacaattctgacatctgtaaaaatgtaggaaatgaacagtaagatgaaaatagagaaaaaaagtgtgcatcagtagtaaagataattatttagnnnnnnnnnnnnnnnnnnnnnnnnnnnnnnnnnnnnnnnnnnnnnnnnnnnnnnnnnnnnnnnnnnnnnnnnnnnnnnnnnnnnnnnnnnnnnnnnnnnnnnnnnnnnnnnnnnnnnnnnnnnnnnnnnnnnnnnnnnnnnnnnnnnnnnnnnnnnnnnnnnnnnnnnnnnnnnnnnnnnnnnnnnnnnnnnnnnnnnnnnnnnnnnnnnnnnnnnnnnnnnnnnnnnnnnnnnnnnnnnnnnnnnnnnnnnnnnnnnnnnnnnnnnnnnnnnnnnnnnnnnnnnnnnnnnnnnnnnnnnnnnnnnnnnnnnnnnnnnnnnnnnnnnnnnnnnnnnnnnnnnnnnnnnnnnnnnnnnnnnnnnnnnnnnnnnnnnnnnnnnnnnnnnnnnnnnnnnnnnnnnnnnnnnnnnnnnnnnnnnnnnnnnnnnnnnnnnnnnnnnnnnnnnnnnnnnnnnnnnnnnnnnnnnnnnnnnnnnnnnnnnnnnnnnnnnnnnnnnnnnnnnnnnnnnnnnnnnnnnnnnnnnnnnnnnnnnnnnnnnnnnnnnnnnnnnnnnnnnnnnnnnnnnnnnnnnnnnnaaaaattagccaggcatggtggcgggcacctgtagtcccagctactcaggaggctgaggcaggagaatggcatgaacccgggaggcggagcttgcagtgaactgagatcgcgccactgcactccagcctgggtcacagtagcgagactccatctcaaaaaaaaaaaaaaaagagagagattttatatgtgccaagcactgtgctagatacattacacacacctgatttaaccttactacgtagatattataattcctattccacaaactagaaacctaaggctctgtgtgattaattaacttgtgcagggccatatagcttgtggcagaggtgggatttgaacccccagcattctaaaacaaaattagacatgtgaagtacagtcatctgctacataacgttttggttaacgagggacttcctatatgatggtggtcctataagattatgayactgtatgtttactgtaccttttctatgtttagatatgttcagatacacaaatatttaccattgtggtacagttgcctacagtattcagtacaataccatgccgtataagtttgtagcccaggtgcaataggccatactatatatagcctaggtatgtagtaggctataccatctaggtttgtggaagtacactctatgatgtttgcatgacaaaatcacctaacaatgcatttctcacaatgtattcccatggttaaaggacatttgactgtattgaggaacttttattttcagatttgttaatgttattgtataaaagagtcatagaatgaatagcttatattgaaatgaataatcttggaaaatcagagtggtgtgatattcccccttttgagcacatgctaagaggaggacatgaaggatgaggccaaacaggagggaccaaggggcaccatcacatagtggtaatgacagttacctttcgtcagacacgactgtgtgccaggcaccaaagacagtgccttgcctactggtagcttaacactgtaaccctgtaagtaggtgggtttgttctcattttacagacaaggggaggaccatttgccgaggtcaaacagctagagtatggtagttggaatctgaacctttctccatctcactcccaggcttctgctctttccactttaccatgctgcattttcctttgatctgtttgtaaaagctacatgggtgaaataagctttcagatattcctaagaatcgtttttacttaatatatattagaaaatatcattaatttggccaggattgtctcacagaggttcctttcctggtaagagtactgcagcagaagtccagaaatgtataaatgaggttaaacttaatgcgggcaggagagaggaagaaaaaaagccagctacattttctcaagtaccacacacttggaaaatcaatcttgtatttaatgggccgtacatgtattaaaagctatcatatttattctgtccattgtcttaatgacctttataataccatgaaaggaaggcattttaagacagagatttttttcaataagccttttttgtggagtcaagtgaattgtgaggggttcagtctgttttgcaaatgtatctggatgtgctgatcttttaggcaaaaaaatgtgcattttaatgaggtattctgataacagatattttcccataatgttcaacttgggaaaaaaaaatgttgtttcattagccctgaatattgccggagcacttatttgttgtcggtcaactgaaagttaagcaaatttctctctatatatagtcatatctttgggtgctgttttgtaggggtgaaatgaaattaaagaggattgtaatcaagttaacttgggactgtgcaaaaccctccatgaagtaaaattctctcttgatcatgcttaattgaaagacctgtcaaccacccggtttatccatagcctgttcatctatagttttctttgcagaacagacccttaaaaggtactatttgcatttgaagtctcttgatttgcattcggttctgtacattcccagtggaatagcctaattttaatttaaatttctctgtgaaaacattttttccagaaaggtgagcacaaaatcattttcacacaaagccctttggtggggcatttcagtagggtggagtattacacagattggagtctgggacaccgaaagggaaggtcctctaaggaaccgccagactgagtgggaaattccagccgacaataccacatgggggagagacaggctgtctgtcacagcccctctcgagggagtgcctctcattcggatcatttctttccttttcccaggaaatgtgctttgttttattcttgtctcaggcctgctaatcgcaagcccctaggtccctggttttagaaatatcaaagataccagtttttcctgacatttccatacaaattaggagacagcaattctcccattccatacagactgtattgcttagtcaaattatatatctcctaagtggagaaaacaatatgcaggtttcacatttgccttaagattagagatgctattaaagtgcatagcagagtgcctagcatatagttgataaccagaagaactctccttgtatgcacctttcgtgagctggacacttctacaagttttacctttgctgcctacagcagcagacttgtatggtaggtattactagatttcatcaagcctaagaccacatttttaatttttttgcatgttgacatttctgacaatctatagaatttttaactaaatgaatatgatactattattcccatggcaaaaaaaaaaaatggcaattgagttatagaaaggttaaggtacaagaaatatgtgaaatgcctaaatgccagcctgggttttttgaattcaaaactcatgctcttagctactacaattcatgccgttagagcagactggggttgcccagaatccacaggcatcaaatgatccatgatggacttcaggcatctgtagacctcctgaaattatttatagtactattttgtatgtgactttttttttctggggaggtcagtaggwtttggcatattctcaagggggttcatgaccccccaaaaagcttaacaaagaacatctgggaataatcagccctagttagtatgtaggatctggccttatatggcacaacatgtttgaatttttttaaacacactacatctgtagattgtttatggaggcccaggttttacctaatccatatttttaccagattcatgaatagcttcaacaaaccctcaagacctctgggctagaactgctgtgccttttgctcctgaactgcccctgtccctcatgatttatgccaaaccaattaggatttcatgtcctatggttcccagatcaccctctgaccactcctgtccccaggttcccccatcccctggggtgacagctccccagacagccttgtcaaaggaggctccatttgccctctacccccaacccccctaagacgtgaggtcagggcagcatcctgctgacttccaaaaccctgttccttttttttttttgagatggagtgttgctctattgcccaggctggagtgcaatggtgtgatctcggctcactgcaagctccacctcccaggttcacaccattctcctgcctcagcctcccaagtagcttgcactacaggtgcccgtcaccacgcccagctatttttttgtatttttagtagagatggggtttcaccatattagccaggatggtcccgatctcctgacctcatgatccgcccgccttggcctcccaaagtgctgggattacaggcgtgagccaccgcgcccggcccaaaaccctattccttaccttggctaaactccgattcttcttgccctcagctaaaacacctcctctccctcactacattcctaggtttcaacctgaacaatactgtcacactttcactaaaaaccaagatattggctcatgccttcttcttggtggctgtgccatctgtggagacacattgtcctcccagatccttgactttcttatctcttctgacttctcttccctcctttttagcaattcactcccaggtctacacttaggactgtgacatctccccagattgctcaatctctaaacatttcaaagacttgctacccaccaaaaaatcctcttcctctattttttctggagcccctttctcaaacatcaccatgtggctgcccccttatggccacatcacagttcatctttttgtttttagtccttatcccaaataaattttgattttcgaactctagtttttgaactttcaagtaaattaagatttttcagatgttcaactatcctatctaaaactgaagaattctacattgagattcacttccataactctaaggcaataatggtttttactgagtttaatgaacttagcaagacagacatgaggataatgcatattaggaagatattaatgcacaagaactgagacacaaggctgaattgaaaatatggtgaagccctgaaacaaccagggaatggatttggctcagaagtctccttttagagaaccactacctggtttcaggcaatagcagcggtaattttagcccttagccaccctgaagccttggatctcaccttctttatgcagttagagccctctttccatgattctgctgctggattttttggtgctttttctaaggaaaaagcctttagttcccatttagtaaaggaagactgaccaagataccattgactctgtttcagagtactattgcaatcactgctaatacagggcctgggctatagtagacactcattaaatatctgtttgaatgaactatgttaccattaactgtgttgacattgtcaactgtttttgtcagtgttgtgtaactactgatagaagcaaatggtgtaattaagagggttttggaatcagtcaggcccaacttgaaattcccactctgcgatttaagtaactgtgtgatcatagacaacataatctctgtgagtctcagctttctgagatagtgtatgtagagcttagtacagtgtctagcactgagtagacatttaagaagtgttccctagtgtttacttttgtgactatactgatgctatcttctgcttttcctttcaagttggggactcgcttcattatagaagccatggaggcagcagggcactcaatcagtactcttttcctatgtggaggcctcagcaagaatcccctttttgtgcaaatgcatgcggacattactggtaagtctgggaaagaggagagaaggtcactttttggcttggcagcaaatgggcatggccaagttctgggtgaagtgagaataggaggatatatgcggtatgccagattattagaataatcctgaagtctttatattcacaatggagaaagtgacttctatgacgtctttatatgcatgatggagaaagtgatttctgtgtatatccaaccattgaataatggtgagaaataacacgagagaagttggccaggactagatcttaattcaagcatttacacaacagttttgaatacctcttctgatccacacattgtggagaatattgaagatacgaagatgaataggacatgatccttgctccccaccacccaggaactcacagtctattgaggaagggagacagcaaacaggcatattaaagatagtatggcaaaagcttggcgtgagaaaagtacggggtatcatggaaacatagtggggcaccttgtctggtttgggacctaatggcagctcagggcgtgtggtctggaagaagtgataagaaagctgtcttgaagaaagaatgcagaggctggatgctataggatctgtgggtatgattgcagactgggaatttgagccctaagaccctgagatcctgtgattccttctcagctcatcagaatcagggatcataatagagatgcagggaatcacaaataatgggctgagctctttgtgatatcagcagacagtgggggagaaggatccttagcaagcccctaggacccaaggaaggggccccattggcaggaggctttctgttgtcgcagagagtggcctggacctctgtctctctggacctgataccctcaccccttttactccttgcccctctagtgtctcctggggactggagacccattctctcccaggacccatcactgggtggccaggtaccaccagggcagggcaaggggagggaaagtggggragggttgtacccatcccatagtcccaactccagcctgataagagcccacttgaccctacctccatttatcattatcctttgctgtccctcatcccctactttcttacctctgacttctggccaggtcaaagtccctgccccattatatcctccatccccctctaagccacacagattcctgcagatgagagccttgtctaacacgatggacgtaactgatctttgcacatcatgagatgaaactaagtaagtcacttattcccagcttagagataagcagactgagacacaagtctgaggacagtaagaaaagcatacagtcagccgggcacggtggctcacgcctgtgatccccacactttgggaggccgaggtgggcggatcacctgaggtcaggagttcgagaccagcctgaccaatatggagaaaccccatctctactaaaaatacaaaaaaaaaaaaattagccaggcgtggtggcgcatgcctgtaatcccagctactggggaggctgaggcaggagaattgcttgaacctgggaggcggaggttgcagtgagccgagattgcgccattgcactccagcctgggcaacaagagcaaaactccatctcaaaaaaaaaaaaaaaaaaaaagcatacagtctaagggcagaactattgggatgtgaagtatagaaagtattaccattaaccaagcacctactatgtgtcagtgtgaatcacgctgtagacacttaatcctcccataccaccaaaggtagaaatcggtgcccccatcttacagacaagcaagttgatgggtgggtaggtgaattaaattggctatctaaagtcaaacagccagtatggggcaggaccaatattgtaactgtggtgtgtcggggcccaccgtccctttgtactgtactgctgacccaggtttcttgacttttctgccaagtttgtaaccagttgatgatgacgccactttcctgagatgtccaaaaccctatagaagtgggccgttcaaagcagaaggaggaaagacataaaaagagcccagattgccttataattgtcctcaggagaaaaaccataacattttatctaaaaatcagctggctagttcagataacattcaagcttaaaatttgatctgtgacattccaatttctagacttcttttttttttttttttttttttggattttttggtagagacagggtttcaccatgttggccaggctggtcttgaactcctgacctcaagtgatccacccgccttggcctcccaaagttctgggattacaggcatgagccaccgcacccggccccaatttccagccttctgatagccaaaaaacttcctatctggatgcaagaggaaagatgaaagtcagctttggagaacacagtactctagaaaatgggaaacagggcctcccagagcagaacagctagctgtgagtgaccccggcactgactccgcgctgcagccctggactttgtgaaaatgggtcatcttccaggccctacatccctgggctgactcagaagcacggcggggagtgcagcggcttcacagaaagttctgctttggaaactgttctcctctaggctgttgaatgaaaaggctgttaatcgttatttggattccgattgaaactggaccttttgtctctaactatggaccagttacagttccagacaaagagaccttttatttagcctggaattcctctgcctttggaagcctgtgactgacaagtgatggcaaagtgcatctgcctttgaatgctttgggttctgctaaactcattaatgcatcagataaaatagttcacattccagccaaagctgccctcttcctctccttcacccaggactcagagaaaagaacacatttgcatttgtccctgtaaaaggcacgtacacaagcagccagtatagaggtagtgtcattggtgcctttaaacattgtattgctctagttttcctacaaagacagttagggaggactgtagacctggaacatgattctcagaaatgcatgtgaaaaacacattcgaatttgggagatttttttggagatagtgtggaacagtggaaaaagcagatcagctctgtgactttgggcaagttactttacctctctgagcctcagttccctcttctgaaacaaacaaaccaaaaaacattatcatctccctcatgtagatcactgctgaggaataaatgcttgcgagtttgtgagcatcaaactctgtgcctagtccaagtaggtgatcagtaaatgtcaattctcttattccatctaggaagccccatgccaaaaagaaagaggggcatttgagggaaaaaaaaagcagcttattattttgaaagtgaatctttgccatgttgagaacagcctgctctgtacaagcagggagagcggggccttgccagcttgggaaatgctgtctacatgaggaggaagaacctccttgtaccctggtcatttggttaactgtggtttcaagaaatacttggtatgtactaagtaattgttaagtttcccccactgacttgggactaaatgttccttcttctaagttttattttttagtactggtagtttcagtaggggtttccctcttctggtcttactcattattttaattatttgttctttcatttattcactcaaaagcattctctgtgcacaccagtgtgccaagccctgaggttggcacagggatgctaagaagaacagtaatgtccagccaagaggttctttataaaacacagaaaaagtgcccttggtcttatgaccaatatccagagtgagtagagtggggacccagaggacaaaatgtgtcggtgtcagtcaggtccaggcagggaacagatacacactccagttaggttaaccggagggaagttgaatagtcagtgtacagagctgtgggcagggtgctggaagcccagacaaccaagaagtaccttgggatactaacagtgtttccacccctgggctcacaagggtgagggtagggagcaggcaatctgagcctggtgggatgtgtgaagagggcagcccagcagaagcttagccaaggatgaaaccagagggcaggggcccacagctgtgatccccactggccagtctcccaggctcagagtaggtggagggaggaagggaagaggtgggattggtcttagaggcaaatggaagcagtggattgatttcaccctgggtaacaggtgtgaggagagacttcagaagtaaggtaaactttaagaataacaactaatgctaatttagtgctttctctaagccaagcaccattttaagagccttattataatagcagttttaattctcacagcaactctatgagataggcggaattttaaccccatttttcagatgagaaagctgaggcacggaaagattaggtatcttgcctaggatcacacagctaagtcagtggggaagccaggattcaaaccctggcagtctgggttcagagcactttgggcagcaacttgagagctgataggggattcaccaggttcactcacatctctggttcgcaaggggaggggcctgtgagtagttcctccctgctcacaactcagggagcttttggcagggtaggaaggcccgggaagtgaatggtgtttggaggcactgtcttcaaaaacgtcccaggtccatagagaaggcttgatggtcatagtcgcacacccatctgtatcattcctaggattcttcaacggcttgcagtgctctctcctgctggtgtcagcacagccctgtagtgtggcctggcatctgtccttcccctctggatggttgatgggaacctttattgtcccttccccacttatccagtttttagtccaggtctagtacatgcatagaggcttcacttgccatctacctgaattctaacagtagcagccatcatttctccagggcttactgtaggccaggaaatatgctaagcaccaagtgtgtgccctctcattaagcctcacaacacacctgtgtggtacatcttatcatcatccccattttacatttgggatgatccccatttgcatttgggaaccaaggcttaaagagtgtaagtgacttactggacacagagctagtggaaccaggaaataaactcaggtctgagcttctcccagcattcccaccccacctgacaccatgttggcaatgtcttaagtcctggcccagttgagagctggtattcctaaattctctggggtgtctgtgggaatttactcccctgccctttttctctgggtagctggaggaaagaattgagtggggaagtaatgggatgtagagagagtgtcttctcagacaagataggaaaagaaatctaggctttgggaaaataactcttatggcttgagtagaagacagtttttacaccacaagtttacctctgtaaagtttgctgccatctcccgattagcagactaatctatacattatagacctaagaatcctaaattatttctgttaatcttaaacctaccatgaaccctcaacctctgggcattggcatatggagggctcctccctgcctggtggactcctgctcacccttcagatgcctgtttaagcctcatctccaccgtaatctgtgatgaccgctaccccagaaatgtaagtgactcatcattcagtcacttaccatgtgctagatactggtctaaatgccagggattccgcagtagtcaaaacagagtccctaccctcaagtagcttaagtttttggaggggagacagacattaaacaagataagtaagtaaaatacaatgttggaaggtgggatgaagcagttaagggggtaaggagtgttgagggaagttgtaattttaaatctgatggccagggaaagctcagtaggaaggtgatgtttgcggaaacacttgaaggatgggccggcaattagcatgtgggcatctaggaggaagtgttccagacagggaacagcatgggtaagggccccgaggcacactcaggaagcagcaaggaggccaggactacgtggctggaaggagaagaggaggatatcagagagggagaagtggggccagatctgggagggagagccccttgtcagccactgtaagggctgtggcatgcaccctgagagaggggagaagcccctggagggatgaatcacaccctctcttgctatctcctttcccttagcacatctcagttagagaaccaaccccctccgtagccttcatctctctcatccatttccctctgaaacctgaatagcagggcacagtccgattcatctcagtattccctcggccagcagagcgcttaataaacatcagtggatctgaacttgaatcaaatggcaggtagcagcttgcagaagcctgaaaaacctgggcactgaggtctcgtgagttgatatatatggtgttggttcccttgggctcttggctactgcaccagcaggcacaggcagtgaaatcttttagaaccaaataatcccaaggaataaagaagggaggactgcagggagtcgggcggggggcctgctgctgccctgatgtcaggtgtttttgccactgcggctgcttgttggctcctcacactcccctggctctgctccctaaccaaggtgtggccttgtcctgcgcaggcatgcctgtggtcctgtcgcaagaggtggagtccgttcttgtgggtgctgctgttctggktgcctgtgcctcaggggatttcgcttctgtacaggtatgtgaagaccagggggtgggctgtggctcctcccctgtctgaggccatccttcctcttgacagcagctcgcattttacaaaatacacacaggatataattaagaaatgataggttccagccagggaaagcacaaacacttctagcctcagacatatttattgcagttttcatttgacttggcctcggttcgtgttggtcgttctgtttttcagttgttttttttctttcttctttaaaataccttttaaattattccttttaaatttccccttgaccacttttctttgagcacatgaaacaggtaaggctcaaaacttcagtgtttcatgtgtatttcagatttttatttgcttatgtcaacctcaccattttctaaataccttgaaggcctctatcaacaagagacacaaatgaaactgtcagtatgaaataaaaaaggaattaaaagggaaaataaggaacaaagatataggaagaaggaaacaatttggtggctgtgattaaacacataatttggctcagagcttcctggcaggcaagacaaaaaagaacacatgataaattgcataattcttactttcaaaaagaggaaacatactagtttctggtgagagggaaaacttttcctcycaccaaattgcgaaagacyttgcacacatggggctttgtggagaggttttgagtgctaaaataatacaaggtaaacaatgaatgtggtatgraagctaagagcatacaggctctggcattagaccacctgggctcaaatcctagcttgattacctaccagctcttgtggcctaaacagtcttctctgtacttccactcctttatctgtaatagtaattgacagcgcatcgtgagttctgtgtgtcaagcatgctcatttagtccctgcaatagctctattatccccattttatagttgaggaacctgaggcataaagaagttaaataacttggcctaaatgaaacagctagtaaatgccagaatcaagaagtctggctcccacttctcaactgaacgttcaagagatatttgttcagcaaagcagcagagtccaaatgacttgcccatggtctcaagcttaggactacaagccaggtatctagtagctcagkaattagagctttgtttattgtgaacctcttatgttccagacactatgctaggtgctttttgtataatcttcctaatacctataacaatgcttcatgagccacagagattgggccatagagatccaaaatttaagggtacactattgggaacagacagatgtaaaagtgtgatgctgtttgtactgcattttggaaaatgtggtacactacacactatccaagcctctgaaactaatgactgtgaaatctccctcacaaggaattaaatccactcatgaattcttgtggattctgagtgagtctttaaacaaaggtggtatagttcagttctcgactttttctggatagtctcgtcctttctcaaaaatagcacatggagatatttgttgttgaaatatcaatgaattgtcaattattattttagtgtatcagctgacggagatgttctcacaattaaatatcttgcccttcctgcggcaaattataatagttaaaacaggggggatgcttactaaggttctgcagaggttaccctgtgttgtgaactgaatatttgtattcctgcaaaatttgccctgaccctcaatgtgatggtatatggaggtgggtctttgggagctaattagggttagatgaaatcatgagggcaggagcctagtctgatgggttatgatggtctgatgggcccttatacaaagacaccagagagctkgcttgttctctctgccatgtgaggacacagcaagaagtccatttctataggccaaaagagggctcccacgagaccctgacattgctggcaccctgatctcagactttgagcctccagaactgtgagaacatagatttctgttgtttacccagtctatggcattttgttatagtagcctgagataagacacctcatttaatcttgacagtcatcctgcttgcaggatgcgtgtttttatccttctgtgataggaagccaagcttcagagatgttttaagtaatttgtccaaggctacacagaaagggcagaagcagaattgaaatgaaggtctctctgggtctatatcttatcctgtcattcttyttctaatttgttcgatttgttttttctttaaaaatattttctggcttcttaagtgttcagtggtgtattttctgaaaagaaatgccataggtcacaaatcaggasatagtctgtagctcaaacagagaatagcctttcaagatgaggctgctatactagatacatcataccatgactcatggcttcattgatatcttattcaaaactgggatctccagctccaaaggaattccactcacatcttcccctaatgggaaactgagcttaattccacactgacatcttgactacatgagatttgctgttagtcttctgtaacagaatctaagatatagtagatcagatttggaactgatgacttgagtagcagctgcaaggctcacagcattgtaaagacaagctcatgtctcctattcaacccaaggatgtgtgtgcctgtcctgatcgttttcaggagacacaatctagtaaagggagccaccagctgagagagtcctgaggtcttatctgtcatcacttacctgacagactccccatagtctggagctctgtgcttgctttactgtcctcagacgatgtcacttgttctctctgggtgcttgttttatttgtctgttttatgtattttttttaatgtttaaataagaattgccacccatatgggactatcgagataaagagcctttgaaagttccagtgacctctcaggtgtaatcaatatcattagaatgataaaatatttggaactgctttggaaatgaaaatgcatgtagacttggcgtcatttgctcccctccaaagaagaggggccaacctttgtgccccaggtctgaggaccagcttcagattctggcaaggtgaggcaaaattgaattgctttctttctgtgattcatattttcaacctgaacttcaacacagtcttttctttgaacttcagggaccctggcttggtttgcagggtayctgccttyccctccttaagaaagttgagcaattcctgccagcacctcaactattccagcaagtcagatgttttatcttctcatggaccacacatctggtggttagatggaggatttcacytcttatctagataggccaattttggtagactcaaccagagtcacctccttcagatgctgggaaggctgggaagaatccagaggacccagacagtagaggtaggaaaaacttttatgtgcttgaggagacagggttttcataggcccctgaatggatgattttcagccgggggtagagtcctatacctttcttgggtgataccaatggatccacagctgtagattttacttgtagcttttgtagactctgtgtatctcaattctgggagaattttatcaggggaagggagactggatggaatattctggtgggcccttaatgaaagattggccaacaacaagatctattgatattgcaaattttgaaacatgctgacaattcctagcttccttcttttgttcttttatccattcagattctccttctcttagtttgtctctgtctctcttcccttgtcctttcctgctctctctctccctttagacatctaaagtcttcttactatttcttgtcaaattcggatctcacaaaggatactgacatagccattcgttcattctaaagaatacaatgactaatactatcttaaagagttgcccctctttagaaagggtgttttccttttagtagttttcaaaactgtgtctttactaaagagaacagtctccttgtggacaagtattcttgaaggcaaatcatgatcagctttatatctgcggtttaatgaaaaatatggaatcaagccacagatatgctgctctcacagtaaaaatttagctattgaataagtgggaggggacacaaagaaggcagttcacttcccctccctttactcttaggaatgtggaatccctgcagtcttgacctctgtgacctttctacttgatccctcccccatcatcagtagagtacaaaatgatcctctgtaattctgaatatcttggaaaacaaataattataattagaagctgagagtgttccataacacttctctaggctcccaggtcctggaaaatcaataaactggaaaaaaactaagtttatgaaatatcactatgcttacactttctaagcacagacagttaaaagattctaagaaatacaaggacaaataaataaaacaagaagcagtttcaagtcgttgtgagagaaaactcaatcaaatggcaaagagacagcaacatgaaatggctctccactttctgtttccttcaggccccctgcagatgtcattagctttctgtaatttcttatcttcaggggcagtttttattcaagtctatttagacaaaacaagctttaattccagcagtgctatttgtcttgaaccaccaccccccacccttgaaaaaaaggagtggaggaagcatctgaagcaaaaatcagtaaaaggagacagtgacaagagatcaaaatgcattcagcagtcattttaaggggagtaccagtgtaaagaaaataagcccttggaatcagccaattaatcacagaccttccttcctcccactgtgtgagtgttgccacccctgtaaaccactgactccatgcactctcaccatcaactttccctgtcacgttccagacagactcctgtgtcttcaagaccaatacatgtaagtggccagttgagagctgtgattactcaccctttctgtaatgtgtgcccacaagataaaccatccatgctgaccgcagtggtctacccttgaggtcattccttgcaaacatcctcattgcttagctgaaacctctacttctgttctttttcatgaaattcacttcatttagggccagttatactcatcacctgttatgcatttcagagcctatgatttttgtatataacatgtctcccattctattttattttgtaagagtcaactttctgtgatttttttttttagctctatttggctttctgtcacgataaataacagttttgctatttgcaaaataaagctgattatcattattttagtttccagaggttagaaaaaactgaaataccgtagatgttcagaagtatgaaaccatcccatttctcggtgcattcaatttagtttacttgcatttttttctttgtctggaatactaacatttcatgttcattggggacaaaaataagaaaatttaattaagatgagtgaaaatatgaaaacattgatcttgttatcctaaaataacctattttaaattatttacttattaactatttaatattatggtttctattctcttagtctttttgtacatattttaaaatcattttatacttttaaattacaaaatgtattatacaatgcataaagttttatctttttagacctttttcctatactcaaaaatatgtagtaaacttctttatttatcatttttgtaggctgcataattttctacctaatagaatatattatagcttatttcaccagtcctccagacttgaatatttaggttttctccattgttttaaagaatgctgcaactgacatctctgttactaaatgtttgcacacatcctaaattatctctataaaataaaattagaggcatataattgttcaggcaaaaagtgtgcccagcatttagggttctgatacatagtaataatttatactcccatcagtagtgtctgaaaactcagggtttacatttcttgtatataaggaatctcttgccatggattttagttccattttagttctatttagctttcatccccaggcctcttataatcctacttatttcacatatggtcctgatattatcagcttttttttttagtagccttttgccctttgctgcttaagcatgtgtttctggatgagattctgattcctaattaaatagattcagattactgattgaattttctgagtatcctgtcccatatgtcagtgtccctcagaaagtcaacagaaaactttggaatggtataataattaataattgaaagaagaattcaattaagaatatgaagttggccctaacattcattattcttattgccacacctggttaacaatacattcttttttttttttttaagagttttttcgacccctccagaaaaaaaaaaaaaatagaataaaacaaaaatagatcaggttctgattaattataaaacctctggtttcaatccagtttgcagaatgataccataggtataaaagtcaaaacattagctgaaaattgtaattttttaaggaaattatttcaatataagatacacatcatttgactctcttgttccttacagagtgatccaagaacaggacctgttactttccatccattgtcatttcatagaccccttgaagcaacccagtggttggtagcagcaatctttgtgcagatgaggactctgaagctcagaaatgttgtataacttgtttaatacaaagcccacgctctttgtattccatcagaccatatcctgtagatacatatacattgctagggaagtacactatggcaactgagacacctctcacaaggtggtatggtttataaaaaatagcattatgtatttgtcatcattgcttggttgagtgtccaacacagaaataaaaataagcagggtgccctctttggcatggaaatattctaattcatttccccagagaatgaccatactcaccagtattattttgctctacttrtttgcttttaatcataatatatgcctgtttactttttgtagctataaaaaggtagataaaagaagcactttaggtagatataaaaagcactttaattaagaacatgaattaaaagatacttcaataatgaagtacaatagattaaggaatactttaatagattaaaataacttgaattaaaagatacttaaatgctattgttattaacacaaaggtttaggctaacaaaacgcattttcccaaatatctctctcacctccccccacaatttttattcaggaatgtaagaattgggcttttataaaagcaaccaagggctaaacatctactaagttcttagaaactttgaaggattacagaactctctttctataataaggtttacctgtttgacttgattttgttcaagatggcatttcatactggtgtaaacctaaacaaaaatgtgtaagatttatctcatagaaagacgtgcctgtaagtaattaattcctcactctaattactatttatgcctttactttttattgtaaacattcttgttggaataaactagaaataggttttttttctttacactaaaataattcatgaatagcaatgaaatccatgctgtataatattcaaatgagagatcaggaaagacaaggcttttagttaaatcagtaatattctgtgatggggaaaattgccttgaaaaatacacacacacacacacacacatgcacacacacacacacacatacatactactagaaaaagtttgaggttcgattcagagtgtggaaggtacagtgtcttaaaagagtttcagttgcagcatttaggcagatgatcaagaatatgcagaagaaaacaaaagaaatcataattatagtttcctaacagaggtatttgatcctctgcagtgaaccataaaaaactagcgtgggatcagaatcttgagtagcatgtatttaattgtatgcatttcaaagaaatttgaacattttaaaaagttacaccatatgaaaaattgtatataaagacattttctataatattataataattttacaaatgaggaaacagggttagagagagtaagtgagttaccaaagccaatggctagaaagtgagagaggcagaatccaagtactagcctgggattcccaaaccaaagactgttcagctcagccacaagtggaaatggattcttatggggctaagtgattaccattactttaaaaactagtatcagaaatagatgacaagaatttaaatgtatatcaaaatatccctttggtaaatgttagtgtcctcacaggtaaacagagggcaccctcaaattwgagtaatttgagagggtttaaaagagggactgtttacaaaattgcagtcatagagacatagagaaatcacagggagaatgtgaccctcgggtttgtaacagctgggcctgtagaggcgagggaaaagtgcagttactggatgcccagaacagagggctgtgtggagactgcacagtgaccctggaagaaaagggctgcactgttaaccctattctccctctctctaatctcctgcctgcctcaccattggctggaatcagaatcagagagcaagggaacctgttgatgtattctgtagaaggccacatctctaagctcagaggagggtgggaaggaatcttcagaagcacttggagacattcaactgagtcacccascctggactattcagagcggtctgcagactagagggcagtctctaaatggtttgttcagatttgctatgaaacaaggaacttgcatcagaatgtaaatcaattatgtcaccaagtgtactgtttagttcagctgtcattttattcatagcaagatgttctcaatgaaggaaccggtgtgctggcttacatcctggggccaactcctttcaccacagatgggccctttgaatagcactaaactagattccttgctctgtaggtaatgataaaaacgctggaatccctttccttgttttgattttcctaccttaacttctgctaaagagaagaataacgagtatttttctgtacctaccctgagcctggcactgtgctaaggtactttagatgacatttaattcttgcaagttagattattcacttcatctttacagacaagaaacagggccagaaagtttaagtaatgtgcctgtggtctagcaagtgagagagccagcactcaaattcagatcttactccaaagtccatgcccctcactgtttgtaggctatcccaggactgtgcttaaaattatctgacattaacaccaagaaataaagcagggttgttgggggattgccttatatggagacctatgactatgttctgtatacatatgctatgcatgattcctgggaatagataaaacccagctccccccaaatcagatggcactgtttgtgaatacgatgttactccacgttacaaggccttgtccagcccagccagccaggtcagagatgaattcagtttgtttctaagtggctgttgtctgttgccatctctttttaaacctgggaggtcaggaagaagatagggagaaagaattcatgagagggatgcatttccttagaaatgttattaattggctgggcaaaacaagagaaggaaataaaatagctgctccttactaagtaaaggcatcttcttcccttatctcattaaaaattaaaagcactcttggtttaagtagggcaaattagtaattaagtgctatataatgaacttgtataaacagaatattgaaggggaagccaaattaatcactctgctggcttgtttttgcccccattaatgcaccttttactcaggtccttcctgtgataccaggatgcattttctgctctcctctgctgctggagattgggtgggctgtgatagttgggctgacagatgacagtggactagatctggaaaagtcatgtgtaggggcctcgatggccatttcattttttaagccaaggctcatcagcacaagcctgcatgtgacgggaacagccttagacagtagcagggcaaggaagaattagacacaatgtcggtacccaaggaattcccagtctactggtggcgggaggttgggcacagatggatacagttatgaaaaagtctaaggtgtaatggcaaagactatttccttggactcaaatcttggctcagccacttaccttgggtgagttacttagtttctctgtgtctcagaggcctcacctgtgaaagattccattgcaattactctgcaatggaatgatggagcatttgaggagtgacttccactgtcttaagagggctgggaaagtcttccagaagaggcaacctttggctggtgacggagctagaactcagggtaccgtgggaccccccaggcctatgctcctcatctttgcagcatagtgcctcctctgaaagcggaagaaggagcttgggcctcaacccaggacaaatctctctccatttcagctcaacatagtaaatattagtaataacatctggatcctcagtctcatgatatgttagcaactacctgccaagtatgtggggtgaggagtagaaagagtaagtgagctgagtccatcacaggctgggtaagatgaaatcaaatggagcagcagaaagtagccctctaagtcaccttgctgaacctcacggtgatgccatctcctcggcttgctagctgtgtgaacacacctggctgggcaagctacttaatttctctgatctcagttccatattaactgaccccattgagtttctgcaaagattctgtgaatgaaagcacatttagcacartgcctattcagcagaaaagtactattatcattccctgtgttcatttgatcttcaccacaaccctatgaggtaggtggcatcattgtgccactctattaagcaagaaattgaggcaccaagctattgaaaatctcgcctaaggtcatctagatggttagtggcagaacgatggtttaaactcaagtggtctggctccagccctgccctctgcgtatcccccacagccctgtgctttggagggcacctatagctaggtttgcatgtcacatgctagaaatagggtagacgcttctcaaggatgtccggacctctctctcactactgaggaagaagttatttccttctgcttgagggaatggtggggcagagcctacagctgtggtgaccctttgacaggtggggcaggtagagcaggcacaagtgactcaccagggagcattagccctaggatgcagtaggaatgcagctgctgcactgatcttggcagttttgattagtgaacagaataatttatttgtcattcatactctgcttccataaaggatttaagaaagcttacaataagtgactaaatagttactggaataaaactcataagttagaaatgatgtaaaaagaggaaaatacacatatatatacatataaacatgggaagataccagcaaaggacaaggtgatttgattctgtatcaggtaggagaaaagtactagaaaagtattagtactaatatttgtattcaaagtactgccaaagaatgttgaaaatcagattgttttaattctggattggtgagtgccacaccaaatatctatgggacagatctggcttatctatgggtctctgatctggactaggcagttattattatttttttttaaatgaggtctcgctctattgcccaggctggagcgcagtgacataatcatggctcactgcagcctcaaacacctgttcaagcaatcccctagggggttactttgactgaacttcaggcaaccaaggcaaaactgggaaaagtgtcaagtcatatggagtcaaagaattataccaattctttgaaagagaccacatttttccttataccaaattctaaaatcattatttctttaaaaatgaacttagaaatccttccatgggaactcttatagaagaaggcagaattcattatataccaccttgctgagagcccagatcataacattgaaacctgacttcgggtctaggataggctgggtttatagctttttggagatgtcacttgactcagkgatagaaccaagaatacccagtttggtagagagatagcatgtcccttcacctttttccatgaatattccttcccttggccagctttgcaaacaaagctgtgttactgacctaggagtgtctcatagtacctcagtactaaagctttttacaagcctggcatcagagaagtgctaaaatgaagcacccgtcaatcgagaagggcaacagatgttgaagcatatcaaatatcagtaaacagcaagccacagagactgctgaacttggcatcctcatagcaaaaataccctgttgcctttaagagagaacgctgtggacttttataaaccacattaagtgatgtatttttttctccatttggacaattgctaccctatgaaatattttccctgaaagatggtctgctatcctctattatttttttttaatctctacttttttaagggcaaacttaatgctcacagagtgttctaggctctcagccctggaaatataggtctccagaaattgagaggagtttcatattcagcttatctagtaccctctcttttactattagccgtatgattcatattataagtaataaatcgagctgtatttcaatcctgtagctgtgcactagattagtccctttacctctctaagcctgcttactcatttgtataaaaataagactattaagaacacatacctcatgcaattgttgtgaaaattaaatgagatgatatgcaagaagtatttggcacagttgctagtatgaataaactctcaatgagaggtatacaaaattatagcaatatttatgatgatatctatcattactattagctgactataagtcacatgctgtgttaatgctttacatatattactgaaaggtggctgggctggtcctttgcctgtttgctctcagagagtgctccttcccctgctctgctgtgtgttacacttcctaggctctcttgcacctggcctctgagcaggcttggccattgggaggtaatggtgggagaatgactgatgtgcaggcagaagtcaggtcatttctccccttcactacagcagcagctgcattttctgtctgattccagctcccagcctctctcagatcccagttctggccactcagcttttctttggtttccgttctatactgacattccctgttcctggctctagtcacaccactgcctcctgtcatcccttgattcctaagaggggtagcatctgtctgctgtcggtaacctctgtgtggcttcaacaacctgttgggcttctaggtctcttctgtcactaatgaaactaatttcttttttttttttgagacacagtctcactctgtcgcccaggctggagtgcagtggcacaatctcggctcactgcaagctctgcctcctgggttcacgccattctcctgcctcagcctcccgagtagctgggactacaggtacccaccaccacacctggctattttttttttttttttaagtagagatggtgtttcaccgtgttagccaggatgacctcgatctcctgacctcgtgatccacccacctcggcctcctaaagtgctgggattacaggcgtgagccaccacgtctggctgaaactaatttcttatatttaattcctcctgttcaaagacctagagtaggtctttgggctacctagctaacttgactggtagtccagctacctgactggactctgactgatatcattgcttttaactactaaaagaaaaggtagtccttatagagaattcacttctcctcctctccctgttggagtgagccaagccaactggagaagggatggctggttatcatggagagacgttcacttggactaaagctcaaaagacaataaattgacctaagcatctttgatgaatactgcctatacacccagctgagtttggcattgaggccaggagcctcaggtagcttaccccctctctgaggagacaagattcaagtacaagtcatagccaagcacactacaagatagtgtctagtcagaaggaataggaactcctctttcttgagccagagccctggaccattcactattctaggtaagtaactataatagatatgtgattattctcacatgaaaaatgaggaaatggaggctcagagagggcaagtgatttacccaaagtcacactgcaattaagtagtggtcttagcagcttaagtctgtatgtcctagaacctgtttatgggacttatatctgttcctcaaagttttctaatctttttgtcagtttcaaagcagatagtaagaaaactacatacataattcatattgccctggtcttgtagaaatgaccttacagaaacaatattcarccttattcacctaattctcagaacaggtttatgtggaaagtttattgtgttcattttttacagatgacaaagcagaatcaaaaaagtaaaggaatttacccaagttcataccgaacgttcatattcaacctggaatttgaatgcaggtttttctctccccaagcatatgctctttccacttggggacgtccaagaactggaccatatgtagtataagaccaagtgttttttagaatttttttttttttttgagatggagtctcactctgtcgcctaggctggagtgcagtggcgcaatcttggctcactgcaacctccacctccctggttcaagtgattctcctacctcagcctcccaagtagctgggattacaggcacctgccaccacacctggctgatttttgtatttttagtagagacaggatttcaccatattggccaggctggtctcgaactcctgacctcaggtgatctgcccacctcggcctcccaaagtgctgggatgataggcgtgagccacctcgtctggcctagacatttttttaaaaggttggggagaaaggccaggtaccctatcttccaggaacagacagttgggttagagaagtatatataaagtgacctgaaaccagagagtgctgttgcataatctactctctggtagtgactaccagcaggaaagagtagcctggctttgtgtaagaaatggggcttgaaatgggctggagtggaaacattaatttaggacaggcagagaagcagcaggaagagggatttttagataaaggtgctggtgagagcaaagaaacagatrcagacagaacggagatcaacgttaactcctgggaagggtcccagttcaggagtagtgaaaaagaaagttggatagataggaccacagttgattacaggtaggggttgttaaccacaaacagatcaattaggaatttgatcagcagtcttgggagtactttttgctcagtattcccttatcctttaactgtcttttaaaaaaatgttgcaagctgatagtctcactttaaaaaaaaaaacgttaagtccttcttagataatactgctttctgcttaagaaaaatagcttttaaattagttcagcctgtgagtaataataaaagtttattacttatctctcacagttttgaagagtctctaaaatagaagggaatactctttaaatgcccctaaagtgctatcctctttcactacagttcatttgtgtatagggtgttataaaatcacacatttgagaatttcaggatggagaaagcaccttctgaagcaatgtcattgagagatggggagcaagccgctttctaccagctcaaaatctactccctcctccctccccagcccctccctgacacctgggcctagaggagcctgtgtgttggatagagttgacggcagtgaaattcctaccaagttggccctttcagtttcacctgtcagtgtctctgatgaagagggatcttgacaaaccagactggtttggataattggactacagcagttgtcttcatctcagtaaactgactaaccactacagaggctggaggagaaatttatagaaaatcctaaaatggaaattgaagcaagtgtttcaatgactaggaaacaacaggctttagtgaggttccaacatattatagtatggtggggtgctgggactcctgtcttcaaggggcccctaaaagtgatagaggggattcatttagtatgccccagctgccatttaagcactttgtggttattggctcacttagtcctcacaacggtcccatgagatcctgatattagttgtactttgcacacaaggaacctgaatcaccaagaggccacgcgctttcccaagcttacatagctggtaaaaggtgaagctcagatacaaacccagattttctgactctgtggtctgttcactgtaaatactgaaacccatctctataaagctcctttgggaaactcatcttggtgaggcccacctctacacggccctacccccatgtgcccatctcttgcaccgcccttagatgttgccatgtttgctgatctcactcaagtgtgagcttccatataagggtccaagtcttactgatccttagccagtagtcagtgctggatacatgtatgctgtaccagactggaggtgaagttttacagagactttgtaatcttcctgaagctggctaagaaggcagccacctgtgactagttacacagaaacccagccacttaaagcagtggcactgctggggatggacttagatttaaagtcgctagcaggtaaaatctgacctatgtctccagaaacaactttacttgtgcacattagctgtgactgtaaactgctgcttaacggttctcacttgctctaatttttcaaagactgactccccagtcattagagtctgttctgttactagtaactcagtggatgatctggaacaagaggtctacctctttgggccacagtttcctcatctttaaactgaaagaatcagattctggttttcaaaaatgtaaagcagtggaacctttgggaggccaatacagaaaacagaaggtgaactgtgtctctggcttatccatcacaccctctttccccactgcctggcagccttggagggtctttgctgaacataagcactggactagatctttccaaaggaaataactgaaaatattataatgtttaataatgatacttaataattcaataataaagtaacttcaaaatagcctagcctaccttgagaaaagcaggttggagggccctcaccatggggtcactgtgcctgtctgtgttactgtcaaacattgtgtgttccaggcacggaggggtgtcagctcagcctgataatgtacagtggattggggaagctaaagcctctgggcctcattctccttggctgaaaacagactgcgtgtcatggcactggtgaattagaaattctatccagccactcctggagattgattttccgtctggggatctgacctcttgcttcactagcagaggggatcagactgttctgggaggagtcaacgagctggccctcagaaaagccttctctttcttttttgttctttttttttcttttcttttttttttttttttaactgtatgtttcaaagggaaagtctgattactttggggacttaacactaccagtttgaattcttcttggtacttacagccttaagatatccatacacccccacatccgtcctttgtgctagaagattactgaagatttaattccatttatgtcattggatttgtaaaaaaccccttttggattcaaagatgaaggcctcacttactttatttttgtcattttcacagaccccttatgtaaatgcctcaagagtaagaatcttgctcaagtgatttttgtatctccaatggctaacaaggagcctgacatagagtagctgcttggtaaatatgtgttcattcattcaacaaatacccccaaggtacaacgataagaaaaataactatagtcctaatactgatcacctctgcagttgactggaagagacagttaaaaagataagtacaaataaatgtatcttgggttaagtgctataaaggaaaagaacaggttcaatggaaggaaaaattagaattgttgatacatgaatggaagtaaatgacccggacttccaactctaaatctctgtctcatttcacctctttgtaaataatcattgctattatgttaaatatcacaactactgtcatttcttgtttacccactacattctaagcttggtgctgacatctttgtatttattatataaaattctcaaaattactctgcccgttaggctttcttatcacttattccaaatgcaaaaataaggtccagggaagataattatgtaacttgttcatgattggagagctaataagtgtcagagatgaattgaaccaaagttggtgtgacaaagcctctgttttaagcaaaagggaaaaaaaattctcattaactccaaggattatcatcaggagtccaacagggttcccaatttgggaactactatatcattatcatatggcaaatggtccactatgttagatgagaggacaaaaaaaaaaaaaaaagttgggggagaaactttgctgtagagtgggagggaaaaagaggaagatagtcttcttgcatgggccgtcttatcagcctagcaataataaactatcaccatagcaacaggaagtctaattgatggcagatgttgagccactttaaaagccacgccaactgaatgccaagctgatgctgtaaacctctctcctctcccgcggctagactaatcatgctatggtcatattggagagacccatctttcaagggtggaagaaactctggacttggcatcagaagacttgagtctgagcctcacatctgcccgtgctgagctctgttgccttgagcaagtcagttcatcaaaagtagaagatagttatcattaattttatcatcattattactaccagtagtaggaactctctgaaattcaatttcacaatctaaaagatagataatatttgtgtaagcatcgtcagaaggtttaaatggaataaaagatgtggaagtgcttagtaaactataaagtaattcacaaatacaaaatattaacaccaagagacagcttgacgtgctagaaagagtttgcattggcatcagacagatatggctgcttacagactgcttcatctgaacgcatcacttacatgctcagcctcagttttctatcagtaaaatttcttagtgtaaatctgtaaaatgttctacccatgttacaaacctgtggcttaattaacctctctacacttcagttactcctctgtaaaatggaggtggcactggcacctccctcataaggtcgttgtgatgattaagtaagttaatacaggaagaacatttagaacagtgcctggcacaggcagcgtgtcatacatattaatggtggtaatggtagtggtggtggagaagaagaagaggaaggagaagaggaggaagaaagagcaattgaaatcatatacgtgcatagaactgtgaaagctggtggtaatggtagtggtggtggagaaggagaagaggaaggagaagaagaggaaggaagaggaggaggaagagcagttgaagtcatatacgtgcacagaactgggaaagctggccaggctcggtggctcacacctgtaatcccagcactttgagaggctgaggccagtgaatcccttgagcctaggagtttgagaccagcctgggcaacatggtgaaaacctgtcactacaaaaaatacaaaaattagctggatgtggtggtgtatgcctatagtctcagctactcgggaggctgaggtgggaggattgcttgaacctgggaggcagaagttgcagtgagccaatgttacaccactgcactccagcctgggcaacagagtgagaccctgtctcaaaaaaagtaaatggccgggcgcggtggctcacgcctgtaatcccagcactttgggaggctgaggagggcggattacaaggtcaggagatcgagaccacggtgaaatcccatctctactaaaaatacaaaaaattagctgggcacagtggcgggcgcctgtagtcccagctactcgggaggctgaggcaggagaatggcgtgaacccgggaggaggagcttgcagtgagttgagatcacgccactgcactccagcctgggcgacaaagcaagactccgtcttaaataaataataaataaataaataaataaataaataaataaataaataaaatactgaaagctccatgtgatacaagtgaggacctccatagtcaatgtcaaaatacttttggtcagttcgtggactggttcacatgtcttatcagttttctcaaagtttccattgtctacatagccttttttgtcatgcccagtatgcatgcctgctctgatccttggctatgaagttttcaatgggaaagggacaaccaggacaaagaattggtagaaaccatgagaaatattttctcagagaccaaggtctccacaggccaggatttctcagagtcttcttcgatatattaaaaagtatttctggaaaaaattagtttgaaaactgctatgatgttcaagataactaggtgtcttttttttttttttttaaagagatggggtctcaatgtgttgcccaggctggactctaattctgtgcccaagaaatcctccctcctcagttttccaggtagctgggactatggatgtacttcacagtacccagctctaactaggcgtcttcatagcaaggcatctgttaagactttaaaatgtaaacatgcattgtgaatctcccaggttggataggcatagagagtatggtgtttcccaaatttacttgatcgaagaattagtttttcatggagcatcttactttgctaaagtttcaagtaccaaaattgggaaatgttgatgtaagcccatagccaagacaatcaagccttaagcatagtaccacaaaacaggtttgaaaactcctactaatccttccatcaattcatgtatctatttaacaaattaaaagagttctatatgtggcagtgactatgtgctagatggtggagaaacaatgacaagcaagactagtatattctctaccctctcagagttctggtgggcctactggggagagggaaaagttgcccactaattttattgcaatgacaagtgaaaagatggagaggacaggtgccatgacaccgggagcagcggcttcttacctaacctggtgggtcaaggagagtttcccagggaaaataacttctaagtggagacccaaaggaggagttacagctgtaggacacataggagcttgcaacacactcgcccatgcattccatgttgtatcctcatgacaacctttcttggtagatgcaatgagagtggtaaaagttactaagtggtcattacgacctaatgagttcctactcaatgagtcaggcactgtgctaggcatcttacaaatttattgcatataatcttgacrgcaatgagcagtatcctcagtttacaaatgagaagttgaggctcatgggagataagtggtttcccaaccctgtacatgtagttagtacaaaaccaggactttcagatctgcctgattccaaagcccattacactgtggtcaaccagtgctgggcctggaccgtggctggtccataacagggtttttactagtcagaaatacggaagagtaagcagaatgtcatgagttcttccttaagctaatttttttcttcttaaatgacatattatcctgagatgtccccctcccaaccatttgatgtagaaagtcctgtgggttttttttttatatattacttgtcagagaaaactttgagcttcttcttagcaaaataaaaactttctaaccatatgtcagtctcccaagtcattttggaagtgttgccatctatgaaatctaaaaatcatggaagttctgtgtatgcaactttctagaacatattccttctaaaagtgagagaaatatgaaccagcacattgctgtgagttctgctggttcaaaattggatgagttgctgaattccatgggcaccagcagccaaaaatggagataaaataagatcaagtgtcatcttccaaaatgtacagacataccaccagtgacattcaggcattctacgtcctggtttatagacaccctttttctaagttttaatagatactagaaaagtacctagcattaaacctgggttttcatgaacatttttccctagaaaattttaaaaagaaagaaaagtttttttcccaggacttaaagaaatattttatgactaatcaatactataggtagtacttgagaaaagaaaataattgtgaagataggacctgaattactaaaatgtgtgaaatagtacgataatatgtataaaagtgcctcatgcataaaaggccccagtaaatgctttcttcctccctgattcacatggtgagcaagtggcgggggcccaggactaaacctcatagcatcagactcccagtccagtgctccttccaagakgcctttcaattgttttctttctgtctacctacctcacactgtgtccttcatctctctgtctagcccccaggaaaagtgcagcaagtgcaggtatttctgaaatgacgagtggctcgcaaaaaggatctgatgagtgttaatagtaagcaatgtgtacctaagagtgtagacactattagcatttggaaaaataggaatctgaactgagaactggaagggcccttagagatcatcccacacaaaccctctttttacagatgaggaagttgagacccagaaacgggaagtgctttgtgcatggccagagagctcgttgctgatcaaaccaggacaagcatccatatgaaacacgcaaatgtaaaattacatgaaaaaaaaaaccctttacctccagatgtrctgctttccagaaaagtggcgaggaaataccacaaaaatacctttacttcaaaaaatttgaaaatgttgaaggtcatgcttcatattgtgccaggcaagagaacattgtacataattgtaaatcaccattggaggaggtggtcctggttgtattcttttgtttgtttgtaatacacataacataaaatttatcatcttaaccatttttaagtgtacrgtttggtggtattaagttcattcacattattgtgcaaccatcaccaccatccatctccggaactcttttcatcttgcaaaactgaaactttacccgttaaacaataactctgcattgccccctcccccaacccctagcaaccaccattctactttctgtctctgtgaatttaactactctttagatacctcatataagtggaatcatacagcatttgtcttttgttgactggctaattgcatttagcataatgttctcaaggtttatccatgctgtagcacgtatcagaatttccttccttcttggttgtattcttaatgcaacatagcttgttctctgtgatctgctgattataaccatcgtcgctgtgaagactttggcgtgcttaacatttttgtgacttctttccagtgggggaaatagatagctcagttgtggacgatagcagcaatgggaagcagtatttgagaagaaatcagactctcttcttccagtcttttgcaagtaggtgacacaagaggtaaacagaattgcatgctgtgcccctccacatcaccccctattttctttgtttcttctgcccaaggcttcagtcaatcagagaagcaatgagagttgaagattttaaaagtgggttttcaaataagacaagcttgggttccagtcctacctctgaaacttactaaatatgtgatcttgggtaacgtgattgaactctctgagcctcagttctgtaatctgtacatagagataataatacttttatcaaaaaagcatgtcttttttttccttctgattgatgagatgctttctgtattttttctggatttaaacatagtttccaaaggtaaaatattaatagtacttttccctgtcccattgggttgtttagaaatgtgatgtgatatatgacattttnnnnnnnnnnnnnnnnnnnnnnnnnnnnnnnnnnnnnnnnnnnnnnnnnnnnnnnnnnnnnnnnnnnnnnnnnnnnnnnnnnnnnnnnnnnnnnnnnnnnnnnnnnnnnnnnnnnnnnnnnnnnnnnnnnnnnnctcatcaaaaacactgagtagaactctattatgatacttggtcctttacttcatacttttctatcttcccagctagtcagaaccatgcccaccccgcagttcccaccccttggtcagtacctagcattatgcccagaaaaactacagatgtttttttaaaaatttccccctccaacccccacacccccattaccaaagtgtttctataatgctctgggaatcagcatctcaattcccccatggcctcatggttaaacataccattcatttgacctctcaactgtgacaaagaaggaagccygggtgtagaaactgatttcagctcccctctgaagttgggcgtctctctttgctgaccacttgggaatttttttttcttgcttctgacccacctctcccctttcttttgataaacaggacagctgtccccaaagggatgaatccattacctttcaccagagttgagttcgttttccatttcatctttctgcttaaagagaaagccctttaaaagcgcagcgcatacattgagtgcgtgtacttaatttttaatatgtgtgtgcccacagccaagagaacagagaaccttaaataataatgaaactgaattgtacatgtcgtatgttttatgtggcactgattcctaaatatgctcctagcagccaggtattatttaatacatccccattaatcaagctgccaaatctaaatgaaaaccatgtttaaatatgtttaataagattatagcttttggttgaatatcaaactaacatagctacatttttccttccagccagctctcatttactgtcttacatttttactctgaaagcttttgyactatcaaaccaatcttgattataaaacaaattataccacaaacttttagtatcgtgagcttcagctgagtccctcagtgtaaatgttaggagaaagaacagttctgagattttttttctggctaaaaaatgatatttttcttcttcttggggtgagcctttgagtttaaaaggaaattaaaaattcaattagagatactaaattgtttgtagcttctgtattaaatgatgtctgccttttgcatagttattgaaagtgtttcatattaaatgtactttttctttttgacggttcaggcttctgttagttttgcaatagtgacacctaggggctgtagagaacattgcatgggctgctaaaatctcaaaaacaacccctctgctcttttgccatggatagaaaaagtatttgtgggtcattggggctgatggagaaagaaggcaaatggtaccctgggcgaggtaggtttccagttctatttaccaggcttccaatatgcaaacaaaaaaaggaggtaaataaaaagaggtttttataaaaataaagaactagctgaacttggagtaacatacagtattctagcagatttttaaagttattgataaaacaacatcatatttattaacatgtttaattctcgttcttatttgcaacagtttgcctgctgttcttgcctttgtaacaggcatgtcccgcgttgattgcagagaagtgatgactgtatgtggtgctttgacttgttctgtgcgaatgtctcgcttctcacatctctaattcttctatttgccttgttcaatattctatatccatattcacccttataaagttgtcattgagacttttagcctatttgttctctccactgatatcattatttcttctagcttctcagagcccttacattttctccatgtttatatggcttgaagcttttaaattcttgatcaaagcaatcataaatgtgtctgttacaaacacattaaaattcttcgattatataaaaactgacaaacaagtcttataaaactgtttttgtactacattaagttcaaaataggtggcacatgtttaactttgtacactgtaggaattctaagaatcatttcaaaaagaaaaagcaaatacagtgcacagcaatgcatataattcttatagatgagtattatctatctgtcatatctctytgtaaataatgatggtgacaatgatgataggcaaagtttattgatgttttttatatgccaagcactgttctaaccactttgcatgaattaactcagtcaccatgggacaggaactgttattatcccaatttttacccacattcacagaatgcttctgtgttccaacaaggaaacttcaacaaagtagtgcatgagcttatcacaggtcgtgtgcaataagagtttatgttattagtttttccttgaactgcttgggagtcagtgtcacttttcttagccccattagcctgccctccctttggagtgtgcacgtctcctttactgtctgatacctgtctgctttcctcactgagtgcctctagctttgtctagcaacacctgccctcatagaacttacattcagttgggaagatcctaagaaacagcaatcacaacaagtaatattgatttcaggtaacaagaaatgttacaaaagaaagcaaagtgatatcagggagcaaaaatggaatgacagactgggtgtgaagggctggctttgtgagcaggagagaggccctcctgaggaagggatgttcgtggtgagtcccaaatgacagaaaggacagcaagtgcaaaggccctggagtgggaatgaattgaacatgtgtgaaggaaagcaaaaaaagcagggaggctggaatgtgttgagtaaggagaatactgtggggctcctctctctttcctttctctgctgccaacacttgtgttttctgtctcagactctagtttcactgaattcaaagaaatggtttggaattgcaaaatcctgagatgtcatccactgggagtgctggggatagggggacacgtgcaagagaattggcctaagaaaggttataccctgagtatcttccatatatacccatagccccacacatttttatcttgcaaagtcagttaagatgaacataaggcagaagtggaatcccagcacagttcatcctcagtgctccacagcacggaacagaccttggatatcgtacttcacacaagtttggtgactctttttttatgtctgcctctccactagactggaaattgactgaggacagagcttatgtcataatcattcttcagtcatttttctttcttgcattcattttatcagtaaatgcttcttgagtgccatctgtgtgccaaccactcgtactaggcccatctatctctgcttggataaaattccaagcaagaaagatacagtccctgctctcaagtttccaacagtattgcagaagaggcataccataaaatagcatcatacagtgtgctatgcctcagctttggggaggcagagaaaatgttccaaaggaagtgacagttgagtccagtcaggacttggaagtataaataaaggcgagtatatgtctgtatgtgtgtgtgtttctgtgtgtttggagaggggtatgcatgtgtagtgggcccgagatgggagagaatgtgtgcagaattttaaaccttgggaacaaaggattcatgaactcagaggtgaactcaactgtgtactggatgaaaatgtgaatgaatgagtacatgaatgtataaatgaatgaatcagtgagtgagtttttcagaggcagctcatgaaatggagattgtattagcgtgtttttacactgctataaagatactacctgagactgagtagtttaaaaacaaaaaaaggtttaactgactcactgttctgcatgacttacagtcatggtggagggtgaaggggaagcaggcaccttctttacaaggcggtaggagagagagagcaggggaaactgccatattaaaaccatcagctctcgtgagaactccctcactaccatgagaacagcatggtggaaacagcccccatgatccaatcacctctcaccaggttcctccctcaacatacggggattacaattcgaggtgagatttggatggggagacaaactatatcagaggtataaagccaaaaggcatttttattaatttaccctgagaaatcactattccaaattctgcccattatttccatgtaggcagactcatatggagacctatatctttatcaaaaatgtgcttgtcaagtagattattcagtgacttattgggagaaaaggytaggcattcatcttattgtagggatggctttatcaatggaactgcatatagctgatggccaatattcatctttatcctgaacattgcttagatgagaactatggggtaaacaaatgagtgaaaaaaataagttaaaatgtcaagggtgttcatagaagagagagaggctgttaatgtggtctagatgccagaggtggagagctggcttggaaagtagggactagattctagtctttgctgtactactctcttgtgtgacattgagcaactagccatcttcaaacccgtaaagtggaactatgccaggcaatgtctaaatttagtctctatcagctctagaattttgtgttcatcttagttatacctgctgaggagggagaggtattgaatgtgtatggacaccagctgggcagcttcctcatggtccctggatgacagctttgtcctggggcactcamtcctccagagtaccttaagaagctgtcctaatctgccatacacttgggagggttctggctgttaaccacctatgttggacacactgctgctattctccttccccacttttatctgttattctaaagtgatctgagaatttggctattcctgatgttgccttttcttatactccacgtagggagcctctgctcagagggttattcgtaaaaattaatgagatacatgtaaagcagccagaacagtacctggcacatgaaaaatagtttaatactatttgtcataattattcctgcagcccttcattgttgcctttcttcctcaggtattttctgccttgttctccaacaagcacaagggatacaggggtaaataggataccatctctgtgctgaggggttttgtccagtgctatttactgagtgccttccatgtgccaggcactaaggttaaatcattaagcccccaccacaatccattgcaatactcattatacccatttcatcttccaggaaagtgcatcccagaacagaaaagtcatgtgacattcccagcatcacacaattagtaaatggcaaagttggaattggagctccagtctcacagactccaaatccagtgttctttccaccatgtcacccagctaccacaaggctgccattgcacagttttgaaaggacaaagaagcagcagtgcatgatggaagtcagcataatgggaaataagctctccttccctgggcatctacttctaacttgcagaagaataggaaggctagtcttgtgagcccagctcccagcagtccttgctttagcccatctgaaaaggatctgtctttaaaagcaaggagccagaaaaaataattcatactaaaaacaaactctgtcatgagtcatttgactttgctttcccctgaacacatagtttatgtcttgggtgagctaaggctaaaggaacatctgatatgttttaggctagcagagccattatttaaggaacttcacatccaatgtgcgcccattggaccctatggtttaaatcaagtcttctgcttatggggcctgacaatttgttattcttgttgtagttgtattggagtgtgattgtgtacatgttttatcaagatgacaagaatcactctggttcatgattcaaaagttctcaggctgttgaactagcctatgcagtagttactctgagtatgtgcgctagacaggaatgtgtatatgtgcgcacatgttcagatgtgtgagcacttacagaaagagaagagaatgagagaaaggcggattccagctgagcatcttaccattcctatcagcagaagagcgacccagccctggggctgggtcagaggatttctcaatcctgggagaacagcagataaccccgagcacaaagcaagtgtttctgtctctgttgccaacttgcttttctttagatcattgaaaaatgacaggaatacacttactctgtaaaagcacgaacaatgtaggaatatatagagtaaaagcaaaaggcacaaacctctcctgatcccaaaagtaatcactattatgcgttttgtatgtctgtcttacattttttatgtattcacagacatatatatacacatatatatcatatagtagagattgtataatagaatactatactgtttaaatagtagaggatgaaaaagagataactttttttatctacaagatactttggaatatattaatacatataaagctgccccatgtctattacatgctgacagtaattccagaatctgcatatataaaaaactgtttaaccaatgtgttgatagacctttaggtagtttctagtgtttagctgttacagagacacaaagattattgttggtgtagttctttatatacaaatatgaggacttcttttagagaaatacaaaaaaaaagtggaatttctagtggaaggatttgtgcatttaaaattttgttagctgtggccaaaatgtcctccaaaaaagctgtcccaattcgtattcctgccaatgatgtccctgtgcytttgccaatgctggatattgtcagttgtttaatattttttgccaattttcgggcagaaaatgactgctcattgttcttttcctttgcctttccccattactagtaagaatgaacattctctttatacccatcaagtacttttctgttaatggcctattaatatcttttcttcattttcctatagggttgtttgtcctttcctcattgatttagaggagttctttatctgctctacataccaattctttatctatcattacatactgaagacattcttatagtatgtcccttcttatctacctttgcttacaatatctggtaccggagttttaaaacttcataaacttttatctgtgaatctctttatgacatcagaatttcttggaaatgttccctttaaactatttctttacttgaagctgtgtttttcagactgataatgttttagacttttatgtgcccaagagtaaacttttatgtgcccaagwgttttagacttttatgtgcgcagtaaggactgaggaggtgagtgttttaccaagggcaaagctgagatcagaacataccaggctggcaggtccctgtgtttgttaaagacattcttagtaattttatcrttaattatggggaaattctaaaactccattgggatcagccacaggcaaatgagatgctgcaagaagctrgatactgagcatgcagcctgaagtcatctgagcgttggatcataaccagcttcctctacttaccacttgactttgagacataactttgcttctctgagccttagtttatttctctgtagaatggagctaatcacaacttcaaatgactattgtgaggtttcacatttcccatgtttcagcacwtggtatctgctcaatacatgtttgcttttgccttttctggttaaagaccttttttcccctggacctttgaatgcaactggtcatctaaaactattgacttccatctcttctgaggatttttgtagccaaatggtggaggcatatctagcttgagagtctgaggcaatttcctgatgatacatctcagtgggcctaaaggaaacgaaacacctacaccattgctcaatgctggaaaattctccacagtggccgacccctttaggaggagggaagccagggctctggggaacagctcctgtctacgtgggtggagagttctttcttcaagcattgtggatcgtaaactcactgagcctcctgcctgtacaggaataaatttcccctgcctttgagatcatctcctcttctcctcacctcaacctggcatccttctcttcttaaggcaacacagcactagaggctgactgcccagcctcttgagccagacttcctggaattaaaacccagctctgccactctttacttgtgaggcctggagcaagtttcttaattactctctgcctctgtttccctggctgtaagatgagagtgctaatgttatctacctcacagagttgttacatgggtcactatttataaagtacttggcacatagtacagtactcagggagctactaataaatcatatatggtatctgaatttgggcttctcatttcacagccaattgactttggataatatgcttactccaagctcagctctctaatttgtaaaatgagtatgaaaatatctacttcatggaattgctgggcaagtcaaatgggataatgtgtgtaatgattgtaggtactcaagaggtggtagctactgtggtgatgagtatcaaaaaagacaggaatgaatatacagagactatcctaattctcaaaagccaagagactggtagaatgtggcctccacactcttagccctgtgaccttagacctaacctcttcaacattcagtttcctgatctgtagaattagattgacaatggtgcctacctctaggttcatgatgaagaaggagtaataataaattgggttcatagaaagtgcttaataaaattaattattattgttacctgtatctcctgtccatttaagggaagattcctatttgtagtcaggggtccctgggcagaagtgatgacagcacaggcagagggctgcaccccctgccctctccaactctggggatatagcacaaggtaagaaagagaagcaaatctaaggaagggaaattgagatcaaagcctggtttctatggatcaggccaaaatgattgagggagagagagaaacacaactcaggatgtccatcaggatttatctgcagcagtgtgtctcattttaactcttaaaacagttttgttggataggtactattatttccagttttgcctagcgaaactgcgagctggagaggttaagtgactcgcctaaggtcagatagctaaaaagtagaaaaactgggatttgagcccaagtctgtccaactctaaatccctaatgatatgcttttaatacatgccttgcctctgctgggaatgactcagaggccaagctgtaggaggagggggagagagggatgactgtgtttctcagggtgaacagagtaggcagccacaggggcagtaggcccggagctaacaggccttcatgtaaaaatttggaaattttgcctgaaagacaagagagtgttttcagctgaggccgttttcaactgtaccctgtgtactaggctgagggtaaaccaaaacacagccataaatagttctccacagaattctcgtcacaacagcccactgtattccttctgtttggagatgaatgttgaaacaccatgcatgaaaatggctgagtctgttgctgttcatgaagtctagtcacagcccattcaaatgaagcccccttggatgtgaatagagatacgagaatcagcagatgatcagccatcatggactcttgacaaatggctttgcccaaagaatcggcatccttggacttcatacaaagcaggccttcccaaagcctctgttttgaagggacccagtctgtttgaataggtgtttacccacttgctacagaatatgtttgtatacctgttctttaatttaaaaaagtatcaaagctagaagggactttaacaagtcatctagtccaatgcatttaaaagaaggggacatttggttccagagtaggaggtaactgtcctaaggttatatagagagaatctgagatgaaatccagggcctcctgtttcttagtctaaaacatgtctgactctgcccttgtgaatgcagccaatacagggacaaaaagtctttgggcttctctaaagggagggactgcaatgtgttagaaatgggaaggaggttatgtttgcccttggtgctttctacctttcccatctattcttttcctcccatttcattttttttttcctcatctgtcagaactaaccagtctaatgtgctcaattttcattccctaagaatcagactcccagatttccagagttactgctgtttacctatttcagagcttttccctacttcaactgggctgccttttgaacaatgaaagggaccctagaccaggggaataccaggctcggcccctattaagtgggtctccttggttaagacattgcctacccaagtgtcaattctcaatctctaaggtgcaggtgagaaagaggaaagggacaaatagtaattgatcacctgatacatgctgaactctaattatataaccagacttaatctttaaaggaggttatgtgaggtgggtagatattattatcttcatttgcaaatgaggaactagatttctagaaaggtaattcacgttctcaaagccatggaatcagaaagggagagagttgggacctgtacctagatttgtctgaaaaatccaaagtacaggttgagcagcgctaatttgaaaatctaaatccaacatgctccaaaatctgaaactttttgagcactgatatgacacccaaatgtcatgctcaaaggaaatgctcattggagcatttccagttttggattttggattagggatgctcaaccagtaattatttaatacaaacattcaaaaatccaaaattaaaaatacttctgattcctagaattttggataagggctcaaccttttaaactaaacctgtttaagctgtttcaagtttgccaagtaagagaaagtgagatgaatatatgtgttcatacacacacatacacacacacgcgcrcgcgcatacacgtcctcactctgtattagtccattttcacactgctataaagatactacctgagactgggtagtttataaacaaaacaagtttaattgactcacagttccacatggctggggaggccgcaggaaacttacaatcatggtggaaggtaaaggggaagcaggcacattcttcacaagacagcaggaaaragagtgagtgcagaggaaactgccacttttaagccatcagctggcatgagaattctctcactatcacaagaacagcatgaggaaaccacccccataatccaatcacttcctaccaggtccctccctcaatacgtggggattacaatttgagatgagatttaggtggagacacagaatgaaactatatcacacacacacacacacacacacacacacacacacactggaagagtgctttccaaactatgaaatgccgcccacaggtggacaattagccacccagtccaggccaagaatgaagtggctgtcagcatgccacagccatcacacaaggaatctacttgcaagtgagaggagcggaggaaacatttagaggcaagcacctatcagttaggtcagtagttctcaaatgtcactggagggccactgcaggcagggctggctacaatttgtatatcccccaatttgtgggacccagtgcaaaatgaaaatgtaggtccctgaccagggacaggaaagtcactccttccaacaggccttctgtctcaacctatggctgacaggtgacttccaaggctttccaaattctacatggaacccctctgtgtgttgtcagcctgacactccatggcagtggtagccagctgrggtcactgccttgacccaccctgagacacagggggcccaatgtctggcctgactctttccacacctatgctcatctttatgaggagaagagcaagagcaaaacatgcccccacccctagccatgtaaccctgccaccaactcacagatgtgtggtcagcagtgggatggggcagcagaagacagggagtggatggccaagaactggccctggagactagccccattgttccatcaatttttcacctataaaacacagattcaaagataaaataggattccttatttaataaatggtgttgggaaaactggctagccgtatgcagaaaactgaaactggaccccttccttacatcttatacaaaaattaactcaagatggattaaagatttaaatgtaagacttaaaaccagaaaaaccctagaagaaaacctaggcaataccattcaggacataggcatgggcaaagacttcatgactaaaacactgaaagcaatggcaacaaaagccaaaattgacaaatgggatctaattaaactaaagagcttctgcacagcaaaagaaactatcatcagagtgaacaggcaacctacagaaggggagaaaatttttgcaatctatccatctgaaaaatggctaatatccagaatttacaaagaacttaaacaaatttacaagaaaaaagcaaccccatcaaaaagtgggcaaagaatatgaacagacacttttcaaaagaagacatttatgtggcctacaaacatatgaaaaaaagttcatcatcactgctcattagagaaatgcaaatcaaaaccacagagataccgtctcaacaccagttggaatggtgatcactaaagtcaggaaacaacagatgctggagaggatatggagaaataggaacacttttacactgtttttgggaatataaattagttcaacctttgtggaagacagtgtggcgattcctcaaggatctagaactagaaataccatttgacccagcaatcccattactagatatatacccaaatgattataaatcattctactacaaagacaaatgcacatgtatttttattgcagtactattgacaatagcaaagacttggagccaacccaaatgcccatcaatgttagactggataaagaaaatgtggcacatatacacaatggaatactatgcagccataaaaaagaatgagttcatgtccttcgcagagacatggatgaaactgaaaaccatcattctcagcaaactaacacaggaacagaaaaccaaacaccacatgttctcactcataagtggtagttgaacaatgagaacatatgggcacagggaggggaacatcacagactggggcctgtcaagcagtcgggggaaggggagggatagcattaggagaaatacctaatgtagacaacgggtcggtgggtacagcaaaccaccatgacacatatatacctatgtaacaaacctggatgttcttcacatgtatcccagaacttaaagtataatttaaaaaacaacaacaaagaaagaattgaaagaaattgactgcaaacaattaatgcccagcttgggctctttctggatagagctctgtgcattgcacgggtgtattagtacattttcatgctgctaataaagacatacccgagattgggcaatttacaaaagaaagaggttccatgtggctggagaggcctcacaatcatggcacaaggcaaggaggagcaagtcacatcttacatgaatgacggcaagcaaagatagagcttgtgcagagaaactcccatttttaaaaccatcagatcttgcgagacccattcactatcatgagaagagcacaggaaagacccacccccatgaatcaatcatctccctccaggtccctcccacagcatgggggaattcaagatgagatttggatgcggacacagccaaaccatatcattccaccctggcccctcccaaatctcatgtcctcacatttcaaaactactcatgccttcccaacaatcccccaaagtctgaactcatttcagcattaactcaaaagtccccagtccaaagtctcatctgagacaaggcaagtcccttctgcctatgagcatgtaaaatcaaaagcaagttagttacttcctagatacaatggggatacaggcattgggtaaatacagccattccaaatgggagaaattggccaaaacaaagggtctacaggccccatgcaagtccaaaatccagcaaggcagtcaaatcttaaagctacaaaatgatctcctttgactgtgtctcacatccaggtcacactcatgcaagatgtaggttcccatcatcttgggcagctctgcccctgtggttttgcacggtacgacctctctcccagctgccctcacaagctggcattgagtgtttgcagcttttccaggcgtgcagtgcaagccatcagtggatctaccattctggaatctggaggtcggtggccctcttctctcagctccactaggcggtaccccagtagagactctgtgttaaggctctgacaccacatttccctttgcactgccctagcagaggttctccaagaggacctcacccctatagcaaacttctgcctgggcatccaggtttttccatacatcttctgaaatctaggcagaggttcccaaacctcaattcttgacttctgtgcactggcaggttcagcactacatggaagctgccaaggcttgaggcttgcaccctctgaagccacaggccaagctatagggacgcagggcaccaagtcctaggctgcacacatcatggggatcctgggcccggcccacaacatcactttttcctcttaggcctccaggcttktgatgggaggggctgccatgaagacctgtgacatgccctagagacattttcctcattgtcttggggattaatatttggctcctcgttacttatgcaaatttctgcagccggcttgaatttctcctcagaaaatgggattttcttttctattgcattgtcaggctgcaaattttgcaaactttcatgctctgttttccttttgaaactgaatgcctttagtagcacccaagtcgcctcttgaatgctttgctgcttaggaatttcttatgccagataccctaaatcatctctctcaagttcaaggttttacaaatctctagggcaggggcaaaatgccaccattctctttgctaaaacataacaagagtcacctttgctcccattcccacaagttcttcatctccgtctgataccacctcagcctagactttattgttcatatcactatcagcatttttgtcaaagccattcaacaagtctctaggaagttcgaaactttcccacatcttcctgtcttcttctgagtcttccaaaccgttctaccctctgcctgttacccagttccaaagccgcttccacatttttgggtatcttttcagcaacaccccactctactggcaccaatttaatgggtgacacactcgtgcagctggtccccactgcaggtccttcacaaagcttcactagtccatgagaaatgaaacaataaggacagggtattgagattttaacaaaattaaatgtagactatttaaatgattctcctttattctgatatcatgataaccacttttttggtattaaaawctccttttggttatgaaataatggtgagagtaaatatggagcagttgctttgtttaaagtccttatataatcaaataaaaagctgacaattatgttgtagatctccaaaaagtttgaatattttattggtccaaagtttgagaactcctactctaagactttcaagaagatggcccttcccacatgtggggctggaacctcttcccctttcactatcatcagaaaggcttccgccctggatacaattagtatttgttgcatacttcagtattttctaggtatatctttgctttttggaagtctaaaacatctggtagaatctttcagaagaagcaacacagaatagaggcattaaaatcaaaatttgaagtctgaaacttctgtttcttaccatcattaagagagaagtgcccaatgacaatcatttctccaaaccatcagcagctccttggaaatgaagtggaagggtgataatatatccaggacagacctagctaatgtcttaatcttggcataattattaataataacattccctttccttccaaaaagtgtctaggactcaaaggtgagttcattgggataataaactatggccaccttaaatgaaggccccttcagctctcctgagctagaaagtcccaaagagcctgctctttccctgggcaggaagccatggtgaccagtggaaggattatgtctgtcttaccagaggcctgggttgggtgccagcatgaagcctgtaggatctacttagatctgggacttcaaagacctagtggtgggtgaatctttgtggcttccatcattgctttgtctctgggagcatcaagttgaaggccaagctagtttctttcctttgatgagggaaaatatgtcaacacaatggtccactgaactctgggaatagacagacatgtggtgtctttgggggattatagcctaaatggttttactctggcacatgtggaattaaatataaaacaaacagctgattgctgttaaattcacatgcataaaaacaaccattactatgtcttctcagctacagtaccagagagtccccctagaatcaagcagttattagatgggactttggagtgagtgtagaaaagaaaaggaggaggagaaggaagaaaatgaggaaaagaggaagaggagagagaaataacaagtcaaataggtggagagttttgaaagttacaaagtctgtgccatttagcatgagttatttttcctttttattccttgtatttgacatatgaaaagaaatctttgctgatactggcttcagattctcaggtttaagtatgctatccttgacccaggaaagagttacatgcatcatacttccgaggccttcaaagaacaacttggagcaagcttgagagtttgcagggcattttggtgacatttctggatgccctttgtttccccctttcaagaaaagccctttctttcgttgccttctcacataacagcttgggattcttgtccctcccagaaatgcatttgaacttgctgggtttgttaagagtcagggcatgaagcatttttccatggtagaaaagttctggcattccaaagcagaactaatgtgggatttgggaagcttgccctatttgtgcacttaattagagctcaccaaaagcagctgatccattggtaccataaaaaaccaatgctgagaccaaggaaggctaagactgtgagtacccttagagggtggtgaacatgaattccacacctgttccctactgactggaatcaggattcaaaggcaaaaagttgtgtgctttccagcaacattcattgggatccgcagcccaatttaatcaattgataggttgccagtgtctaagtcaagtcccgaaacacttggttccccttgggtcaatgaaatttggtcttggttctaatacaaactttaagttggctaaaaatggctgagaaaactactggttttagagtcagtcaagcctgtgctctaagtctgactctgccactatgagatgtcagatcttggagaaactgttcagttacttctgagctttagtttgcttcccagtaaagggacatactaacacctattccatgggtccattatatacacaacagccaacatttgttgagtaattactatgtgcagagcactgtgctaagagcacagtctatgttaactttttaatcctcatacagacctaaggaaatagattctatattggagattggcaaactactccccacaggccaaattttgcctactgactgtttttgaaaataaagttatattgagacacaatcacatccattcattcacatagaccctatggctgctactgtgctacaactgcagagttaaataattgtgacagcgaccaaatggcccataaaacctaaaatacttactatctggcccttcatagaaaaaagtttgcctctgctttaaattatctcaacttaaagatgaaggaaataagccaaaggtattaaaacctattttaagtaggttagctggggccacaaagctggtaacaggtaggactaggatttgaatcaaacagcctgactccagaacttgtgttagtcaccagtatcttatatataatatatatgaaatgcctagcatagtacctagcacacaggagatacttaatacatctgttttattagcatggtattccctttctttttacctcctttcccagtttcctatcaattccagttaccttttgcttttcttctgcaagataattcagttaagcatatttctggccaattctatgcccatgatctcagtctatccaacaactctatgaggttggtatcattattttcatttaaaagatgaagaaactacatcttgatctctgagctcccaggaatctttgcactccatttggggaccctcagaggaaacgttgctaggaacttttggaacatttgttttatgcggcaaactagcatcaaagaaaaaagaatctcagtggctgcttgagaaaggattacaatctaattagggagacaaaaccaaaatactgagacaacagcaggcattttaaagtaagttatttagtacagacagtaagtgagtgtgaattcagagagctgggaacaagagagcggacaggggaggggagggctctcaagtttcctggtcaaatgtgaactgtgccttgaatgacagactgaatttaaaaaggagaggctcagattcaggcatgatggaagcgggaaaaggaaccacagatttcctgcagaaatggaagtgagagctctcagacggacagaatcagcaaatccctgggaactgtagaaaatcagaatgagtaaataatgtggtgacagattctacaggattttgaaggccagagagaggtacctgggtttcagaataacaatagtgatcatcataacacttagttgcaggattgctgaccacacacatttcacatatgctcgcccttaaccctccttgtccattctgtgatgtaggtatcatcctgttttacagatatgaaaattgaggcttagattatagcaatcaaaggttgatgggaaaattagaaatattctgcttacttagttcaacagtgcagagcttttgtgttgttacgttcttccttggatacatgtgcttgtcgttgagattttatagggtaatctatataccctataaacccatttaatataatcataggttctgcttgttctaatactgttacctataaacaattccccatggactcagatggaaagtgccatgaattaaagaccttacactacctggaccactctgatactgcccaccacaggcaatgggcagctatggcatggtttagagcataggataccataatgaaaaggatcagttctttcaacaaaggccggatgggaaagacaggaaggaggaaatcgtgtgaacccagaagtgtgatattcgatggagaggcaatcctgggatgaacacccagagcttgggtttgggatggctgaagaacttatgccaagaagagaaggcacacatgtagattgagaaggccatgaccagcactgcttaagtcttaccacttagtcatagttgagggacataagacttgaagtatggagatttaggctcaagtcctagtctcacggctactggcactatgtgaagaaggacggaaaaggcaagaattatatgctgattgagttatgcaatatattgtgtcttcccatcaatagcacttaagtatttctgtgtgccagcactttctaatttctcttctaatcgcttaacatatattaacttatttagtcttcagagaaaccctattagattgggggtattatcatcttctttgtatagctggggagactgaggcacagaaaaggttaagtaacacacctatggtcacacagctgktatgtagagaaactacactttgaacccatgcagtttggcccctgagtccatgctcttacttactgtcacattacctctcaggagaaaacaggataggtgttacgagcccagttttacagatgatgagactgtgggtccaagaccataagggatttgactaaagatcaaacaactaaacaaactgttaygctggcatttgaactaggtcttcctaattctgatccagacattctttctatcagatcacactgcctcctgttggtgtgaaagcattttacaaccataaacctcctcctgtttattaacacattattatgatagatataaggcttctctgattcagtaggaaaactaaggaggtagatcagccaagctcgtggttggtagtaataaagggcttgccttctagacggtgactccctccaggagagccaccaaccagttcctaacctctgtttcttgcagttcctacagagcctggcatggggcagagggtggctctctacaaatgtttgttaaacacaacttgttccagatagaagcatgtgaggctctccactaccaccagtggcatagcaggcacacccatgcattagcgacttgccctctgccaactcctgggatggtgatatgatgatggttctttgtaagcttgtcacttgtccctcttccaaagtgagtttacccagaggagcattctgaggttgaatttgtcccataycaccccttcacctacacattgacactccccgctgtataccatggggtcagagaccttgcactacaaaggccccttgccaagcgtggtattgcttgcagcctgtctgaggctttcactactttcccccagactctcagcccctggcctcctggctcatggccaytcccagtgcccttagctttagcttcctgacccccctataactggcacccaggaccacttcaccagcttccttctcagaacaattgacttttgcccctggggtacttatacctcttttgttcaaggtcacaccccagctcaacacccaggatccaccctgccagcctgtgtgagagccatccccactagactttgaaagggactggacagtgtgttcagccaccttctcaagggcctgtccctggcagctttactggtcccacctgttcctagcctaggagctgccaatccaacaagatgaggctattctgggaagaagcaggaagacctcttcaccctaattgagtctttcttaacaaagaagtcaacagaacttttttttttaagtgttttaaatactgcacaggatgctacagcagttaagagcatggcctctggaatcagaaggatatgagttaaaaatccagttctgccacttgctagccatgtcatcctagggaaattacttaacctttctcaacctcggtttctcatttgtaaaatggagctaaaaaaggcccacattactaggtaatcatgagaattctgtgaaatgatatatgtgagcatatgtcacagcatgtgacaagcagtagatgctcaataaatgatagttattatcagcattatattaaatattattaaagtatcttttaagactttctggagacatttcattcagacagttatttattcaacaaacatttatcgagagcctgcatttctccagatccatgctgagtgcaaatatgggatgtataattatgtttataaaaaagagcggtgcatgttaatcacttactataggccagacactgttctaggcattttaggaacattctttcatttaatattgataagggccttgcaagttggcagaaattataattgtcattttagagatgaaaaaactgaggttcagagaggttatccccaaaaagacatgacctgtgattgagtgtggcatgcatcacccttaaataaaccaaaatattttaagttcaagtccccactattgagagatcgacaatttactcccatgtagtagaatgcctttatataactttcttgttaaagtcaaggtaagagcaaagtggtgtgatttcctcctcattggtaaaaatctctgtaagaggtgagtgttctcgtgcctttgttagcatgccagcaatgagcctggggtctctcctctgattactggggatttcatcatcattcaggataccttctctcattatgtgggactgaaaatagagatagaaaaggcaacaggtaaggggctcatagtgaactcacccaatgcatgctttgcaagttattttgttttttaagcaagtcccagtcatgatcttgctttcggattcatgccttatgcctgtagccattgaaagccaagtatgtcagggggaaaaaaaggtccttcagttagctgaggttttattctgtttctactttggtggtttgaaactaattacagactcggttgtgcctacatgtgcaaaatgaaatgagaggttgagccaattactttaataatgaagagaggaaaatccacttttctttccattatctaaagatttcaggcatatgtgagttttatatatgtatatattaaattatgtgaaaaattggcctcaagccttcatttcactttgcctgtctagaaacagactcaaattttgtttcggaaaggagatgacatgccttaggcatcttccaggagactagagggtcttgttgtaacaattgcagctaagattgattttcttattgttatgatgaatacttgtgcctgcctgggggagggaggtatattatgaaggatgacttttaaaaaaaggctggaatacctagaataaactttaggaggaagtttccactcatattatttattcattcatttatttagttcttttcaggacctgcaaagccctcctggcctggtgctcactccctttctaatttcatctccttctgccacttgcccaaactgccccagcaggtctggcttcgttgctctctttccattcactgagcacacttccaactcagggctttcaagcttacagttccctccgtgtggaatcatctttccgttgattttttcattgttcactccctcattcccttggatctctgctcaaatgtcattttatcagagagatgccattcctagtcaccctatacaaactgcctgctccacgcctaccattctctgtcccccttgccctacttgatgtttttttctccctagtacttaccaccatctgtgtgatatatgtgcatgaacttatgtgttattttgataaacatgaccatatattttattttaataaactttatttttagaagagttttatatttacagaaaaattgtgaagatgatacagagagtttttcttttctttcctttgtttttttttttttttttttgagacggagtcttgctctgttgcctaggctggattgcagtggcacagtcttggctcactgcagcctccacctcctaggttcaagcaattctcctgcctccgcctcccaagcaactgggagtacaggcgtgcaccaccacacccggctaattttgtatttttcgtagagacagggtttcaccatgttggtcaggctggtctcgaactcctgacctcaagtgatccacctgccttggcttcccaaagtgctgggattacaggcataagccaccacacccagcagatacagagagtttttctaaaccacatacttagttacctttattattaacatcttacattagtatggtgcgttcgttacaattaatgaaccagtattgatacattattattattttattttatttgttcaccagtttggaatgcaatgtatttttaaacagagtgaaagacacctgacaggtaactgaacaagttagcattagctgggcccaagattaaccaacttgtatcaacattcacagacttctgcagattccctgaggacagcaatatccaatagtgtttacttgttttgtgagcacagtaatagaagcaaagcgagacctttgttaattaaagcacatannnnnnnnnnnnnnnnnnnnttctccctccccctccccttcccccttttttcttctctttttttctcccctttttttttccccccccttcctttttcctttctctttttttcttttctttctcttcctcctttttttccccccttccgcctcccgtctcccctcccccccccctcccccctccctccttcccttccccctccctctcccccctcccccccccccccctctcccctcccccccgcaccccccccctcccccctaggccatccccccagtcacatccacctcgccccaccaccacccagcttctaccccatctcacacacctctgcagattccctcaggacagcaacatccaatagtgttcacttgtcttgtcagcacagcaacacaagcaaagcgagacctttgttaattaaagcacatatttcatgcagatttccttagattttacctaacatcccttttctattctagcatcccttccaggacaccacgttacatttagtcatcatgtctccttaagcttttctggcttttgatgaccttgacatttttgaggagtactggtcagatactttgtagtatgtccttcagttgagatttgtctaattttttttttttttcatgattggagttttggtcttttgggagaaaacagaagactgacaaagtaccattctcatcatatcatatcaaggatacttactatcagtgtaacttatcgctattgatgttggccttggtcacctaaggtagtgtttgtcaggcttctccactataaaattactctttctccttcctttttacactgtactctttggaaagaagtcactaaacacatctcaaacttaaggagtgagtgagaagtaagttacgatctacctcctcgtgggaggaatatctacataaatttggaattatgctgtttgggagatttgtctcttctcatttatttattcactcattcatctgataactcatacatatttatatttttggttataatccagtactactttgttttgttactcagttgttccagttgtagccattggcaactcctcagttggctcctatgaccctttgacataatcccrtaattgtgtgtcttgtgaggttttaaaaaattattatattcttactttctggcactacaaggcactttaggctaattktgcatatttcctgctccagttctggaatcagccatttctccaaagagtctgattcttttttttgttttgttttgttttgtctgtgtgacggagtcttgctctcacccaggctagagtgcagtggcacgatcttggctcactgcaagctccacctcccaggttcatgccattctcctgcctcagcctcccgagtagctgggactacaggcacccgccaccatgcccggctaatttttttgtatttttagtagagacggggtttcaccatgttagccaggatggtctcaatctcctgacctcgtgatccacccacctcggcctcccaaagtgctgggattacagacgtgagccactgtgcctggccagagtctgcttcttgttamtggagactggtggttagacaccaagatttgggcactaagtgtgctcattgctcttgggctattgtcaatgcttcttggccctcccagctgaaagagcaaggaaatgtgtatgtaccctaacccatrtatatacccatatctataaatatttctgtatgtaatcatctytttgatattaagctaaacatgaattcacactggtttcctactgtaatctattgccacatggatcattctaactcgctctccttgcttatatttaaattccccctcaaataatgagaaatctggctcccaccatctgccatccatttacttaattattcaatttcagtatacatgtatagaaataccagaattgttaactcataccattgcagaatacaactttattaactggaagacagtacttatatacagttttcttggcattttcttgtttttttttgggggggggtggttgggggtttttttatctttagtttttcagactctactaatttctgaagttacttaggtcagcaccttaatcacccaccacacagagtgagatcgttttatacactagtaacacagttacattgtttttgacatactacattccatcatgggatcccccacctcctgaatttttaaaatttacgtacattaaggtttactttttgtactctaacattcagtggttttgataaatgcataatgtcatgcatattcaattacaatatcatatagaatagtttcagcaccctaaaagttaaaaatcccatctgggcatggtagttcacacctgtaatcccagcactttgggaggcctaggcaggcagatcacatgaggtcaggagttcaagaccagcctggccagcatggcaaaaccccgtctctactagaaatgcaaaaattagccaggcatggtggcaggggcctgtaatcccagctactcaggaagctgaggcaggagaatcgcttgaacttgggtggtggagtttgcagtgagccaagattgtgccactgaactccagcctggacaacagagcaagactccgtctcaattaaaaaattaaagttaaaaatcccccgtgttggccaggcatggtggctcatgcctgtaatcccagcactttgggaggccgaggcaggcagatcacgaggtcaggagatcaagaccatcctggctaacacagtgtaaccttgtctactaaaaatacaaaaaaaaaaaaaattagccaggcatggtggcaggtgcctgtagtcccagctactcaggaggctgaggcaggagaatggcgtgaacatgggaggtggagcttgccatgagcagagattgcactgctgcactccagcctgggcaacagagcgagactccatctcaaaaaaaaaaaaaaattcccctgtgttttacctctttaactttccctccttttttcccaactccttgacgatcactgatctttttattgcctctatagttctaccttttctaaaatgtcacataattggaatcttgctccacatacttttttagcatttggcattgttcgtttttttattttagctattctaataggtttatagatgaatgtcactgctgttttaatatgcaatttttaatggcaaatgatgttgagtgtctttatatatattatgtgccatctatatatcttctttggtgaatcacatgttcatatattttgcttactttttcactacattgcttgtttacttattgttgaattttaagagttctttgtatattcagatacaagtttctttatcagatatgtgttttcttctagtttgtggcttgtctttccattctgttaaaaatgtctgttgcagagcagttttagaattttagtgatccagcttatcaatttttttcatggattatgcttttggttttgtatctaaacttatcacctaacccaaggtcacctaaattttttcctgttatcttctagatgttttatagttttgtgttttacaattacatatgtgatccactttgagttaatttttgcagaatgtctaatgtcactgtctaaattcattgttttgcatgtggacatacaatatttcaaacatgacttgttgaaaatattacactatatcctttgaattacctttactcctttgtcaaaggagttggaaaaggaataaatcagttgactctatttgtgtctatttctggattctctccttggttccattgatctatttgtcttttctttccccaaccttacactgtcttaattattgtagctttacagtaagtcatgaagttgggtagtgtcagttcactgactttgttctttttctttagtattatgttgactaatgtagatcttttgcctttccatataaattttagaatcattttatggatacttaaaaatagttcgctgaaaattcaatttatttatttcatcagagttttgtaattttccacatatagattctgtgtacttttgttagatttatacctaagtgtttttgtgggggttttttttgttttttgttttttgttttttttgcagcatgctattttaagtgttatttcttaatcaaattccattttttcctcaatggtaattgctagaaagaaattgactcttgaatattaaccctgtatcctatacccttacttgtttgcttattagttccaggatttggtggtgttctcattgggtgggttggttgatttgttcattctttgtgattttccacatagacattcatgtcatctgagaataaagacagttttctttctttctttccagtatgtatgccttctcatttctttgtctttttgcactagctaagacttccagtacagtcttgaatagragtggtgagaaaggacattcttgctttgttcctgatcttagtgggaaagcatccagttttccatcaagtatgataatagctgtagagtttttttgtacatgttctttatcgaggtgaggaaaatcccctatattcatagtttgctgtgaatttttaatttttaatcacaataaaaaatgattgttagatttttttgaaatatttctccttcatttatcaacatgattatataattgtttttatttaatctgttgatgtaatggattacattgactgatttttgaatgttgaaccaaccttgtacacctggagtaaatcgtatttgkttgtggtatataattccttttacacgttgttggattgatttgctaatattatattaagaatattttgcatctatattcatgagagagagtggattttggctttctttttttaatgtctttgtctggttttggtaatagggtaatgctgacctcatagaatgagccagtaagtttttcttctgcttattttcctggaggacatggtaaagaactggtataatttcttccttaaatgtttgctaaaattcactagtaaaaaccatttgggcctggcactttggtttttggaaggtaattaattattgattcagtttcattagtggatacagctctattcagatgatttatttcttgtgtaaattttgatagtttttgtctttcaaagaagtagtccatttcatctaaattatttttagttgccaatgttagtaatttgtaacttctctctttttatcttgattaccctggctaaaggtttgtcagttttattgctctttctaaagaaccagctttggtttcattgatttttctctattgctttcctgtgtttaaattcattgatttatgctctaatttttattatttcttctgcttttttaaaattttaatttcaacttttattttagatacaaagagtacatgtataggtttgttacataggtatattgtgtgatgctaaggtttgggtacagatcctttctcccaggtagtgagcatagtacacaataggtagtttttcaacccatgtctcccctccctcctgtccccctctagacatcccagtgtctcttgttcccatgtttatgtccatgtctgctcagtgtttagttcccactgacaagtgagaatatgtggtatttggttttctgttcctacattaatttgcataggataatggcctccagctacctccacgttgttgaaaaggacgtgatttttttcttttttatggctgcatagtaatctgtgatgtacatgttccacattttctttatccagtccaccattgatgaacacctaggttgattatatgtcttcactattatgaatagcatggcaatgaacatgcgagtgcgtgtgtctttttggtgaaatgatttcttttcctttggatgtatacccagtaatgggattgttacattgaatggtagctctgttttaagttctttgaaaatattcacagttaaaatgaattacctaggaatatactaaccaaggaggtgaaagatctctacaagaactataaaacactgctgaaagaaattggagatgatacaaataaatgccaaaacatttcatgctcatggatcagagcaatcaatattgttaaaatggccatacttcccatacagattcaatgctattcctatcaaactaccaaaatgatttttcacagaattagaaaarcctattctaaagttcatatggagccagaaaagagcctgaatagccaaagcagttctaagcaaaaagaacaaggccagaggtatcacaatacctgtcttctgctttctttagatttaaattactatttttcccctccttgtctccaatgtctcttttgcctgaaattaatgtaactactacaactttattttgattagtgttagcattgtgtagctttctgcatccctttacttataacctgtctaagttaaaagtgggtttctttgtaggccttattcttttaatcatctctggcaatttctttcttttaatcagtgtatttagacaattcacatttaaagtgattattgatatagttgggttattatctaccatgtttgtaactattttatatttgtaacatttattctttgtttacctttttttcctcttggcctttcactggtattcatcaggcattttatgtgatttcattttctctcctctcttagcatatcaattatacttctttttttaaaaggtagtaatgtccctaatgtttgtagtatacatgtttaatctaagtctggcttcagataacgctataccacttacatgtagtgcaggtaccttataaggaagtactttcaattcctccttcctatccattataacattgctgtaatttatttcatttatccatttgctataattactcaatatattgttactattgttactttaaacatataattatagatcaattaagagtaaaaagatgaaatattatcatttaccttcatttatttcttctctgatgcttttcttttatgtaggtccaagtttttgacctatatcattttccttctctctgaataactttttttcaacattttttataatgtagatctcctttcaataaatttttatttgagaatatctttctttctctttcatgtttgaaggatagtttcattgggcatagaattctaggttagtgaggtttttcttttaatactttaaatattttactccattctagttttatttacacggttttctgagaagtccattgtaattcctatgtttgtttctctatagattaggtggatttcttgccccctttggcttctttcaaaattccctctttgtctttggttttaattttgattatgatttgctcagctttcgatattttcatatttattctactttgtgttctctgaacttctggatctattgtttggtgtttcttctttattttgggaaattcttagccattattacttcagatatttcttctgctccattctcactttgttatcttcatattctaaccatgcatatgttatacgttttgaaatttttcttgggtgtcctgggtgtttccctccattcttttttctttttgcatatcagtttgggaagtttttaactgatgtatcttcaaattcactgattctttccttgtccttgttaaggccatcaaaggccttctttgtttctgttggtctttttattattattatcattattattattattaggatttcttttagatacttttttagcattttcgtctctcgttacattgtccgtttgtgcatagtgtttactttttctattagaacacttattaatcatagttgcattaaattatctgataattctaacatttgtgttatatctgagttgggttctgattcttgctttctctctttggactgtgtttttcttgccttttagcatgccttttaatattttgttgaaacatggatatgatgtatctggtaataggaactgagacaaataggtctatatgtgacattttgtgttagaaattgaactgtgtttaatgtttgttatagttgtacatgccagaggcctcacattcttctattgtccttattttttcatccccactattgtctttggcgtccctaagatctcctccttagatagagtctatgtcttgctgctctttgagctgtaattcactaatattatactggggtcatgtcgatgtggttttaaggtatggggaaggaaaagcattctataatcttttgattatatctgtcttttagtgggactatgtccctgagctatgaccttcatagatgttcttaggcccctactcctttasgtgagacagaaggcttgcaggcactagagttgaagagatgtccttcccctgtgtgcaataggcttttgtaaagtctcttcctcttaaaaggtctttattatggagaactctgtgttatggaaaaacactgtaaaaaatattttacagtgtttacgctttccctccccctgccagagccaagaggggatcattcttgactctttggattcctggaggtaaaaccgatgaaagtgtgggcccccttccactaagactgttaccctcaggagttgctcgctttcctattagtccacactcagcccccaacacttcaaattaccactgaagtgtccctaccagtttatgactccagcagctgctcctccaagtaagatctcagctgtgactgtctgggttgtcctttctyttcagatttcagggtgatagtttgtcctgtaacctcagttctcttatggatccaacaaaaatcactgatttgcagtttcttagcttttttttttttttttggagtaaggatgggataaatgacttagacagtttttacatgttggagctataaccacaagtctctacatgtctttaatgtacttgctgactttccctactggaatgtaagcttatgaaagcaggggccatgtctgttttattcatagctacagcttcagtagccagaatagcacctgactcaaagtaagcgggccaataaatagttgctaatagactaattaatctcttggcagtcattgagcatattgttataccaggcactgtgcttagtgtggaaagacatcaggtgcctacattattacagtggtgtgggggcagggcatggtggacatacaactaamataacaataaaccacagatcagagaatagggaagttttaaagcactgaggacacatacctcatctagcccaagcaagagggaggtagaggtaaagcattgccagagaagaaaaccatcacctgagttgagttgtaaacaatgagtagctgttagcctgtatagtggagagggacccagccaaggagacagcacagacctgtcaaagtccatgtcggacaacatgcaaagtgatttacttaacccacctcatgaacgtttagtagcccacgcaaggcaggcccctgttaactcacaggtcaggaaactgagcctcagacagtttaagtgactcgacaaaatgtcaccaatgctgagtgatggagcaagtcggcttgaggccaaggtccattttctccctgctacaaagatgactaagcacgactcagagtctggtggaggagcagaacacataaacagtctttgatgatacccatgctcttttgaatttgctctattgttgttcattttctttaagatttcagccctagaagtagcaagctgaaaatcagggctgctttgcaaatgcccacaaaccactgaggggagttttgtcaaagaaggcgggaaagaaaaataaatgtgggcttctgctctttaaacctcagcccagtgaggcagactttcccggaatacttcaggcctcttcaaaggcctattgtggaaagtgtccagatgtgcgtggaaaacctcactgggaagcttcccggtgaagaggccttttaagcatgaaccgagatgaaggaagctgacgccatgagtcctatcaggtggccttttttctgaaggagcccagattttcccctaaccttaagaaggttgtagggggttgggtgattagccagttcgtattcctttgattacaggaagcagtggggttagttgttttttgttgttgtctttcctttttttgctgaagtgagaagaggagatgggggtggggggcattctccatatgatttatctacctgtaagttgttagtgacagtctggtcattcctccagcataccttgtgagggccaggagggatttctggattggataaagttgaggcactgagtaagtcctgctagtttctatgatgatgcctctgagtgttctaagagtcagaatcccctggaatctggctctgatcccctgctccgaatccctgtttaagctctcttcccaatgccctgtttatcctaggtttgaggccccatcttcctcttgctagatacagttaagccagagagacccagatttaaatcctgctctctcattagctgtgtcatcttgcacagagtagcatcagcctcaccgagcctcagtttcctcatctgtaaaatggaggtaataccagtcccgtcatcatccagttgctgtgaggattaaatgaattgctgagttgccgcacacaaagcatctggtccagttcctggcacagagtgagggttcagtttattttcattccttttctctttaatccagttgtacaaagaggcagagctgtcccatttgaccagagaattttacttctgtagctctttaaattctctccccgccatgtacatatgggcttagctaagtattttgagatcacagtgtatttaggggaaagtccttttggctacagctaaaattaggcctctcttgtgctcctctgtttaccaccccccttcctattttaactaattagaggcattgacactaagaaacacttaagaaaagttggaagaacagctgggagttgttctagatacaagcagctgctccctgtcagcatgcaggcacagaaaaggatgatcctgaatggggaagtgcagggagggcacctcagagatgaagatgaggaatggcaaagtctgtctatgttgtggcaawctgagcagggtggagttcttatcactctgtcctctaccttctgctgagagaaaaggggggtcagagataccaaagcagatagaggaaaggggggcaagaaaggggaagggaaggaaggtattcaggagcttagctagttggttagttgattactttatgcagaccactgtcgcccccacctagaccactgcrgtatctcctaactggtctcatgctgccggctgctttcctgctggaaccagagacgtcacaggaacatgcaattcttgcaccctgaaatccccgcgacgagcttccaccatggaatttagacagaattccaaaacccatcacatggcccccgagtacctggatgcaccttccccctgttccccgtaattgttactgctcagtcctgctggcttctgttcattcgctctgcttcaaaggactttctctcctggagccagattgcctgagtttaatccaggtttccctactcgctactactacttacaggcctctccatctcccttccagccttaaacacctactgagctcccctggaattccctgtccacgtcctacacactctcctcatggagtccccgggcctgtgcacccccaaataaaagtttctgtgtttccagatggccatggtgactgtgcataaagcctagcaaatgtgcatcaagccagaagacacgagacctttccaaagggctcatgtcttctggcctgatgcacatttttgtgtcccctgccccatctcctcctcactaccctcgggaaactgggtgatgtctctgtgggaagggctgagcctcaggctctgtattgattgtccagtgctgcatttaaacttcctgactggatattcagaacttatgctgttgttttgttttgttttgttttgtttttttgttttgttttgttttttaaagcaagcaccttcacatctcaggtgtaaatgccagatcttctaacacttacaaggacaaattcatttcttactaaatagtcaagcttaaaacccacatgactggctgatgtaagctttggccttgtctgtgaggaatttttgcaacattatttctcttgatttctttctttgttgctgctgttctcagaacaaggcaaggctgaggttctccttctcagttactccatgtccctgaattaagccctgtgagatctaaaaacaggagctctgtgcacacagccgtaaggacaaaccctcactctgcatccccctaagtgggccacatgcctaagcccagaaatctaagagttacttctaacaactttctctccctaacaccctcatctggtctgtcactgaagcatgttttctgcctcctgagcatctctcacatctgggtgataagagagccaccttgatgtcccctggcccttgctgacctcagcagagcctttgggtgacagtagctctggcttcccagggcccttggaaaggagactgtggggtccgcgtggtatggccctgcctgcctcttggttctgtttcacccacacttcccttcactcttatctgctccaacaacacagcctttctcattcctcaagtatcagttttcttttctttttctttttatttatttcagtagggttttggggaacaggtgttgtatggttacatgaataagttcttttctgagacagggtcttgctctggtgaccagactggagtgcagtggcaccataacagctcactgcagccttgacctcctgggctcacgtgatcctcccatctcacctcccaggtagctgggaccgcaggcgtgcaccgccacacccagctaattttttgtgtttttttgtagagacggggttttgccacattggccagactgatctagaactcctggctcaagcaatccacccaccttggcctcccagagttctgggattacaggcgtgagtcaagtgtcatttttcgtccttccgtatggccctctcctctgctagacacatgcttccccctccttcagccattaatacctgtgcatcccttgaatctcagctaagctatgacatacatgaagcatacatgcatatagacacagacatacataccattcaacctaacatgaggtgattgaggaatgccgagaccctcctctcccctctcagtgccctgaagcagcccctgggggaggggatggccctggtccctctgactctgacagggactgccctcccacagagagaggaaggcctcgggagctggttgtgggctcacctctgtggtactgctcttcctcctgcttctgagcagagaaggcctgggggccaaggtgcccaggggctgtggacaagatccttttatgctctgtccttgcctctaatgtgacagattattttgtaattacctggcagagataagtttggtttctgcaaataaactagcaaagattccaaggttattaaacacaaccttrcctcatctatctggtcatatccaaaaaccttaaaagaatttttgttcttctgaatttcactctccaaggcacaaagaccaggtgatggtggggcaggggtagagagagggatgggaagacttctcacagtgattcgagaacgttcacacacacatacgcacacaaaaaccttcactctccccctctccaaccccaccccactgactgcacacatgtcttggcccccttgagaatcccttttccatagacaagccctctgaggtaagaggtttaggcctccttcctcctttagttaacatcttgtctccacagaaccacatccaaccttccatttttctccaacctctttagctcatgaggaagatttacagcctgggagtcaggaggcccaagttctagtccttgctttgacaccaggtgatattgtggtcttctctgagtattgttgkttcactcttatgagagcattctcagacctgtggcattttcaccattgaatccactgtgcacagaggyaaccaacatttgtgacacctgctgtttgcaaaacactgagctaagaattagtgattacttctcaacccaccatctctacaaggcagctatgactcctgttttatctatttatgaaggaagacagagcttagcaaaattaagaatgctgctcagacccacaaacaggtaagattagaggcaggtttcaaaacgaggtctctgtctccagagtttctgccatcacagtaagctgagtctcaactgtactatagaaaaataaatcaaaatgacattttaagtatcatctcttttatttatgcattatgcaggagatggaactcctttcttagatttttttcccccaaatatgctgtgctcaggagctgggaaaagggaaaacacacaccctgggaccttacaccctgatatggtttggctgtgtccccacccaaatctcattttgaattcccccatgttgtgggagagacccagtgggaggtaactgaatcatgggggcaggtctttcccatgctgttctcatgatagctgataactctcacaagatctgacagtattataagggggaatttccctgcacaagctctctctcttttttttgcctgctgccatccatgtaaggtgtgacttgctcctccttgccttctgccatgattgtgaggcctcccagccatatggaactgtgagtccaattaaacctctttcttttgtaaaatgcccagtttgggatatgtctttatcagcagygtgaaaatagactaatatagtaaattggcacygggagtggggcactgctgaaacgatacccaaaaatgtggaattgactttggaacttggtaacaggcagaggttggaacagtttggagggctcagaagayaggaaaatgtgggaaaatttggaactccctagagacttgttgaatggctttgcccaaaatcctgatagtgatatgaacaataaagtccaagctgaagtggtctcagatagaaatgaggaacttgttgggaactggagcaaaggtgactcttgttacgtttcagcaaagagactagcggcattttgcccaagccctagatatttatggaactttgaacttgagagagatgatttagggtatctggcggaagaaatttctaagcagcaaagcattgaggaggtgacttgggtgctgttgacggcattcagtttcaaaaggaaaacggagcatgaaagtttgcaaaatttgcagcctgacaatgcaatagaaaagaaaacctcgttttctgaggaggaagtcaagccagctgcagaaatgtgtataagtaacaaggagccgaacgttaatccccaagacaatggggaaaatgtctccaggccatgtcagaggtcttcatggcagctcctcccatcacaggcctggaggcttaggaggaaaaagtggttttgtaggcagggcccagggtacccctgctgtgtgcagcctcaagacttggtgccctgaatcccagctgctccagccatggctgaaaggggccaacatagagctcaggccatggcttctaaaggcgcaagcctcaagccttggcagcttccacatgatgttgagctggcaagtgcacagaagtcaagaactggggtttaagaacctctacctagatttcagaggatgtatggaaatgcctggatgtccaggcagaagtttgctgcagggacagggtcctcttggagaacctctgctagggcagtgtggaagggaaatgtggggttggagtcccagcccagagtccctactggggcaccgtctagtggagctgtgagaagagggcactgacctccagaccccagaatggtagatccactgacagcttacaccatgtgcctgaaaaagctgtaaacactcaacaccagcccatgaaagcatctgggagggaggttgtaccctgcagatccaaagcggcagagctgcccaagaccatgggagcccacctcttgtatcagtgtgacctggatgtgagacatggagtcaaaggagatcattttgtagttttaagatttgactgcctcactggattttggactagcatggggcctgtagcccctttgttttggccaatttctcccatttggaatggctgtatttacccaatgcctgtacccccattgtatctgggaagtaactaacttgctttcrattttgcaggctcataggcagaagggacttacctttgtctcagaggtgacgctggactgtggacttttgagttaatgccaaaacgagttaagactttgagggacttttgggaaggcatgattagttttgaaatgtgaggacatgtgatttgggaggggccaggggcagaatgatatggtttgactgtgttcccacccacatctcaccttgaattcctccatgtcgtgggagggacccagtgggaagtaattgaatcatgggggcgagagcaaactgaggaccagagtggttataaaacttgtctgaattcataccatttacaaagtaaaagaagagtctagagcccaggtctcctgagtcctcagaatcaaccaagtcaaataarctcccctattcaaaaagaagaaccttcaagaatattaattttgtgcccatctaaaagcctcactgagctgtgctaaaggtaataggcattgaagaaaacgttctcacagaaactcccagctgcaaacacaaagaagcagctctccagggaacagggtaaggattgtctgaagagatctatgctggtgagattacaaaaatcataatatatgaataaatgaacatatggaaggaatcagcaaagccctctcattcttcccgtatgtaaactcggcctttgcctaaagtcattaagtaaacacagatgcagccaaaccaggcaccagatggcaaacaagaattggaataaaaggtaaagaaagcttttggtgtttactcaaagatgkggaaaaaaacyatgatccaaaatgctgtggtttccccagaatggccacctggagtcaccagggcccaaaagtgaccaaataaaacaaaacaaaactagaataatcatgattgggaagttgtaggaaaaccgctgctatcttctgtgaatggaatcccatgtcagaagaaactggttattcwgggaaatgaaataaatggttaaatcaaagtactaggaccagagagcaacaggaatgtggcaagaatccacttttgctgggcactcacatctgtccagagctttgtattcttggccttatataatcctcacaattacccattaggtattrgccaaattttataaatgaggaaattccataaatgggttgagagagattaggccccaaggtcacaccacaggaatgccatcctagctgtggccagtgcttctttgtccattcccagcttcgtagctctgatttcagtaccagatacaggggaatccaggcacattctctctgcctttcctgcccaaaccactggacctaagtaagaaggtcacctggtcaggtactgccttgaagggagaccagaacagacatggagtggggaacagagcattcctgaaaacttaacttcacctttatttcacaaaagacacccttgcacatgcctcatccacctcttagcttgtacatttgccatgagcaccagtaatgaaggcagtccttgtgaatatttgcttttcagtatgcatgagtttatatattgggggtagaaaattccaataatgtttcagcttcaactaaaagctgtatcttgttctgtccttgcctctaacctgacagattattttttaattgcttggtagagataagtttggcttctgcaaataaactagcaaacatttcctgcccaggctaccaaacacagcctcacctcacctatctggccatatgtaaaaacgttcattcaaataagttttgttcttttgagttttactctcccaagcgcagaaactgggtagtgaggggtgcaggggtatggggagaatggtttcaaccaaaccattcattgcttgcaggtgggaaggtaaggtggaaaatgctttccagctaaacagacctgtctgataaccctaccactaactaaacttgctctcttgggcaggccacattatgctttgagttttagtttctttctctctaaaatgtacgtggaagggctgttttcagaatttttttttcactttcctcttacccatcttctctttttctacatggtcaatctccacgtggctgttttattttttccccattgttctttagcaaagcttaatccaggatgaattcagctttgtggacactataaatcaaagccatacaaccataaggcaggcttctaccactctatactaattgttaccagtctcttagccctggtttctggttgggtttggccaatgggcagccccagcaggaacctggagaataatgaagttgtttattcccccagcgctctccttgctgggttgacgcaggttagctacatccatctaccatccttctacaatggaccacagttcctgtgtgtggccctttccctacaattttgtgcatgatgggaacctctcctccctccctgtcctccttcaggctaagaggttgtaayggctccttactgttggtaatcattaggtacttgtttctttacctaaacctttttaaacaactcttcttgaagcttacttcagttacccaatgtgagtgtcaatctctttcctaataggaacctgaataaatatatcacttcagctcaatttcccattttctacaatgactattatcaaactttgccaattcccatccctgtctttcctctcatgttcagagagatgacctcctgtttattcttagccaccaactacctctaagagaaaagccattagaaagacaactgccattaaatctcccagctttcttagatccggtagtgagctggggctagctcagccctgctcrcaagagcatattgtgcacatctcttcccagcttcacatccattccatcacattcagagcttgaaactggccaagatggaagtatttacaacacagaaattggcaattgataaaattagggctttctattgattatttatcagtattatttatcaacacaccactgcttatatccagatacagtctttttctccttcacatttgttacgatgaaagagatggcccacttattatcagagactctttcatctcctactgcctctaacagcccacttaattcattatccattcactctatgtttagcttcttcaatactatctccttctcatcaacatttaaacatgctctagacctgtgctatccaacagtagccattagttaaacgtatttattgaacccgcgagatgtggctagtccaaattgcaatatgtaagatacacaccagatttcaaacattttgcatgaataaaagaatgtaaaatatctcataaataatttttgtattgattacttgaaatgatatttggggtataataggttaaataaaaacatattaaaattaaattcaccagttcacttacacttttttaagtgggtactagaaaatttaaaattacttgtgtaaatcatattatttctgttggacagtgctgctgtaaacctttcatcttaaaaataaaatccctggctgggcacagtggctcacacctgtaatcccagcactttgggaggtttggatctgtgtccctggctaaatctcatgttgaattgtaatccccagtgaggagggccctggtgggaggtgattggattttgggggtggagctcatgaatggtttagcaccatccccccattggtaccacatagtgagttctcaggagatctggttgtttaaaggtgtgtagtacctccctccacttcctcccgctccagccatgtaagacgtgcttgccttctgtcatgattgtaagtttcctgaggtcttctcagaagcagaggccactatgcttcctgtatagcctgcagaaccatgggccaattaaacctcttttcttcataaattacccagtctcaggtatttctttatagcagtgcgagaacaagctaaagcaggaagattgcttgaggccagaaattcaagaccaacctgggtaacatagtgagacrctttctctaataataattttttaaaaattgccaggygggcgaggcgcggtggctgacacactttgggaggccgaggcaggtggatcacaaggtcaggagatcaagaccgtcctggctaacatggtgaaaccccatctctactaaaaaaatacaaaaaaattagccaggcatcatggcaggcacctgtagtcccagctacttgggaggctgaggcaggagaatggcttgaacccggraggcagagcttgcagtgagccaagatcgtagcactgcactccagcctgggtgacagagtgagactccatctcaaaaaaaaaaaaaaaaaagccagtcaccgtggtgcatacatgtagtcccagctgctcaggaggctgaggccagagaatcagtttaacccagaagttcgagctgcagtgagctatgatcatgccactgcactccagcctcggtgacagagcaaaaccctgtctcaaaaagtaaagtaaaatcccttcttctgcctatcagctcccctagctgttgcctctcatggtcaaggatgctttaaaaggtatctatcctcactaccatgatttttctcaccaccacccctgcctccttaactaaggcagatcttccttccgctacagaaattccaccaaaatcatgctgcctcagtcattagtgctgacccaaggcattgctgagcccaaagggcttttcaacccctactcagctttagccttggcaacattttgcaaagtggagcactcccttcattgaaacacgcttccactgacaacatattttcttgatttccctcccgctgttctgaatgtttctgcacaaattccttttctagttttcctttctcctctccccaatattatatggtagtcttatacaggaatctgtccatctcatctacttctaaggattcatttactatttatatgccagcaggtttacacctatctatataacatcttcacttaaagggcttacagccatctcaatctaagcatattaaaatctgaacccaccatctccacctctgcctgaaaaattggcactgttcccatacgtggcactatcaataaatggcaccacgtgtccttactcactcctggcagaacctcaaggacattctgagcccactctgtctttctgctccacatcagtctctcatggtgtctttctaaattacatttcatgtctcttgaattcttccactttgctttaattctaccatcaccatccttttgtctcacctggactgctccaaagaacttttgaatggtttccttgcctccacttttaccattctttagtttattctctacaaaactaccagagtgatctttaacaaacatgaataagatcactcttgcttaaaactctccagtggcttctccttgactttggcataactcaaaaccttttaacatgatttacaggaccatccaaaatctgacccctgccttcatctatagcttcatctcctatatgctttcccttcattttatccagtcatcttggacttctttaggtcctttaaatgtatcatgttgtctttacttaaggccttcagatatgcatttccttcagtctggaaccttcctcatcaactttctttacccagccaactccttgtcaaccttcagctagttccataagtttccatagtagttttgtcttcctcttcctgtctcccatgatcaccgatgtttctccagcaggctttaaacttcatgaggtcagggatcagagctgtctggttgccycctctatccatattgtgtagcacaatgccttgcacacaataagtactcaataagtatttggttgcacaataaaaatgacattatctggctcaaacttcccattytgagaaagaggaaactgggatccaaagaaaggaagcaacttattcaaaacaacagagcccaggctaagattaatacagggctggagcctcctaatttccagatcttttttttttttttccagcacatcatgtgcctatctataatatggtaaccagaaggaagcagactggattccctgtgtcttgtaaaagccggagcaagttcttatttgtaaacacagctgacatagttgttttctttgtttgttttaagtaaaaggactggaagtacaacccaaaaataaactttgtgtttccaaaccaagaagcttctacaacttttatcccctgcagcctcctttctgtccattgttcatcttccttcccttcattaaccacaggcatcagctgatattcaatgttgaatggtccctgcattctgtgttctttatcactcccctgcccaggcagcatgtcacatgcagcagcagattaggaagtgctgtctttaaatagtatcactcaagagaacattacaagatcctgtgtagcgctggggtggagattgatgtaataatttttagaataaaaataactcacatttttgaaactattagtttgtgactggcactaatttcagtggtttgtatgcattttcttttttaactttatgagtaattatttctattacttctattttacagatgagtaaactgagggacaaagaggttagttaaggcccaagccattctgttttgtttgagacagagtctccctctgtcatccaggctggagtgcagtggcacgatctcggctcactgcaacctccgccttctggattcaagcgattctcctgcctcagcctcccragtagctgggattacaggcacctgccaccacacccagctaatttgtgtattttcagtagagacagggtttcaccatgttggccaggctggtctcgaacccctgaccttagatgatccacccgcctcagccttccaaagtgctgggattacaggcgtgagccactgcgcccggcccacccaagccattctgttagctagtgaaagagtcaaagttctaatctagccagtctagagcctgtgatcctaactgtctgacatcggacaatgaagaatgtgttgacctggcaggaaataccaaaaagtacaactgagggagatcctaaacttgctttatacagatatcctggatcctacccctgattcattcattaattcattaatccatttactcattcatttaattctttcaacatgtatttattacatttttgcattatttatatcaattttggggaatacagagaaagttaatggcttctaccctttgacatctcacagtccagtggggagacgtaagaaaacagacatttatcctactgtgtgctgaatgataagacagaggaaaatcagtgagctttgggaacatggaagagattataaacacataataaagagagtttaaaagggcacyacagtgatttgctttggacctgcattccacacctgtcactctatctgtctgacctctgctctctctatgctcctggcttctagcccttctcttactttggtaccatccttagcctctcaactcctggcttcagattcgatgtctttgcttgtctttttcctctggaagttggtttggaatggattctggcttggctagagggtttctgtatcgtaaacagtctaaggccagctccaaagtctaggccagaatatctaggccccactaccaaaatggctctcgcttagaagaattggagatccaaaagcagggaacttgaaagagcatggagggatagwtggatggatagattccttgcctcttagcttcgattattcacctgcctaaacccagagcagttggcctagtgactaaccaacatcccttgcagctcaatcattattcattatgttaatattatcacacattttgattctttgctgtcgatttggttkctgatctgctggccaaaggatcatcatgggaaggaattactattgaagcaggcagtgcaaatttcaaaagtgttcagaccctgcggcctttcatgatatttcactttcttgagttgcagtctcccattggcctgctccttccgaagcagattttgtcccttgtagccataagtgaagcatatcctggctaaatgtttctgtggactgaaggtagctattgaattgggcagttaagagaatattgcagattcttgtcggtaaatgacacaaaagatgatggactctaagctagctatggaagaaattagagccagacagggcayatgaattgaaagaaaatgaagtgatggagattctggaagttgctttaaagtggagaaggacatttgctaagaatgatagagtacatgagagaattggactgaagggcaatggaattcagaaagtggctgttggtatattgtaatattcataagtatagcagtctcaaggggggctgtgggagtattgaagtgaaatggagatgaaggtcccggaggtggaaacattttgaaaccgtctaacagtggaacattggatgggtcttatgagcagatgctgaagttgtccaggacaatgataaacctccaggtagatagggaggcttgtgatctaggagccttagcctcatttaacatagggacagaaacaagaggctgacagtgacagcagtgagatgcaggggagacatgtgtcattgtatctccatcattaggtggcataaacctcagaggaacaggcttttttgcctgcaactgcaggaatacttgtctggaaatgataatgaggaggcctgagaataatgactgttatcaccttccccaacccacctgaaacatacacacatggcaacacttacctttcaataaagtttctgggaaaataaagtttatttcagttgataggtacatagtaataataacaatatctgcacttttaagcatttagtccatccaataggcctataaaataggtattaaaacttccctttttttgagacagcatcttactgtgtcgcccaggctggagagcagtggcacaatcgaggttcacttcagcctcaacctcccagactcaagggatcctcctatctcagtcagccttctgagtagctgggcctacaaacacgtaccatcacacctggctaatttttattttatgtttttgttgagatagggtttccctatcttgcccaggctggtttcaaactcgtttcaagcgatcctcccacctcagcctcccaaagtgctgggattacaggtgtgaatcactgcatccagcctaaaatttccatttttaaaatgaggaaattgagactcaggatgttcatggcagaactagggtttggattatgatctaaatatcactgaagtctttgtttcacagcaaatgtttaaaagtataggttccaaagccatatgttttcttgtctttgaactgggaatacaaactaggtaacgtatttaataatatagtgctaggccatagtaagtactcaacaaatatcagttgccattataattattgttattgagttactattatttaattacagctcacggcagtactatataccttctcagcctcacatatcagcaagatcatatttttttccagtcaacaatagattattagatgagtgacagcttgcagttttggaacctatcatctgtctgatgcttttagcaagaagcttcctatttttactttgagaaatccataagaagtaagtcaaactcatgtagatgggatgaatacttgctccctattcatgtttggatccaactcttttgcagccaggccatatattaggaccccatctcagagtatcacaacagaggttgatggccttacctagtataaaaccactcccctgtgccgtatttgcccatgactgaatcggaatgaaactttcccttgctaggaaaacactgtgggtatattctctgtcggagtgtgctgagcaaaaccctaatagaatgtaccgtgaggaataaggagtaacttgtcaactgagagttaatcagaaaaccacatgtgcacaaaaccaacagattgcagagctggcaaagacttcagagataatttactccaaccccctcattctactgataaagaaagtgagtcccagggaggggaagggtcttgctcakggtcatacagctggcagtaattttgtttgtttcaataattaatatgaacagtcattctatacatcagtgaatccaccttcctgcctttgtaagcacaatataatgaccataattgaatttgtctttgacagtgaagaaagcaggcttttagggctttacagggccccaaagtcatcagaagaarataaattgtcatgaactaaagctggagatctgcctgttgactgtgagcttcttaaggaatgggcctggtcttattcatgagctaaagcaagtttcaaatcctggcttagccctttactagcttaagcaagtacttaacctctctgagcctttatttcctcattgtaaatttaaataataagaccttcctcagagactgttagtgaggatcaagggaggcaagatctgtataccagtaccttgcgtaaaataggcattcaataaacttgcactttcaccttacatttaacaaatgtcctgctaaaagctagggatacttcaaagaaaggaaagccaacgactccactttcatggagcttagattcaggagggaggaragcagaggtgaggaccacagagaagcaggcagacaataaacaattaaaaatataatttcagatgatgatgtgctatcaagggttatgaggaaaagaaaatgagatgatgtcatagatgtttaggagagtgcactgcttctgctaagagtggccaagggcagtcttttcaatattatgtttgaagagaacctaaatcatatggaaaaagccagacagtcaaagatcctggagaagaccattcctgagagattcagaaaggccttaggcaggaggaaggttggcatgttcagccagcagcaagatggccagtgtgttcccagcatggccagcccagtaagcagggcatgagatgagrctggagacatctgcataaactccatcctgaagttctagtccaccctatgacatttgagttttattcaaaaagcgatggaacactgttgcaaggacgtgttaaaaaataaatattggtctttgtccctagttcctggcacacagcttctaaaattcttggaatccctgctaaaagctagggatacttcaaagaaaggaaagccaaggacttcacttttatggagcttagattaagctccatgtgtatggtaatgagatgactgatggctgagaacccctccgtagcatcaggatgggggctggtcaccagaaagaccaaggcatgattagagggttgaactttcagcccctcccctgaccttccagaatgagaaaggggctagagattgagtcaatcaccgatggccaatgatttactcaattatacctaagtaatgaaaccttcataaaaacccctaaatgatggggtttagacagcttctggattggtgaacacagggaggtattgagaggatggcatgcctggaggaggcatggaagctcactgcaccactgcacctccctcccctcataccttgctctatgtatctcttccatttggctgttcctgaattttatcctttataataaactggtaatagtaagtcaaccgttgtcttgaactccataagccgattctagcaaattatcaagccttggggggtggagtttgtggaaacctccaatttgcggtcagttggtcagaaatacaggagacccaggacttgtgattggcatctgaagtgtgggcagtcttgctggactgagccctgaagctgtggggtctgacactaactaactggggtcagtgtcagaattgaatcaaatttaattataagtcatgcaattggtggcaggagagttggagaattggtgagtgtgaggaaaaaacccatacatttggtgtcaggagtgttgtaggtaaaaacagcccagagaggtaaaatcattcattgattcatttaacaaatccttatagattaactattctggccaggcacagttcttggtgtggtgcatgaatccaatacacacccctggccacatggagcttgcatgctaaagggataataaatatctaaagtttatgtagcatttactatatgctggcattgttgtgttttrcctcaaataactcacgtgcttctcatagcagtcctatgaaaggcatatttttatccccattttchgatgaggcaacaggcatgaagaaattaagtaattattccgtgattatacagctagtaaatgtaaaaatccagtttcaaattctggcagtctgttatagtcagtctgtattttaatcactgccctttattttctctgcttctgaaaaatcacctagactggtcctgactgctataaggggaaccaaagtggaagtcaagagaccagttaggcagtagtggtcagagaatgggatactggaattttcaacaacactgagtagatattattattcccacttaataaatgggaaaactgagctttgattcacacatctgataagtagcagagcctggatccaaccccaagcccatttatctctaaaacccagtatctttctgctaatgcctccatttcctacagaattataaagcttccactcctcccctcctttatgaccaagagaccaatttgaggtatgttttagagtcaaaattagaggactgggcgtctaaaaatttttttttctcttggtaggcatttttataattgaaaataaaataaaatataaatatactgacatgcagttctgttttctcattttcttttgcaaactttaaattgagatatagtacacataaggtgaaatacaaagatattaatgtacagcttgatgaattttgatgaagtatacacccatatagtcaacactctaaagatatgtaaatgtgtgcacatagtgtacttaaaattataaatgaggtgccagttttcatatcatgagtaatgataaagacctctcccactctctttttctctcatcccttcctgcttctcaattgatatttttgtctccaattcatgggggttacacagaataccaggtgcaggtcaaaagatgactgtgtcaaaaggaaaagaaagcaaaataaataagagaacaactagccatttcttaatgcgtgttgaaggaaagtcacattgatatattttctgtttttctatggaggggtcacgtgcctcagcccacacattagcatgtgaacttgttgttccagtcaaatgagtcagagttcctcaggaaggcagattcctgtattttagagctatgtgtcagcatctgtaaaaaaaaaaaaggtacagtgtcctgtattgatgcatctcactgatacacacgtgctcgtctcactccaggtaatcacacctgctaataagcagcagaagtaggatttgaactccagcctagggcactcaagaatcaggctgttttcatgacagggagaatggtaccactgagtccgaatgtagggtttgcaatggcctggagtcagaagtgggcttgaattctggttttactacataatggctttatgaccttgggaaaattacttatattctctctattttcagttcctttattcacaaagtggtgatagatgatctgtgtcctaatgtccttttgagggttaaaaagatcatgtacttaaaataatcagcacagcacagagtacaaagcttaaaccagtaaaatggcaatggcagtggtagtcggcccctaagtcaacagacaccacagtgttttttaaccatatacccccatcagttaaaataaattttgagtatgcatcctcagtacatgaaaacctatttatgaaaaagcatgatgtgctatactgtgttcatagattatttactctataaaacaagtgaaatatagctgaaccaaagtatttccaatgtgtttacctgtcatgatggcttcatgctaatattagcaacatgtaaaagtayactatatgtctatggccaggtgtgtttttaataattttaaaatgatttttgatgatttttaaatgattttgtatgtgcctatgtatcgaaatctaaggcaatcttcttgataattttgattattttcccaatccttgtcttatttgactaggtcttcattgtttttaccttacaatatgaggagctagtactgagtaaatacatcaccattttcttgtttacttgaatctgaatggtgaactggtgataattatctccatcacgtgcaaatccattgactgaatcttttttagctgcttgtccattttgtgagggttagtttaaactagttaatacctattaatcactaacctggaacatgcaaacgacaacatgtagcaattctggaagctgaggacatataagggagtgccatagggccatccctggagttggagagctcccactctcctcacaagaacctcacacatcttatgtgactcatgactgactgatgtgtggccaaactgataaattgtctagtaacaatccatatattaaatgctggtaaagtgtaattaatttcttaagaccaaaaaaagtcatataaatggcacttccagtattttcttctggaatcttaatgagaattccctggagtttatggatgccacttaagaaacactgccatcactttttcctttggcaactctgcaaacactaaccaagcacctgtaagtgctaggactgtgctagacattaggcctacagtgatgtgatttctgccttctgggagttcatatatagcttgtttccaccacactaagttctgctatattctcccctatagatggtgactctggaattgcccagcttgcagtgccctgtagtaccttgggctagactactgacagtcttccccaaaaggcttaagcccattattccccttcctcagggtaggggagaaggtactagatcttctgctcccaaaattgccaacatcagtaagtctaccactcatggaatccacatcttttccaagggtactgaagaacccatggcttcctttaacctcatttccctggtaactcactccaacatggcctacagccctttggtagctcccaggccaggtcattacagtgagaattgggtgtttcccctgsccacatgcaggcctggctgttgccagtgctgccacaagagaagtggtgagcagtgtgtgctgattagtatctcagcctcgacacaccagggaagggtcaaacccatgaatgcagtctttcatggccgtggtacagggcccctattttttcctccagaaacccttcacttgctttcagaagtgatgatcaaatgtgaactttcatggtttatttatagctctgccttatagagagaaagaaaagaagtgattaaaatgctattttacaaaatattttgtttttaaaaagctttcattgtgtgggcaaaaggaaaaagaaaagtcactgtattmattgtgctgtctagactctcaaacaaagagggtagcgtgctgcaaattaagattgtccggctcctgcctgctgacaaaaagtatgaatttggaggccaacttcaaataaaccctttggaacagaaatatattgtgggggtgactatatttagcatgtgtcagcatttccatactaaattcatattgttatgttgtggtaatttcagatttcctgcagccaagtgggatcatgagatttcagttttatgttaattatttggagaaattgaaaaactcagcagtgctgtttctgatgacagcactgattctcagggtattctccacgttgtgtcagggacccataatgagccctgcctttcaggaaaggggaaggtgagcccgagtcattttgactgtctttataagcataactttaaatatatatatatatatatatatatatatatatatatatatatawggcattacatgttttccctacaaatacaaaattaatatatgccactgtagaaaatttagaaaacacaataagcaacttgacaagaaaaaaaaattgttacccatgctatccaacctgttaacattttaatatatattgatccgatctttattatgcatatataacttgtttttatatgcatatcttgtttttaacttgtttttaacaagttatatggagcaaacaaaaaattatgtagcacaaacatgattattgagatagaatacaaaattataactttattttctattctcattatccctttgcatttgtgcagtagagctagtttttccctgctctggttaaaaatcctggtggttccattacttttttagataaatataaagtcacttagataatataacctttatggtcctttaagttgtgagatgtagccaaaattcagaaattcaaatatcaaagaatatgtaaaggtaaaggtaagatgttttccagttcttccagctggagtctgccagaaacgagacatagccctaatcagattcttctttcttcctcattcactttctctccaacatattagcttttttcttgttcctctgaaatggttagaaagtataagggaagaaaagttagtggtgtaggaaakttcttatctgatcagtactgtcataatgggcttcatgctctcttagccttataggtgtttacagctagctctgaytctcataaggcacatcatagatttttggggagaccccctgcctctgaaaacctctcgcctgaaatattgttgtcttggttaacacctgtctattctcatagattgctcactactcttctcttaattcctcaggaatcctttccttttttttttgttgtttgtttgttttggtctcttttttgtttggttttgttttgagatagagtcttgctctgtctcccaggctggagtgctggagtgcagtggtgcaatctcrattcactgcaacctctgcctcccaggttcaagcaattcttgtgcctcaccctccccgtgggaccacaggcacrtgccaccatacttggctaattttgtatttttaktagagacggggtttcactatgttggccaggctggtcttgaattcctgccctcaagtgatccacccaccttggcctcccaaagtgccaggattaaaagcatgaaccactgctcccggcccaacctcatgcttctttatggtgactgctccacctcgttaggyggccatgttggacaggatctgagaacccctggcagctctctcatacatgggccacttggggtctatgggaaacctttgtcttttggatctggacagactctggcagtgctggttgatcccagggtaacctctacttcacttttacactgcagctgtcagccagcctgtctcttccagacaggagtcacatacaagccaccatgtgccacaacctcagggacatgcagcagattctctgctggtctgtgtcttcctgactcctgaagggagaggatctcttcatacttcaccctggaaggaggcctgatgtgcagtaaaccaacagctctttcctaaaaatccatctctgtctgaccttccacatcaatgaaaggtttaagagttgattaatgggtcctcaggcacccttcttgcacattcttcagggtggtctgtttccagttcactttggtatcttatatctgtcatctttagatctcagccaaaacttccattttaacattccgtcacgtgtattatccttaagttcattcattccgtagacattccctgagtgcatacgatatgccagatgccgagtttggcagtgaaaataattataacaattcctgctttaaggcgctcacagtctagttggggaggctgatctgttaacaaaaaaatatggtgccatgtcataaacgctatgatagacggaagcagaagttgctgttggagcacataactcaatataggtgggaggcaggcagcggggatgagtcagaaaaaaatctcagtagagctgatacctgagctaagtttaacatttaaatctgtactttctgagaaacagcataacctctttttaaaccattgaaatctctcttgctgatgtttgcttctcaatttatttttaaaacaagcaaaggtaatgtggagaaaggagggaagaattccctgatgtctgccgtttatgtgcacatctgttgcagtgggaaggaaaataacatttatggagtaccttctataatagaagtttcctggatcccacccatgagggcgatcctggaatgttgtctcaagtgtggggccaaagcacagccaggaggagcattccctgagggcagtttgaagattcagagctggcaatagaaggcaaggtcctccctaaagcacagcagagcacaactcaaggaagagacgaaaaggacaaaataagaatgagtggcacggttgatgatggggattgctgagaccatctcaacaataccccggcttgctctaagggaatcaggacttcgtctttgaaggaaactgttctggggtaagcagagctcttaacatacctctgctaagtggaatggcagcatgttcactaagatgtgtttgaccrtttggccctccacaaaatgactccagacagcccttttagtcttcctctttctccatggtttctttgtcaataatttttcttcattaaaaaaaatctcctccctacttaaggctgccatttctttctgttgtcattgtgctggctactcttagcatctctgatctcccaatcagcacattcacatccattgagagctgggaagctagatgtctagttcagaatgcacatgctatccttgtggaagagtccatagagcaacctagcaggagtggaaattcgtgtaagctagcagatgaaagaaccatcaggttacctaacccttgaataactactgaaagaagtttatccgcttctagcgtagtatttatcacactctattttgatcacagtaaatgtcttttccactctatagtgagctctttgatgaaaggcccatgcaatcttcctctctgtattccatgtagattgagtgttatgcttggcacgtgaaagggaggcaatatgttttatgaatagtccaggtgtcgagacttagtagtaaacagacaagtccttgccctgtgtagcttacattcyggttagggcaaggagtggagaaggcagacaacgaacacrtaaaccagtaaatatacaaagtggcagaaggaaattagtggcatgcaaatcagtcaatcagtcacagtaaggtggcaaagatggtcaggggaaacacttggaaatgttttgaagatacccaggggctctcatrttctgtatggtattcagattttttttttttttttttacattttttcctcccttactagtatgtgagtttctccaggataaagagtatgtcgtatgcaaatctrtatccctagcagagtgtgtggtacatagtaagtgattaataaatgtgtagaataagaagttgtacacatgtgatcccagaatgactgcatccttagcaataggaattcaatagccgttcctaagactgagcctatgctgtagagctttgtcgtgctgttgcttgcaatcttccctggccaggtctgttggactccaaagtttactttctcatggccttaacagccttaggagactgcttaaaaaaacctaacccttctgctcatatgggagccaaaacaatccatggttaatcttgatgctgcacctaccataccatgtcyacccagatgctgtaacatgtcatctgcctgagtgccccattgtaaagaaaagaatgtcctgaagtcacattccagaactcaagtcacttagactcagcccggaggtctcagtatgtactcacaacttcagagattgctggaaaaagagctgaagttgaattggagaggtcttaaatattttatcctcaagtacaggtgcgaagtgagttccattccgtgattgctatctttagggaagtagacaatgtactcagcggctggttatgttccctgcttctgccctgtgtccagatagtgaggaggggaaataattcttcccacttacccctggaggcagtcacagaactgctttgccttytgggttgtttatgccccagaggcctcaatacacaagtatttattaagcccaggaggtgtggtcataattgaaactttaaatgttcactgtgttttattcctatttttgtgttttattcttattaccaragaaaagtaagttgaaaaaaaagaggactaaccaaatatcttaaagggaagcaaattcaaattagaatgttttgcctgtgacaagcctcgctttggatttcgctttccaactcagctgtctatgttgttttccatttaataggaagcaatggcaaaaatgagcaaagttgggaaagttgtgttcccgagactacaggataaaaagtaagtgtgtattttttatatgtacagtgctaaggaagtgagcacatacacwcacacatgcaactatagatmtggaataaactcaggtggtcaactaatccagtcctttaatttgtggttaagaaaactaagttccagggaggtaatgtcaccttcacttacctaaggctgcagaactatgtagggccagagctgggggtgaatgtaagcttctgaactctcagaccaatgttctttttcccaggtaattggcagcaaatctgctcttctctgttctaaagtagggatctcttatatctccatcaaaggacccagtagaatctgctcattcttttactctttgtatcacttggcatcaaaggctaaaaaatgacattggtcagtattttaatcccaattcaacaaaatattagtttactgaattcctgctatattcaaggcattatgctgggctccaggcaggtgttacaggggaataaaacacaatttaatttaggcacataagattattttagaacaacgggataagttccacaattgargtattgccaggtgacaaagttgcccaaggaagaaagagatgggagcctgtagagatgagagaatgcttttgggaggaggttatgtccaagctaactttaagcwcttgtaagaaattggtagacaggccaaggcaagaaagaacattcatagtagaaggaataacatgtacagttataaaagtgggagcagcatagtacattcaggttactataaacaactcataatccagaaacacaaagtatgagatggggaatggcaggaagtgggactagggaaggatagaattgggtagggggaggtcagctcataaataccttggaggccatgctgaagacctccaacctcatcctataggcagaacagagatgctgaattctaagcagtggtgagatctggtcagatgcagatcagaaaaatccctcttaaaggatccagtacagggggctcagggtagaaatagagggtccagataaaaggctttttcaagaatccaggctagagatgtaaaagacctctattaatttgctggtagtgattttgaagatgaaggggctgttgtggaagtgcttttataattttagggaagtattcgaggttaagacctaaaagcaaattccacttaacatgatgaacaggcaaatgtgcagatcccactgaagcaggatcagtatttaacagaattggaaatgttcatggaaaagcaatccactttcttttcatttcctttaactccacatagagtcaggctgctaaccctccgaatataaacccttctctaaaggccagggtggaaggtacaggcattgcgtaggggagctccatgcaggaaggtggagagatctgagttcccactggcagtargagctatgggctgctgtccctgtttctgttccctggaggcagctggagcatccctctttttgtgaaattagaaagattgtctttctccatctcttccctgaccctcccaagacttttcagggaagtttttaagttttttccgtaaaccccacgtgttcagagagtcctccgctgcttgctgggagctggcagctggcagctgttctctgcgaaggaggcggcacacacggtgctttagcaccatctgcaggcaacccagagatttgcaaggagacaggagaagccagtttccttctgagccaacctcatctcattgcctaatagatcacactgttaacgatgtgggacgacatttacttaggcctctgccacacagaagcagggactgagttgaggcacattttgaagagaggggattcagctgattttaaaattcacagtcacggagagtgtaatttagtgactatagtttaataataaatgtttaggatgaccccaaattgcattattatgttcagtccaaatttatatgtggctctggaagagtcacttaaatgtgctttgagaaatttggtgcattgaaagacactatcaacagagtaaaaaggcaactcacagaatgggagaaaacatttgcttatcatacatccagtaagggattgatatccagaatatataaatgtataaagaactcctaaaactcaacaacaacaaaaaagcaaaaacaacccaattcaaaagtgggcaaaggacttgaatgaatatttccccaaagaagatttataaatgacsagtaagcacgtgatagggtattcaacagcactattaggaaaatcaaaactaccgtgaggtaccacctcacacattaggatgctactattttaaaacagaaaacaacaaatgttggcaaggatgtggagaaattggaagctctgtgcatagttggtgagaatgtaacatagtatcgctgctgcagaaaacactatggccattcttcaagaaattaagaatagaattaacatgtgattcaggaattgtatttctgagtatatacccaaaagaactgaaagtagggtatggaagagatatttctacattcatgttcacagcaacattattcatgatagcgaaaatcatgagagcaacctaagtgttcattagtagatgaacatataaatgaagaatgatatgtgcatacaatggagtattattcagccttagaaagaagcaatttctgacatgccacacatcagtgaaccttgaggatattattctaagtgaaataagataaccacaaaaagacaaatactgcatgattccacctatgtaaagaataaggccagtgcacaaagttgtggcaaagttgtcagtattaacattgtaaatcaagtgtgtgtgaaggggtgctcaccttagctcccttctagmwattttgagattctaaagtcaagaaatctatctcatgtagtgaaagaattccttaccgttatattgtcacagagcatcattagtaggagcaaattgttcctaaaataattctacaactaataaatttggatgctcatagagtaggtcttagtagtacctacatatagctatattgatgatattaaaatattaattatctaaaatttagtaactagcatttatatcacttattatgagtcaggtactgttctaaatgcttttcatttatttccacatttaatctacaacagctctgctgaagtagatcccataattatccccatttacagatggagaaatttaggcagaaatagtttaagtaacatatccaaagtcacacagctaatgttaggccacattaagattccaacccaggctttggagttcgccttttaaccctgtgcttggccccgtcacaactcctacgttaccagaatgcttacagtctaataaatattgggtaggggactcctactaacatagctatgtgtgacaagtagaagtccctgtgtgtatccaaggttactcttacaacctctctctgccaatgcacaactttgcaccaaaatttcatcatgaggactccttttcagagcaccccagaattgagcaagacatgctaaactggcttcttcaccccctcaccccatgtcagcttcccaaccaagaggagtaaggacaaagttgcaaggctgcaagtataatttgtctcggttcctattattcctttcaggattatgatgccagagcagcttcagctgttctgctgtctgattcatggccaataccagttctaacaggtctaacccaaagagtcagccagataggacagggagagcaacggccactgtgagatgtctggaaggcgagcacagctctagaaaaggcattagctacatttccatggggttttgctcctggataaagcaggtcacaagggaaacctagatgtggaatctgcaaaagggcaattaaaatgttyagtctttgtccttggtcaggctgtgattttaggccagtcatcaaacctggggctagttatataggaaatacttattgaagctggcaatgtgaaagagtctccattaagtccggcctttttgtatatacagtagaagctttgaagtcagacagacatgagtttgaattccagctctgccagtttttatctatactactttgtatatgcctctcatttaggaatttttttttttttttttttgatggagtctggctctttcacccaggctggagcgaagtggtgcaactcaaccacttcacagtgaacgggggacggttcactgcaacctccgccccccgggttcaagcaattctcctgcctcagcctcctgagtagctgggattacaggcgtccaccaccatgtctggctaatttttgtatttttaagagatggggtttaaatgttcttatttctaaattggarataataaaacttcatccaggtcacatataataggtctgaaacatgctaattcattgcccaggatgctgtaagcattcagaatctaggtgtcagcatcaccaccacacatatatttccattcttctaaatgtacagggaagcyctgtggcagttttgtcttgagatcattcaacatatttatatttctcccacagatactatgataagaaataccaagtattcctgaagctggttgaacaccagaaggagtatttggcgatcatgaatgatgactgaacagggcttgcaggtgctgatgccagaagcttctgtgccattgcattaaagacttgtcatttgatccatgttcaagacccttgaggtattgtttcatcatttctgtattgtctttcaataaagaaaacaaacatgtgcaaccagaattagagtcttcatttcaaaataccgctattatttagtttcagtttccatacagtctccattatagtaacagaagtttcacatagggtcataggatctcacatgagactagaccttgggggctattcaatccagggaaggcctgtacttttttttttttttttttttgagacggagtctcgctctatcgcccaggctggagttcagtggagcgatctcggctcactgcaaaccccgcctcccaggttcacaccattctcctgcctcagcctcctgagtagctgggactacaggcgcccgccaccgcgcctggctaattttttgtatttttagtagagacagggtttcaccatgttagccaggatggtctcgatctcctgacctcgtgatctttccgcctcggcctcccaaagtgctgagattacaggcatgagccactgcgcccggccaggcctgtactttttaatcaattaaatgtcagctattaaatgaaaaacttacattactttaggtaggacatctaatgcatagtcgatgtcttttatggcattttcccctcctgtgcaggatctagtctagggtcagataccacatttatttgcagaattgtaatttcacaatcatcatattaaagacaggtataggcaggaatcatcgatggatccaggagggaattttgaagaataacaggatatatgcataatcttaaaatatctcttcagaatttgcttattagttacaagaggaaaaagaacgttaagtatacagggaagaaataggacaacatcttgattaggtgatccaaatcaacttcagatgggcaaatggacattgtgtgcctccagatatgagaaaagaaagagcattttaatgcagagcctgaatctaatcagaaggaaacatcagacaaacgcaacatgggaagcattttattttttaatggactatatttttcaaaaatatctatgtcatactgacaaagaaaggctgtgggaagtttccagattaaaggaaactgaagaaacctgatggctaaaagcttttgatgtagacaagcactgggaaaactagctgttttagttgataccacagcagacacacaaacgcacacagacatacacatacatatacatacataaatatgtcaacacccacacataatttcagacccaagagtaactgctaacgttgatttgagagctgtcatagctcaaatgagtgtgggtagaggacatgctaagacttcagcaaaagacagcaggtagagaagaaaaagccaatataattcagtaaataaacatcctctggagtactttgtgccacatgttgtggtaagcactggtctacaggaataaataagacatggcccctgccttcaggaacctccctgtttaatgagagacatagacaaatagattgatgacagtacattatgagaaatgctacaattacaaaaaaaaagtacctgctgcatggagcccatcagtcagaaaaggaggaaggagaaggtgggatgaaaaacaatatggtgtaacagctatgagccctggcctgggatcctaggcctggtcttacctcttactagatgggtgacttggagaaaggtccttaatcttcctaagtctcagtttcctcattttgaaatgaataggtattgaatatgaatatgtttttgttgttgttgttgttgttggtttttttgtttttgtttttgtttttgtttttttgagacgaagtcttgctctcgcccaggttggagtgcagtggcttgatctctgctcactgcaagctccaccttccaggttcacgccattctcctgcctcagcctcccgagtagctgggactacaggcacccgccaccacgcccagctaattttttgtatttttagtagagacgggggtttcaccatgttagccaggatggtctcgatctcctgacctcgtgatccgcccgcctcggcctcccaaagtgctgggattacaggcgtgagccaccgcacctggcctgaatatgttaatagtacctactttacaggattataatgaggactaaaggagataatgcatataaagcactcggctcaattgcatggtccatgcctgtgttattacagggctctgctcctagaagatgctcaaaatagtaactgtagtaagcatggagaagggtgagcaccccagttatgaaggtcagctctgcaatagcattctacagtatccaaaggatatagggaccttaggcatagccccgagtgaaggtgggtgtgcgtgtctgatctagctggcctaaaagcagaaggaagcccagtgcattcatagatcctagccagaggttgcactagggataaaggaggattggggatcactacagaagaggagtcgggtattgcaggatctaagcaagatgtcaggtctatggtcaaacaggcttcagctgcaaaagctgattatcactcactgagaaacgggcaggcctggacctgctcacacaaaaccctggtgaatgcggtggttgtctgtggatacaaaaggcagacataaaagcatgaataattaccaactatctgccaagtccttgttgtatgtcctctccaatcctcctacagcactgtgaggtaggcagcattatctccaccttatagttgagaaagttgagtttcagaaaagacatagttgagaaaattgagtttcagaaaagatagacactttgcccagagtcaccagatggtagcagagataggattcaaatccagatctgcctggatgcaaaactttaggtatcaccccactgtaacagctggagaggaatcctgcccaccacctgctctttagttgcagtgctcatgttgttgattgccaagctccgggtgctggccattctttcaagcaaactcgtatccaaaccaaacctgacctgagttttcactgctttatagagaaaggaaaacacacagaaattaggcaaaaacacatggcaacactaggacacctttggcatctcaacagtgaggagcagcttgatagaaaggagaagggctgaaagaccttgggcaacatagctaacctgtctaagcctcagtctttccctctgtggtgggatcattctgctacctacctcctagggttggtggtaaggattcagtgaaagaactgtggataaagcccttagcacaatgcctttcagacaataggcactctacaaatattgtttctccatggttctctctgcctcctagctaggaggttaatccctaagaaaatcattctggttcctactataaagccaccgtgttaggaaaaaatataaatgtctatatataattctattagaaaccacgtgtggctcagtaataaaaattttaatcactccaatacacacctccttgcactgagaaaggtggttttatttaatacatgcatgtaaagtatatttagctttgatgaataagaattgcagtgtggccagagtggtttgtgagatttttgttttgttgcctactgaaagcttttctttcaagttaaagccagacttgcttagcaaatcattttgccaaggaacgcattacaggttttaaattttgaccaaaaatacttcccatatgcgaagaacataaatgtggctttcaaaagagccaaagagaacaaaagctgggggaggtgaggaagaaaagacaagaatgacagaatggagtggcatgttgcagagctacagtaaactacaggacccgatgccacagtgagctggagtcccagtgaggcatccagaagggacgccctctcttgtgaagatccagactgggcatttgatctttatattcagagcataatctgtgttgttgccagttgcactggggagtataagttccaagaggagcagtaaaaatatcgtaaggcaaccctggaaacgcccagctttaagaatgcaccaaatcagcatgtgagttagcaagctagaatgcttaggttttaatatcaacatgatctgctatttctcccaggcctgaggataatcacgttctttagatttacttacctgcttttttcttcctccccccggccaccggcctgtgagctcttggagggctcagagtatcttatagcctgttctctgtacccaaacagttcttggcacgtaatgggtattccataagtgaataaatacacaaacacaagatgtttttctgaaaaaaaaaaaaaaaaaaaaaaaacactggtagaactaaaaaaactcactttcaggtcaatcttctgtacgtgttaatatgccttaatttaagcaactgtcaaatgctttaaaatgtgttttggtcactaaggatttttaaaaatcatgccttatacctaacaacttgcttttttagttttttattgcacataatacacacatgcataaccacacaacttcattttgggttgtagctcaagctgagaaccttttgcaaattttccatgttgttacagactatttcctgtatgatatcctatgggaagccagaggtgttgtaatccagaaacacccattgttcaccaggactgcaggacacatgctttcagaattcaagggcatagttacaaataattaccatcaagaatttaaaatgaaggacatcgttgctaaacaagaaactaatgactgagtggagctgtgtaatgtaattatacttaagatgggacttctgacgaattacagaagaatctttgtgctgtctcatgtctccataaatacacttaactgctattgacagtaatagaagggagtcttgaatatgaaaagctttttttatccttttatgatttctagagggaaaacttaaaagaacaattatgtttttaaaaaagatgtttctcccagtacttctgaatatttgacaatcctataaaatttgtaaaactaaagtaactttaaaagcaaagacttctgctaataaatcccgacttctcagtttagcattaacttgcccattaattttgtggtcgtgtttcattatgcacagaaaatcatttaaaactacatattagcataagtgttttctaaagacctaatttttatttaagtcctgccttaagccatgattagaagtgcttccttattaaaatctagagtgagcctgcctccctactgcataattgtaaacacatttgaaatagaaaatgatttatttattagtgtctgttatttaggcaaaatcaatagggatgccttccatttgaatacttctttacagtttccctattgattgcacatacattatctcatctgccccttataataaattggtggggtaggcctgacaaagtgggatcccagtttacaaatacccaaactacatctcctagagtttaagtgactggtccaaaagattgcgtagctggaacacagatgcagaaccactccgctgcttcttcctaaataaattaaattagcttatttgtgcaacagcagatgattcattagtttcctaattactctctcttccctgcttcccttcattaacatgatatataaatatctaggaggccccttttgaaactcattggttgatcaaagtactgaattatttctattggcaagcaaaggtaaagtgacaaagccttgagccatggaatcattgagtcctgcgttcaaatcacagcttcattacttactactttacacagtttattaattaatccatgccagttaacctgttagtctttgtttcttatctatcaagtgggagaaaatcaaatctgcctcatggttaatgtgaggattaaatgggaaaatatgcaaagtgcctggcatagtacctgacataaagtagaagtgtaacaaatatcaatttttctcctcaactgatacatatttattatatagaacttctagaagtatggcttccagtcaagttggaccactttatatccagtttctacaggtaaacgcctgtgttccatcaacaacaccaaccgttactgagctcttactatgtcaagagtgctggaatggtccctgttgcatgg

SEQ ID NO: 94123 - DNA, 185392 bp, Homo sapiens
  misc_feature (1)...(185392): n = A,T,C or G
tcccccaagcaatttgtgatccatccacacaaccaaaatctactctttctcaaacatgccacacaattttaaatctctgctttggcataaactgctctttttgctagaattctaaaccactttccctcctaacaaactttctgattttctcctaagatactcccctgccctaatactgctgggaaatgtgttcatcaactcatcttagcatcactcttcttagcaaactaaattttttttctcagtcatgcttccatatgacatgcatctctctaacatagagctttgtatgttaaaacagtccaaattgtgaacttctcagaagcaggaactttcttattcatctgtgtattctgagagcctgggatattacaaaacgcttagtgagtgtttggtgagttaaaataaaaggtggataaacattccaaaataacacaacacagagcagccagggtcaattttgactatatctggaatgtcgctactgctgaacaggatcagttccatagctcatttacttactcttgtatttaccgccaatagaagtcctaagaaatgtactttaggaaaacaatactcaccattaacaatgctttctgagtcttgtctaacagctgtaccatatgttggcacactaagaggtacatggcagttgtttcattatccttaaaaaccagacacgattcaaatcctaggtagccatttatggtttagctactgataaagttatccatttaaaaaaattcacacaagttaatgggtgctgatttgttaactatggagtaaattagaattaaaaaacaaaacaaaacaaaaaaactgtctgctgggcacggtggctcatgcctgtaatcccagcactttgggaggcggaggcaggtggatcaccaggagttcgagaccagcctgaccaacatggagaaaccctgtctctactaaaatacaaaaaattagccgggcatggtggcgcatgcctgtaatcccagccacttgggaggctgaggcatgagaatcgcgccactgcactccagcctgggcaacagagtaagactctatctcaaaaaaaaaaaaaataaataaaaataaaaaaataaataaataaataaaaccattgataatttatttgcagacatttttctatatttttcccacctaacaaaattgggataatatggattataccgtctttgatattttttgaacttaacatttatattgaatacatgttcactatgtacatagcactggcaatcgaccatcatctttctactgatctttttattaaaaggatgacaaatacgagagtctgtaagagatcctgtagctaagactcatttacctccccactgcacacaaaaaaatagacaaataagtaaaaatgtagagcattaaaactgctataccataaaaaataatggcaacatgggtggagctggaggccatttttcctacccaactaatgcaggaacagaaaaccaaatactgcatgttctctgttataagtgggaactaaatgatgagaactcattaacacaaagaagggaacagacactagggcctgcttgagagagaagggtgggaggagggagagcagcagaaaaaataactattggatacttggcttagtacctgggtgatgaaataatctgtataataaacccttgtaatacgaacttatctatataactaacctgcacatgtacccttgaacctaaaagttaaaaaaaataaataaaactgctatatattaagacaagaagaacaatactagtaaacatttatcccctaatcccaactatgagcttgactaggggaatataatgaggctcacagctggtcatatggtcatatatttaaccaagtggaattattctaacttttagacaatgttttccttgtaatacatttaaataattatatccaaatataggccaggcgtggtggctcacgtctgtaatctcagcactttgggagggcgaggaaggccaatcaccaaaggtcaggagtttgagaccagcctggccaacatggtgaaaccctgtctctactaaaatataaaaattagccgggcatggtggtgggtgcctgtggtcccagctattcaggaggttgaggcaggagaattgcttgaacccagaaggtggaggttgcagtgagccgagatcatgccactgcactccagcctaggcgaaagagcacaactctgtctcaaaaaaaaaaaaaaaaattatattcaaatatataatatcctacatataacaggacttactaaagactaatttttggaataaagtcaattggtcttaaattctttctaaaaagattattagaagtttcacggtagaacgattggactgcggaattaaaacagttagcttatcaatggccttaccaacttaatgaatggcactatgattattatttagtgttactggatcagcaaataatctataaacctgtaaaattagcattgcattaaatgtcatttactagcaccatcacctaccacagattactatgtttagaaatgcctgcttctgcctctaatgaaaatcaaacagatcttagaacatacatgatcatgcatgtatgttgaatttcttttatattcgtttctttttttttttttttaaataacaagtttgttttattttagattcttcttgggcagaaatcattatttactttcttgggtaaaaacagtacagttttagaaacagacttaatttttcaggtggtatcctaactacctatttctaccagattggggaagaacaaagtgatttagggtgttaaaatatatcattggacgaccaataaagatatgctgagtatcactgtggtcagcaatactcactgctcttagttaacactttaactaaaacgaggtgatgatcaattttccaaaaaacaatacattttttataaaaataaatcttgagaaaacaagtcaattacgcacattttttaaatactaagaaacataaaaaaaaaaaaagaaaatcccagacaaaataactattttaaaaaaagaaaaactcttttggcaaaaggtaagcatgaaatggtaacctgcttcattaatcttttttttttaaatatatgatttaaggaaatgaaaaacaaattactaaataagttttatgccaccaaaagttttaactgttagtaaattgatcataaataattttacaattagacacctgatgagagacagatgaggggaggaagagctatttaatagaacgctagggaaagaaaaacaaaaaacccaacagaaaactccaacatttcatttcattatgtggtagtgcaaaatcttactttaagaaataaaaaagttaaaacaaggctggttgtggtgactaacaccggtaatcccagcactttggaaggctgaggagggcagatcacttgaggtcaggagttcaagaccagtctgaccaacatggtgaaaccccgcctctaataaaaacacaaaaaattagtcaggtgtggtggcaggcgcctgtaatctcagctactaaggaggctgaggcaggagaatcgctcgaacctgggaggcggaggttgcagtgagctgagattgtgccactgcactccagcctgggcaacagagtgagactctgtttcaaaaaaaaaagttaaagcaattatatattcaacttcattttactgctcatgtagcgtaggccctaaaaggctgggaaaatatgaccaagttaaaacactgtatgtttaataaaaaatcttgcaaaagttaatcaagtacttcatgggacaaaaagattctcactgctattgctacattacattctcaaagatgatcgtcagcttaatcacagtgctaataagttatgtatccaacagactattgcttaggaaagaggtaagcagaaacacttacaaacacaaactaataatacaaatgcaatttctcaagagatgacatacagctgggcatggtggcacgtgccagtagtctcagctacttaagaggctgaggcgggatgattggttgggcccaggagtttgggcccagcctgagtaacacagcaaaatcccatctctaaaaatatatacatgtgtaaataaataaagaagacatacaaatggccaacacatacatgaaaaaaaaaaaggtcaatatcactaccaagaaatgcaaatcaaaaccacaattagaatggttattaatcaaaaagacaaaaaataatagaatgctggcaagaaagtggagaaaacagaactcttctacacttttgatggagatgtaaattagtatagccattatggagatttctcaaaaactagaagtagaactaccataagatcttgcaatccactcctgggtttatccaaaggaaagaaaatcggtctattaaaggaatacctgcactccatgttcattgcagcattattcataacagcaaagacagggaatcaacctaagtgtccatcaatggataaacggatgaagaaaatgtggtatatatacataatggaatattatttgactataaaaaagaatgaaattctgtcagtttgcagcaacatggatctggagaattaggttaagtgaaataagccaggcacagaaagacaaatatcacatgttctcactcagatctgggagcaaaagaagttgatttcacggtggtagagagtagaatgataggaagggtgttgtggggggaagaggagtggggaagtaagagaagttggttaatggtatgtacaaaccaacagttagatagaaggagtaagttctaatgtttgacagcggagcagggtgactatggttaaaacgtattttatatttcaaaatatctagaagagatgactttaaatattccctagacacagaaatgataaaaacacaaggtgatggatatcctaaataccgacttgatcactacatatcctgtgcatgtaacgaaaccccccataaatatgtacaaaatactatgaatcaattaaaaaaatacaagcacatataaaagaaacattttgataacaaaacacctgtaatataaataaacaggtaataagtaaaaatggacagatacatattcttaatgaactgaagtcactgcctacaactggcttgcacaaactaaaatgtaaggtagaaaccataactattagcgaaactacatttaactttaaaaattataaaaatctctactatgactttcaaataatagcgagaatttcctttctcccttttgcaaagtgtgccttattttaaaatgcaaaaaactgaaaatatatacgaaaaagttatagactaattcaaaacaatgtattaatattttgacaatctctggcacttaaaatgagtcagacgtcccaaaacatctatttcgtaactttatgataatgcagcatcaccataaaagaaccatatgaaacacccccaaaataaagaaacacagcaaaattgacgttaattctggatcaagataattttctgagtttccacacgatgtttttgaatagcaaacgttattcaaacttgcaaatccattaataaatgaagctttgaatctttaaaaatctccattcggtcagaaaaattcgtttatttctatgctgttgctgttttaaactttgtatactgggaaatttctaagggaaaagccatgggttcaattatctttcacccgtcctccaaaaacaccacaagcaaaacctcctccccagcttttctttataaagaactgaaaaagtggttcgactacctttttttcagttatctttgctctgaactctcccctacacacttacctcggaccaaaactggccctggcaagactatttaagctatgtctccaggagactcacaagttgcgtttcgcagtcaggcctgggagcagtaaggacacccccgttttctgacttctcctagcatttcgcacccgctcagttccagtgtgaagaagtgggggcccggaacgctgggcccgaaagggcaaagccagggcctacaccgcagcatggtcaccgaggcggctagcgcggtggggaggcagaagacagagaaccgaacgcctgggaccaggggcatccgtgtaaaccgaagaggcgctcagactcggagggcaaggcccggggcccccttcgctgcctcctttgccctcccttcccccatgctggagaagcagggcccgggcccggtgcgggaacggggaggaggtaaaccagtcctgtcaccgcactgagagaggctgkaaacggcacatgctctacggggagaggccgcgggcgccccggcccggaccccgaaaacaagacacatcaccaccctcagagttccattccctgcgcctcaccaggtcgtagtcctcctcatcatcgcacatgaaatcatcctccatgtcagacatcttggccgggagggggaggagaaattggagacaacctcctcccacaatcctccgcggctcagaggcgtcactctcagcttctttccgccttccagtccctcttagaggagctgtttcctgccggaactaattatctcgacttgtagctgattcgctacgactccaaaagagactgcaccaccccccgtttcctccgaagtggttggtgccttagcaactaaagctggcaactgggamatcgtccggtgctgcaggtctcagccgaagggcgtcggaaactgcgctcgcatcgagcagtttccagcctcctgggtaaaggagcagtctcctcccttgcttgggactctggacgcatctcattccggtgaaagtaagggacagcttaggaccagaagcctttcgcggagaaaaggctgacatgcccgtcctatatgacaggtattatttctgctatcattgtacgtgtgcatttagcccacacattgcggtgggtgttcctaagatacttggagtacttttcagcaacacagtttacacttaatgcttgttatatttgtagttgacaaaacaattctatggatatcctaaattaggtatgcagctatcagttgagttgccttaaatcttactcagttgttcaacgagttgtaaactgacctttacagcccttgggaccaaattaaggtaacaacgactggtttttaaaaaatacattactgtgaacctgagggcatcatgttgtaaggagatgggggctgcggtgactcgcgggatcaggaatttcaagagaaccgagcggaaagggaaatccgcaacatgaagccctctctcgctcccaggcacccctctaccagcagcctcctgccagagcagattagtctctatccagaaattaagggagagattgctcgtaaagatgacaagctgctgtcatttctaaaatatgtgtgtgttgattccaaagatcctgtgtcttccgtgcagctgaaagctgctgaaacacgtcaggagccaaagaaattcagattgccgaaaggccatcactttgatatgataaatattaagagcattcccaaaggcaaaatttccactgtagaagcattgacacttttcaataatcataaactttatccagaaacatgaactgctgagaaaatagcgcaagaatatcatttagaacagaaagatgtgaattcccttcttaaatattttgttacttttgaagtcaaaatcttccctcctgaagacaagaaagcaatacaatcaaaatgaagaaaatcacaaaaatttcctatgtgtactcctcatccctcatcctgtatattttcttatttttgcatattaaattatgttaattaccaagtgtttaatgctctcattgtgagagcatcctcttaatatttattgagctccctgaattttcaagattgccatagactgtattttgttttcttttaatttggtttaggcatatttcatatgtacatgttagcatgactaatcagcacatctgtacctttattataagtaaaagagttaatttgttattttagacacatcataccaacttttaaattggtcatatgaccccttgggaagtgtcctgaatccctcatttaagttttcctatccaatttaggtgtttagttcattcttcatatgtgatagtgaaagtaaaagctttcctgactcttaagactgacattttcttgctagggaaagagactcgatagtaaggtagactaacagtatttcccaaataaaggcacataggagaaaataaagaatcaataaaatctaattaaaattactaccccagggaataagaagtattgaggatttattttattttgaattggttttaagtatggaataattgtctttacagttataaaaagtaattagtggtgtttacgaaatgttgggaatttctgctttgacaaatagttaagtcccatggccttcagagagagaggcagtagtagaaactttcgaaaaagtaacatttctctggatttaacatggaactagaaaaatttaaagaataattaaaaaaccatggtaaatgaaatttggtgattatatatagttttggatgttaatgctagttgagagaagagagaaaaaatagcaagtagaagcagagaacaggatcattggaagggacctgagaaattgctgctttatccattttagcaaacttattagcacggcatgtaccagtactaggatcttgagtaagagtgtgtgagtttagctctgcctaatatattactacttgtgggatctttgggagactatgtcctctttgagattgaatttcttctataaaatgagcataatgctaccttacttaaatttaagggttatcatgaagataagtgaaatagtaaaggactacaaaagaccaagggaataatgaattttttttttgtagtggagaaacgcctggggagaatatatgacctaaggtttctgtagtttatgacctaaccaggcccagaacttagtttttcaaatcctagtagtgtgttttttctgatgtgccaaaaagcagcacacctcagagaagggaataagtgtgaattgtgggtatattggggttatcagtgtgcttctgagggaagataggcatcactacttcccagagatgcccctggaaatgatacagaagatgctaaagaattcaacaagatgacggaatgaggcatttgtagtaatgctgagaacagaaaaatgaactaagtggaaaatttgtaagcatgtctttgaatgtagattggttaggtgaacaaactacctagtttatttttagttcagtacaataattgttttaagaaaacatgaaataactactcaatataaaatgcattttaaaactcctgtaaatcagtcaaaactttattccatttgtcataatggtaactagttgagtcactaatactagtacactcttatttctgagccatctttattcatatctacattgtgtggttaggcagctgttatgtggtatcacatgataaaagatttcttcccataccattaaaaaaatactattacacaaaatcattggcagaattcaaaataaagaaaaaaatgaaataaaggggaaaaactgcttttcaaataggtagcattttccacgtaaacttccagatctgtccaygtgactccacaaatggttatgtagttaagcatatagatttggattatttttgcatctatgtagcagcataggtcaatatttggttgtttatatttagagacaagatcttgctctgtcacccaggctggagtgcagtggcaccatcatagcttactgcagcctcgaactccttggtttaagtgaccttcccatctcagcctcctcagtggctaggacttcaggtacatgccaccattcctgactaatttaaaatattttttttgtagagacaggggtctcaccatgttgcccagactggtcttgcaatcctcccacctcaaccttccaaagcactggtattacaggtgtgaaccacattgcccagtcttaaaatatattcctaataataattattttagtggctgtgtaataatccctcgttgaatgtaccygtgcaccataattcatgccattattgttatacattcagagtattgcagaaataacactattttaagcaattctgcagtgaatatctttgaaattttattctttaaaaaataattccggctggcgcgctggctcacgcctgtaatcccagcactttgggaagccgaggcagacggaccacctgaggtcaggagtttgagaccagcctggccagcatggcaaaaccctgtctctgctaaaaatacaaaaaaaaaattatccaggcatggtggcgggtgcctgtaattccagctggaggctgaggcaggagaatcttttgaaccagggaggcagaggttgcagtgagccgagatcgcaccattgcactccagcctgggcgacagaacaagactctgtctcaaaaaaaaaaaaaawaataaaataaaataaataattccaagaagagaaattacaggcttgattcttttttagtaattacttgaattgacacctttttggtcatagttcttttaagttatatttgtgacaataatgtgttctcacctatacatacaaatgtttttccctaacagtcttcttctcaatattttattatgataaatttcaagcatacataaaattgaaagaatagtatagtggacatgtatatacccattatcagctttgattgtatgtatgtgtgtgttccctgtatcagttgaaaggattcggatatcatgacacatcactcctaaatgcagctgtgtctgtttcctaaaaataagaacattctcctatgtaatcacatcattattacatataagattaataatactggccaggcacggtggctcgtgcttgtaaacccagcactttgggaggctgaggtaggtggatcacctgaggttaggagtttgagaccagcctggccaacatggagaaatcctgtctctactaaaaatacaaaaattatccaggcatggtggcacatgcctgtaatctcagatactcaggaaaccttaggcaggagaattgcttgcatctgggaggtcggggttgcagtgagccaagattgcgccactgtactccagcctgggcgacagagtgagagtttgtctcaaaaaagaaaaaaaaagattaataataattscctatcattcaatatccagtctatattcaaaattaccatattaaatgtataacttagaattggaagagcctttaatgatatcactttacagtataaggcttcccaaatcccacagtagagattctgattcagtagttctgagtggcattcagaaacctatacttgtaactttacaacaaaacaaacctccctgtacctgggatgactatacatcccagttttcctgggactgatctcgtttactactgttgacccatcataatagtaatagtacccaggccgggtgcggtggctcacacctggaatcctagcactttgggaggccgaggtgggtggatcacgaggtcaagagatcgagaccatcctggcgaacatggtgaaaccccgtctctactaaaaatacaaaatacaaaaattagctgggcgtggtggtgtgcgcctgtagtcccagctacctgatgctgaggcaggagaatcgcttgaaccggggaggtggaggcggaggttgcagtgagctgagatcgtgccactgcactctagcctggtgatagagcgagactccatctcaaaaaaaaaaaaaattaatagcacccatcactttcagaagttagacagtaaatcacatggttactctacttttaattgttcaaaagagaaaataggatcccgaggtagttaagaggtttatttgctcagagtaatcaaagtttcatagttttactttgtactcaagatagcagttgcaaaatggataatatgcttaacaaatgcatactgatcacatatatgaaactgcatgttgatttacatttaaatatattgcataatttgctgcttttaaatgtaatgccttattcctacaatgggaaaataagtatgcaaataagctggtaagtaggaagactgggtgaacggcagctaaattttgagtataatttccttggccatgaccaaatttattaagtctagtctggaaatttactaacagcagttgaaaaggtcttcactgtgctgagcatgctgcttgagtacacaggtgctaataagtgctagttggataaataaaaatgttaatagattaatctttctgtatcacacatcaaaatatttttctgtccttaaaaatccatgtaaatgtgaccttattcacatagcctatcctgaatactttataccgttaagatactctcttttattttttcttgacattaattttattcaatggtaaataatagaaaattgtaattttaacagagtgtatttgtgtgacatgctgcccttgttgaaagtggatcctatgtttttaaaacatattttcataaaatggcattattgaggtattattcagtagcttcatttacctcaataaggtaaattaagctgcacatacttaaagtataaaatttatttatttattttattttattttttgagatggagtcttgctttgttgcccagtctagagtgcagtggcatgatctcggctcactacaacctccgcctcctgggttcaagygattctcctgcctcagcctccctagaagctggaattacaggtactcaccaccacgcccagctaatttttgtatttgtagtagtgatgaggtttcgccatgttggccaggctggtctcgaactcctgacctcaggtgatccactcgccttggcctcccaaagtgctgggactacaggcatgagccaccactcccagccttaaagtataaaatttaatgaactttgacatatgtatacacctgtgaaactatcacgacacaagataatgaacatattatcactgcaaaatttcctctcagattccttgcagaaatttctctcctccccccttaacttttcccaggtaactgctgatctactttttgtcactatagattagtttacattttcaggaattttatataaatggaatcatgcaatatgtactctcattttcctggtttctttcacttagtataattatgttgagatttgtccaggttgttgcatgtatcagttggttgtttctttttattgctgaatattcattacatggatatattacaattcatcttacccatttatctgttgatagatattttaagtttttttcagtttgtggctaatataaatgaagctgctaagaacatttgtgcacaagtttttgtgtggacatatgttttgtttctcttgggtaatttatggtagacagactctggtggctacccattatctatttccttgaataattctttgctttttgagcgtgagtgggatctgtgacttgcttctaactaaaatacagcaaaggtgatatacgtgattatatatacatgattacattatacaagattgttaagtcaatcctgataggaaagatgatctcctgtgctggctttgaggaaggcaagtgcccatgttgggaaggacaacacaacagggagctgatggtggcatctggttagcagccagccaaaaaataaaaaatatggtcttagtctgacagcccacaaggaactgaatgctgctaacagccatgtgctcttggaagtgaatccttccccagttgagcctcaaataagcctttgtgagaccttaaaacaggatggaaaattgtgagataataaatgtgtatttatttatactactacatttgtagtaatattgttacgcagaatagatgtgaatgcagttagtaaatatcttgtagtgaaatggttgggtcatatggtaggtatatatttaactttttaagaaactctcaaattgttttcctaagtggttttaccattttgcatatccaacagcagtgcataagagttctagttgctccacatccttgccaacatttagtgtggtcaatctttttaactttagctactctagcaggaatgtagcagtatactattgtagttttaatttgcatttacttaataactaatgttgaacattttttgtgtgcttatttgtcatcyatgtatcttctttggtgaaatgtttttaaatatattttgcctattttttaaactgggttgtttatcttattactgttgagttgtaagagttctttatgctttttgtgttgtattcatctttgtcatacctaagggcrctgagattttcacttatgtttttttctggaagttttatatagttttacctcttmcatttaggtctgcgatccatttcaaatttaattttcgtgtatagtgtgaatgaatgtggaggttcattagtttgcatatggatgtcaaattgttccagcatcatttgttgaaaagatacgctttttcaattgagttgtcttggcacctttgtcaaaaatccaatgacagtttaattgtcagcataatttgatccttttaaaatatatttttcataattgtatgctaccttgtattacaattatttccatttattcattattaaacagaaagctccttgaggacacaactgtctttcttacttctgaattctctgaaatgcagcatatgccttgcttatagaagattctcaatgaaaatgtgatgtgtttaagtaaactttagcattcatgactcttcacaggccttggctgagtcataccaaacaggtttatgatttggcatcctttcagaccaatcatctttaaaatttttttttactatattaatttggggagactgaacactgtgtgttagaagagcagaaaaagaggactccttttgtattagtaaagttctggaaagaaaactcgtggcatactcagggaagttaactgaaaatttaattaagggactatttatagagatggaggcagggttaagggaatcaacaactacttatactaagccttcagaatgctccagactgcaattatatctttcatctctatagttgacataggaggaatatgctaatacagtatgattaagcattgaaggggttcagaatatgccaccccaaaatatgctactttggcctaagtattattttgagccgaagccaattgacaaccagtagatgcagttatgtcagtcactggagagcrttagcaaatgtattccaaaaaaaaaaaaattgcttaagataataaccacaatcagctcctcattgaggtgggcaacattggatggttatgacaaggtgaggaaagaattgtctagtttgaagattcttggtactatatttagtttytaggtgaagaaataaaaaggaaggctgggcatggtggctcatacctgtaatcgcagcactttgggaggccaaggcaggtggatcacctgaggtcaggagttcaagatcagcctggccaacatggtaaaaccccatctctactaatcatacaaaaattagccgagcgtggtggcgcatgcctgtaatcccagatgctccggaggctgaggcaggagaatcgcttgaacccagcaggcggaggttgcagtgagccgagatcatgccattgcactcagcctggatgacaaaagcaaaactccgtctcaaaaaaaaaaaaaaaaaaaaaaaaaagaaataaaaaggaaaaaacaaaatatagttttaaattggggcaatttatctgtagtttggtcaggctaatgtacactgtaagcttgaaatgcaaatttctaatttcagagtctaaatatttgtttctcagatttcattttgatgatggaatgtatactagatgcagagtttgcatcaatttttgtaatatattcatttatttacttaactaattttaatttgccataatagcaggagctttttgtttatgtttattgttgtatccccagtgcctagaatagtgcttagaacatagtagcacagagaaacatttgttaaatgaatgaatgaatgatagaataatggatgaaacatggaatatgaattttagtggaggtgacaggtaataagtataaaaatcaataaataatgtaatttcagatggccttaaagacagcaaaccagatttaggtgatagagaataactggagagaatgttgggatggtttttaaaatcttcataataaccctatgaagtaggtatttttatctcccttttttagaagaggaatttcagacttgcctagggtcacaaagtagtggaaccacgctaatctgrtttcattaatttattccttcattaaacattccttgagtgcctgctcaacactgagccagagtctataaaatcagagtaaaacagtctttgccttcagggagcttataatctagctctgtgctgtctaatatagcagccacttgtttctcatcataattgagatatgctgtaattgagatatgctggattttggagacttatttaaaaaagtaaaatgycaataatttaaaatattatatttaaaatgatattttggtgtattagataaaatatattattaaatttaacatttctttttattgttttgaaagtggcttctagaaaatttaaaatggcatgtttgacttgcattgtagattctgattcagtaggtctgggcccaagataatgtatttctttttttttttttttttattgagacggagtcttgctctgtcacccaggctggagtgcagtggtgccatctccgctcactgcaagctccgcctcccaggttcacgccattctcctgccttagcctcccgagtagctgggactacaggcgcccaccaccacgcccagctaattttttgtatttttagtagagatggggtttcactgtgttagccaggatggtctcgatctcccgaccttgtgatctgcccgcctcggcctcccaaagtgctggaattacacygcgccyggcccaagataatgtatttctaaaaactttcaagtgacgctgatgctgctgttctgaggaccacactttgagtagaaaaacttagactagacagaaaacaagtaattagagtactgatgtgatgctttgtatgactgggcaagcagagggtgcttagagtcttcgttttgttttgctttgtttttcactctgcaaaacaatctatgttcggttaaagcatttttgcacaatttttatttcctccataactacataaatatagatttctctgattcatgagtttatcttttgccatttaatgattatatacactagagagcagtatctattttatgaacagaagaataaggggccgggtgcagtagctcacgcctgtaatctcagcactttgggaggccgaggcaggtggatggcctcagttcaggagtttgagaccagcctggccaacatgttgaaaccccatctctactaaaaatacaaaaattaagtggcaggcacctgtaatcccagctactcgggaggctgaggcaggagaatcacttgaacccggaaggcggaggttgcagtgagccgagatcgcgccattgcactccagcctgggcaacaagagcgagacttggtctcaacaacaacaacaaaaaagaaggaatgtaacatcattataaagaagacataaacaagtattacatattatttactataatgagaaaatatccaaaataggtcactgaagtagattctcccaattgtgaacaatagtttttattgtaagtcaaaataggaaatattttccagaggttgcacaaacagattaaaccacagaaataacattatttcagataaatggtcaatccctctgtggtcttagacatttagttttgggtagagaacatggaaaacttcctgaaggaagtgatttctaagctgagaaacatcaataggcactagccaggtctgtaagtctctaacacccatgctttaactcatattttggatcaagtttttgtattctttcattttagtgtttgttttgtttttgtttagtttgctataatattttatctgaatggagactaatatcctttgaggagaaacaatttcaagtttattaattaggtttctgtttaagactccatcataatataccatttattagtttataattcagattctaaacctattgtaagagtgcctacttgcaaaaagcaaagaaccagaggttcaggatttgtgaaaataaaaatactgtaaaatataaatgtttaaatattttcttttctttttttttgagatggagtttcgctcttggttgcccaggctggagtgcagtggcgtgattttggcttactcaatctccatctcctgggttcaagcgattctcccgcctcagcctcccaagctgctgggattacaggcgcccgccaccacacctggctatatttttgtagttttagtagagatggggtttcaccatgttggccaggccgttctcgaactcctgacctcaggtgatctgcccaccttggcctcccaaagtgctgggattataggcatgagccactgcgcccagccaaatgtttaaatgttttcactattagatatgtctaataagaactaaaggaatatcttcttgaaattgaaaaggaaataatatttttctatcccataaggattgttggaaaggtttaaagagacaataatatacgcaaagtgcttacttagcaagatgcctagtataaggaaggtagtataagaaagtaatgttttgtttttggtgtccatttggggttctctagtagtttggacaggttattttaagagtaatcctttatgaaaattataatgtacacattttattttgggacaaggattctaatcatttcaataatttatttttaagcacagtttactggggtctcaacaaaagtcacatattcagaagtagtatggcctctaggctaggagtctagagacctaggttttagttctagctctgttaatcctgttttactttgtgccaatcatttcaaaaaaggatgctttactaattgctctgtaaggtgctttctagtctgcatcggttttgttgagactgcaatagcaatgtatccaaggtccaaactaatgatttgccatctggtttcatttagcaaagttaatgttcggtcatcaagtacatrttcagtaggaagtattctttttcgaaacagtttctacagtcatttttttttaaccctgtataaaatgagtttattttggactgttaaaaaaattcaaaactttaaaatttgttatttttcaactaatgcaaaagaatatattagaaacatctgaataaaaaatgattctgggctgggcacggtggctcacacctttaatcccagaattttggaaggccgaggtgggctgatcacctgaggtcaggagctcgagaccagcctgcccagcatggtgaaaccccgtctttactaaaaatacaaaaattagctggtgtggtggcggctgcctgtattcccagctacttgggaggctgagacgggagaatcgtttgaacctgggaggtggaggttgtagtgaacagagatcatgccattgcactccagcctgggcaacaaagagcgaaactccatctaaaaaaaaaaaaaaagattctgttcttttctgtatttactgatgtccctaaacattttacattttttttaaaatttaggttatctccctattaaaactatttacaagtgacagtgatgactcctgttactcaaaattaaaccaaaatgaacatcaaactgggatttattggggcccagaaacaagaagatataattcattcatttgaaaatgataaagagggactgaaataatagtgagaaagctgccctgagaccagagtaactttgtttctttgatgtatcatttacagtaataacccaacggggtgccaaggggctgccactctttggytatgctttattgtccattcacactttgtctccatgtttccttcccccttcctcctgtatacatgtatacagaagggggaaggaaacatggagacaaagtatgcatatacatatagaaattctggagcagtaacttactgatgtatacaacttatcgaatctctctgagttatgctactacccctagtgtgttgggcatgttggctcaaacttccttaatcaggaaactttggaatgggtttattgctagctgtctttgcttgggtttaatctcaatatttctgaggtgcaaagtgcactagattgagagttaatagatctgaattttaattccagttttgttcccaatgatcactgtgacctcaggcacatcatttcacctttcgtcgttcattcagtttatcttacctattcattaaaaaccaatctgcctgcccccagttgctttctagtggtagtgatgatggaggtggtgagagacacaataaatacataagcaaataggagaactatgaaggaaggaaaagttagtgatgtactagggatagtgtacttttgatagggcatctaggatttctctagataagtgaaaaatgaagaggtttaactggatgctaaggggtcttgcacattaaaaggcatgtgtttccgtcttttcactactgtgttctaggaaggcccaccaatgcctctaacctgtaaataaatgcaaatctatttaaatcaagtgatacatcaattttatgttgcttgatttggaagtaatccgcaaagaagcaatagctaaacattttagtgttgtttggggagtagctgctgaacaataaagaccaaaaccataactraaaaacaaacaaacaaacaaaaaaacgcagcccgagacagatcagaaactaggtgtatgtagggcgccaggttatgacactgttctctgacatccacagggcgcaaaaagaaaacctcactagtcagcttcgcacgtgctctgcgcaggggctcctgcgaggccctagtccctccctgggagctaagagcaggacggaggctgtacctgactgctgcttggagggaaccctggctgagtccagggaggaggagccagaggaggggccgattggaagcagccacctcagcgaagctgcaggatttccgcagggcgggagctgtttatctcccggaagaaaacggctcctgtcacagaagtctcgtgattgctctgggagctttgcttagacacttgaaactacaggagaaagaaggatctagcgaaatatggctacagagagccctgctacgcgtcgggtccaggtggcagaacatcctaggtgggggagaggagacgccgggctttgggatctgctgggttggctacgtgtagatcgggtccacagcacttggctcctcccttggggcgctgcttttggtcccggggagcaagtggaacccttgggattctataaggacacgtggctgggcttgcaaaaaagatcacgccgcaaacacattctaccttgactactacgaagggttgtatgtttttttcttcatccatgcagattcttcttttccttttcttgttgtaattagtgtactctttctactgggcttcagcagaaatgcccatatccacactgaactcctctctttgtctcgcatgccagttgatactgctttttaaaagtcttctttctaaatattaattgaaaacaaacacaaaaaccttcttggtgtctgcatcctctttaaaacaaaacaaaacaaaaacacgagaatctctgaactgtcacttagggaattaatttgctggcagtccctagctacacagtaactaatagtttagtgatgtctcggggaggatcttttcagttacaggtactttgtagaaatacttcgttctgactaatggggctgaggtctcataaaatgaagtctgtcacctgctacattagcgaagggctttcctgactstctgcttttgctgtttttcttttcttttctttcttccttcctttcttttttctttttctttttctttttttttttttttttgagacggagttttgctcttgttgcccaggctggagtgcagtggcgccatcttggctcaccgcaacctccgcctcccaggttcaagcgattctcctgtctcagcctcctgagtaggtgggattacaggcaggcgtcaccacacccggctaattttgtattttcatcagagatggggtttctctatgttggtcaggctggtctcgagctcctgagctcaagtgatccgctcaccctggcctcccaaagtgctgggattacagacgtgagccatcgcgcccggccctctgcctttgctgttttcagtttttttctgttagtttttttctctggcatcaagtccttaagctcttcctacttggtggtttattaccaccgtgtgtcagttgatgatattatactttactacaacttgaaaatgttctttcatccttaaaccagcaaacagtgtgtctttagttaccagaaagaagcatgatttcttattatagagtccagcacagctttggactacttctcaatgtctttgaatgttttaatatactctagaggttcttgtatagcactgttgcccttatatatttgaattaattaagacacactgttaaaggcatgcttccaataagattaatgagaaatttgttacatgaaaataacttgatctcttgtagtttagtcttattttttttttttgagacagagtcttgttctgttgcccaggctggagtatagtggcgcagtctccgctcactgcaacctccacctcccaggttcaatccattctcctgccttagcctccagagtagctgggattacaagtgcccgccaccacgccccgttatttttttgtgtttttggtagagacggagtttcgccatgttggccaggctggtctccaacttgtgacctcaagtgatccgcccgtctcagcctcccaaattgctgggattacaggcgtgagccaccgtgccacgtctatagtttaatcttctacataaaacatayccatgtgtaaattcctaatgtgtttccattttatgtgattgtaataataaagatcaacatttctatctatatttaccctgtttgggggaggatggtggtaacaagtataggtacatgtactaaaagtgaagaattgtttactgaatttccttagtgttcttcttgcttttcatgatttttatattattcatgtaacaaatatttattgttaatatttattctgtgttatccacagaagagatcatagtagataagctctgccrttttcttgtttttcatttgtgcacaaaatgcaattattagcttcaagcaatgttttatttgcaggaatgttttgcagccacttactcattctaggagggatgtattttattaaatctaaatagtataatctataaattcacctaaccggtcaagtattgcaatatgctgagaaggaaaaaaaatgaatgaatggtcagcctgctttcttgtggaactcttattctttttccaggatgcctcttcaacctcacaaggcacatgatcctttgagtaaaggcactrgtcaaccatatcatacattttagtaaaacttaattttatttttattatttttatgtaaaaatcaaatagaaattgaagttctaatattttctttctgtgtcccactcttgcatggtaccggtaccgtaagactctgaatttcactgttctggctttctttgcattcttagcagttgtatctcttatctttactttctcttttggattaagttttaaaacttgttggattattgctatttttgtagcagttttattgacattcacgtatcatataactaattcatttaaagtttgcaattaaatgggtttaatgtattcatagagctatgcaaccatcaccataatcaaatttagaacgttttcttagaaagaacccagccatcccttagattatcacaccccagaactccattccctttcccctcacctagccttaaacaactactgctctgttttctgtatttatagatttagtcactttgggcatttcaaatgaatggaatcatataaaatgtgtstttttttggtgactggcttcttccatgtggcataatgttctgaaggttcatgtatcagtacatcatttaacatgtatcagtatatcattcctttttatggttaaataatattctagcttatggatatacattttgtttatacattcaacaattgatggacatttgggttgcttctatcttttggctcttatgaataatgctgctgtatgaacacattcytgagtctctattctaccagttgagctagcagggtgacactgaatacatttttaatattaaaaatttggattatttaaaagtatattcagtaaagcctgaaaatcccacagtttctttcctgattgtctctgatttctacccttggctgccaatttctacttctcttcttagaagttattcatttggtttgtatccttgtaatattattgtgtccttatatcattgttactatattttataaaaatgatatattcacataagtccaataattatatttgtttttttttacttactttttttcacttaatctttctcagatatctggtatatcagttcatacagatatatttcactatttttacttatttcattttattttttgagacagagtctcgctctgttggctggagtgcagtggcactatcttggctcactgcagcctccgctcttgggttcaagagattctccttgtctcagccttccaagtagttgggatcacaggaatgtgccaccatgtctggctaatttttgtatttttagtagagacaggatttcaccatattggccaggctggtcttgaactcctgacctcaagtgatccacccgccttggtctccctgggattacaggctgagccgctgtgccccggactatttcactgtttttaagggctgagagtattttgtagtatgaataccattatttaaccactcaacatttagtacacttagatttctaatttttctctcttgtaaacaatgctgcaacaaacatccttgtgtacatatacatatgtacatatatgtatatatattctctgagcattcttgtgaattttttaaagctcatttatgaaaatggaagcagagccaaaggtaataaacatttaaaatgttgatagctcctgtcaaatggccctgcaaaaaagatgttattggattgcctatttcttgcttttttgtttgtttgttttgtttttaagagacagtctcactctgttgcccaggctggagtgcagtgtcatgaactcggctcaccacaaccaccacttgccgggttcaagcagttttcctgcctcagcctcccaagtagctgggactacaggtgctcaccaccacgccaggctaatttttgtatttttagtagagacagggtttcactmtgttggccgggctggtttcgaactcctgacctcgtgatctgcctgccttggtctcccaaagtgctgggattacaggcatgagccacagcacttggcctatttcttgttatttttagaaactctttttatatgtgtgtatttttgtatttgtatgtatttttaatagaaaccatttattctatatatattataaatatagtttctagtttaactttatgacatcttatgtagacattttataatttatgcattgtagtatgttgaataataatgatgatagcatctttgtcttcacccttattttaatatgtcatccaaatgaccaccagaatggtgagatagtagaaagaagagctttattggcactatcagtttgtagaccagaagagagagtctgcagtgtggactgaaggtgttctaacttcgagtagggaagaggaagtttgggttttaggccccacagagtctgtcttatacaatagagtcatacatattcagtaggttttggggaaaagctatacatatttatgaggggagccaagcacatgcgcagtgggtaaacatatatgtaacatacatcccatgttcccttcgtggcaggttttagcattaaaatgaggtggaatttggctcacataacaaggtgagctataggacacaaagacagttagtgcacagcctttataggctggctgaaactagcttaaggtctgcagttgtttatcagaaaagaatgtttgtaaggctggtcctctgtccaatcagagttgtagtggcctggatcataagtcagagttaggaggtgtccaatagctgctattgctagggggtttagcaagagagtggttttacttgtagccatgagaatttaggaagttgttacacctcgacctgtaacttttgttaccttaactttagagtcccccttacctgataaagggacatctacttaagtttctcagatcacaaatgggaatgcttctaatattttgccatcaaatatgatgtttgctgtttctggtaaacatcctttattaaattaaggacatgcccttttctagtaggtgagaaaagaaaaatagctctgagccatctgaggtatgttaagggaggcgaccacctctcatattgtcttatgcccaatttctgcctccaaaaaaagaagtaaaaactaaaaggcagaaatgaaatccacaagcagacagcccagtgccacaccctgggcctggtagttaaagatcaacccctgaccttatcagttacttgcataaaaaagcactgtgaagatccctgtcctgttctgttcccttctaattaccagtgtatgcatcccccagtcaagtrccccctgcttgctcaatcgatcatgaccctctcatgtggacccccttagagttgtgatcccttaaaagggacaggaattgctcactcggggagctcggctcttgagacaggagtcttgctgatgctcccggctgaataaaccccttccttctttaacttggtgtctgaggggttttgtctgtggcttgtcctgctacaatgtgagatatgcaaagatttatcaggcccagagagacatgaatatggcactttagtcacatccctcgccctccttgcacccatgtgccagggggcaatcatttaaagaccttttgttcctgacttcccctgttcctgcttcccctgttatcttgatgttcctgtaatctgtgatacaaagtacagccaatcaataggttatgctattttaatgtaaattcttggtaaacaagttaggaaccaccccatttttttcctttaaaaaccactagtaactactgctaatcagagggtatattcatgttaacttgaatctatgttcctgggttgcaatcttcaaacttggcccaaataaactctgtattaagtttgcctcactttttttgtctttagatcaacgcatgacagagatttaaaaaattttatattttatttttaaaaataaggaatggctatgaaaatacatttgtttcttatttggattttttgagaggatcatgaagtcatagaattttcytctttttattctgttagcatagttcatttaatcaacagatttctggtgctgattaccttcatattcctggaatgaactctgcttggtcacataggttattttaggtaattactgcattaaatttaccgacattttatttagggtttttctatctatttccacaagtgagattagcctatagtttgcttttgagggccattcttgtcaaatgtaagcatctgggttagaccagcctcctaaaatgagatgggaaactttccacagcttctattatttagaaccatttataaaaagaaaataccactttttccttgaaggtccaaccaacttgttgtaacactttttgggctttgtttctgacaacttttctatttctttatttttaaactcttgtgtcaattttagaaatttgtattttttctagaaaaatcagccatttaaaaatttttaaatctttttaaaatttatgtttgtctattatttctagtattgattatgtttaatgacactcaaagttctttttctatatatttttttaaattgaagaaccaccttgtaatttttttatccaatctgctattttcccctggttcaataaattttgcttttatctgttaatttgcttcttctaatttatttaactactttttgctaggttcctatgttatatgcatactttatttattttcattatttattttctttttttcttttaaataatttatgttaaacctattgtatcacacagtatgttttaaacactgccagataactccctaatcagataaagcaaagacaaaaaagtttatcttactagaaacaagagacatcatcacttatagttttcaaacattattgcactttaactgtcataatttgacaaagaattcatgaaataatctacagactagttttaacagacaaataatacttgtaagcagacatgactgtcctaaattgttttttaggtatcaactttacaaacattacttacattagtggtaacggtggagttggagagtattgtgccttttccaagatgcacagtgagaatcaccaggagtgtggtggaacttatgaccctaccaaggccacggatctttcggcctgcagatgtcagcccatgcatcaccctttgcttgtggactggtttggtgatccactgggtggcaggattttttctgacagcattatggagtggatgaatgaggataacttcaaacattttgtatgttgaatcttcaccgaagtgagaactcaggactcttagccgggcatggtggctcacacctgtaatcccagcactttgggaggccaagttgggtggatcacttgaggccaggagttcgagaccagcctggccaacatggtgaaaccgcgtttctactaaacaaaaattacaaaattacaaaaattagctgggtgtggtggcgcacacctataatcccagctacttgggaggctgaggcatgagaattagttgaacccaggaggcagaggttgcagtgagtgagattgtgccactgcactccagcctgggtgacagagcaagactctgtttcaaaaaaaaagaaatactatatatatatatatatatatatatatatatatatatagaaataaaatgtataaatatgtctatatgtataaataaaaatatatgtacatgtatatcatatatacatgtacatatatgtatgcacatatatgtatgtacatatatacatgatgtacatgtatatcatgtatacatgtatatatatgtacatatatatatatatatgtgaattcaggactcttagaaccccacagtggcgtccagctttctcgtcttcaatggacttcaagcatactttagctggttaacaccacagtggacaggcttgccataagctgcacccttaggaactgggcattttcggccaccatggtgcacacgaatcctatatataacgtaaacttgcttggccttgtagccctgtcggtgcacttttttgggctgggtgggatgtggagccctgtggtagagcagagagctgtcagtactgctagcagggactctcygaagaaagtgcatggtatcagactgctgcttcctccacagctcctgaatgtacttgtatgcagttatcttggcttacctgatggctgttgccagacggaaaggaaagagcctttctcccccattatttattttcttatatgaatagaaggctagaaaattttctgagtgctattacggttgtgcctcatgggttttgatatgtagacctctcattattattttcaaaatagctatagctgtggccttaatttccactttccttcagcttcttgctcattaatttgctctttaactcttttcattcttctattcaacctatctactatttttattttcaccatcataacctcgttttctaagatctctaatataattttaattttgtttttatgtttaatttttgatcttggagaaatttattgtgatgaaaggaacaaaacagagattcaaattcaccctcctttcccaatggtaattaccaatctttgaaattccatctctaacatatattaaattctcaaatataacagtaataatagtaataactaataattattttatacttataaaaccctcaaacaaacctttgcagtgagttctagtattagcctcagtttgtagatgaggaaaattgaggcatggagcaactcatacaaattaacataaaaattcatgttataaccaattgttcttaaattagtattaaaaattaacattttctataatgccatgactcgatatcctgatattgaagagaaaacaagcacagacaggatgggggacttgcccaaggtcacagtggaagactgaaaatacatgtcatagctcctgaaattttaattcattcatttctgcagttagccacacggtctgagagaatcagtccttttattaaagtccatttcattcacaacagtcatagctttgtttctcaagttctgttactaatactgctgttcttttttctttgtttctttcttttttttttttttttttaagattttaagtcaaaagagcattcagagcaccagagtcagcaatttgtgctgcaatactttggccaattccccatttaacagtatgatctttgtaggagctcttattttcatattgaaatgctcattgtattttttggggggcatactttcagtgactgcattaagacacaaggtcttgttggtagctcacctagaggtaaaatacagctacttcccccaattacagccctaccattcattattagagggttaggtatgaagtttagaaaaacactgtacacttcagttctttctgttcttagagaaaaatgccttccttgtttccttttatagcctccatgcatttgaatttctaaggtaggaatgttgtatagtaagcctcttggtactgaagcagttataagccatgaacagactgccttcccaaggaagtctaggaaaatgacaaagttttataattcaaaataatttcattaagacacattttaggagacttattctaactctgctgttagcacttcatgttatttgtgtttgcagtccttataaaaacaaattaataaggattcaagttcaggaaaacttgaatttcatctgtatatgattttcacaggcagaaacattaacccctattaaggctagcaggattatctaaaccagcaaagtgggagttgtacttattgctctttttcccacatttaattgtaccaattcctttggatttgacatttcaaatatcaccttaatttcacccttctctacctatagctttgaagtactttcagcatttctctctagatatattacaatgaactgctattagatctctttatttctrcaatccgaattccacacactacccagtgagctttttcaaatgcaaaattgatgatttacttcatttttaaacatctgttcacatccattgcctgtatgttaaaagccaggtttctcaatatggcataaggccctttaagatctgagacttgatatcctccaacctcctcccctccttttctcttctgatgtttttagatacctaattgtagttttctgaatgctgtatgcttgggccttttcatgtcaattgcctagaatgcttcaccctaccccacctgtctgacatcatcctttaaaatttatttcaaacattacctctttggggatcctttaatgtaccttccctctttttgatttatcttacggctcatatcatattctgtcatagcagggactaaatgatgtttctctgtgctcccaaaggactgtatttggccgacttatcactctgtattgtccccctgtattgtgaattttggcttacctattttcctcttttgctagaccaatccttccttccttccttccttccttccttccctccctccctccctttccttccttttctttccttcctcttccctcccccctcccctcatctcctcttctttcttttgagacagggtctcactctgttgcccagaatgaagtgcagtggcacaattatggctcactgcagctttgactttctggtgattctcccacttcagcctcctgagtagctaggactacaggcatgcatgtgccatggtgcccagctaattttttgtattttttgtagagatggggttttgccttgttgcccaggctggtctggaattcctgagcttaagtgatctgccttggcctcccaaagtgctgggattacatacatgagccactgcacctggccaacttttaaatttcttaaggccaaggattcttattcatctcctttcaaagagtacttagtaaagcatcagtaaatgtttcttttttaaaaaaaagacttttttttttttttttttttggaacagagtctcactctgttgcccaggctggagtgcagtggtgccgtggcacgatctcggctcactgcagcctccacctcctgggttcaagcgattcttgtgcctcagcctcccgagtagctgggattacaggagcccgccaccatgcctggctaatttttgtatttaaaaaaaatagttttttattttgaaatatttttagacttatagaaaaatcaaataataattgaaaaaagtactgtatattcctctcccaaattccccaaacttaacattttaccacatttgctttatcattctctatctctgttttaattttttttaatttttattttttatgggtacataatatagatgtatatatttatggggtacatgagatrttttgatacaggcatacaatgtataataatcccatcagggtaaatagggtatgcatcacctcaagcatttatcatttctttgtgttataaactttccaatgataatcttttagttattataaaatgtaaaataaatttttgttgactataataactgttatgctgtcaaatactagatcttattcattctatctaacttcatttttgtacctattaaccatccccactccctcatctctgctacccttcgcaacctctggtaaccatcattctactctctttctccatgagttcaattgttttaatttttagctcctgcagatgagtgagaacgtatgaagtttgtatttctgtgcatgacttgtttcacttaacataatgtcccccagatccatccatgttgctgcaaatgacaggatctcattcttttttacggctgagtagtactccattgtgtgtatatgccacatttctttattcatttatctgttgctggacacttaggttgcctccaaatcttggctattgtaaatggtactgcaataaacatggagtgcaggtgtcttttcaatacaccgatttccttttggatatatgcctagcagtgggattcctggatcataaggtagttctatttttaattttttgaagaacctctcaactgttctcggtagtggttgtactaatttacatttccaccaacagtgtatgagggttctcttttctccacatccttaccagcatttgctattatcttttttttggataaaagccattgtagcttgggtgagatgttatcttattgcagttttaatttgcatttctctgactatcagtgatgttaatcactttttcatatacctgtttgccatttttatgtcttttgaaaaatgtttattcagatcttttgcccatttttgaattgaattattacattttttcctattacattgtttaagctcattacattttctggtttttaatcccagtcagatagtttgcaaatattttttctcattctgtaggttgtctcttcactgcattgatttttttcctttgctgtgcagaagctttttaacttgatgtgatctgatttgtccatttttgctttggtagcctttacttttaggacattagacaaaaaaaatctttgctcaaaccaatgtcctggatgtttccccaatgttttttgtttatcttttcaaaatactaacttttccttttgtttatcttctgtattttttgctttaatttcatttatttctgctctcatctttattatttcttttcttatactaatttcgggtttggctttctcttgtctttccatgtttagatgcatcattaggtcatttatttggtgtttttctacttttttgacgtgggcatttatttctataaacttttctcttagcattccatcactgtaacccaaaggttttgctgtgttgtgtttccatttttatttgtctcaagaaatttttaaattttcttcttaacttattcattgacctactggtcattcaggaacatattgtttaattgtgtttgtatagtttctaaagttcctcttattgatttctagttttattccattgttttcagaaaagatacatgatatgatttcatttttttgaatttttaaagactagttttggctgggcgtggtggctcacgcctgtaatcccagcactttgggaggccaaggcgggcggatcacttgaggtcgggagtttgagaccagcctgaccaacgtggagaaaccctgactttactaaaaatacaaaattagccaggcgtggtggcacatgcctgtaatcccagctacttgggaggctgaggcaggagaatggcttgaacccgggaggcagaggttgtggtgagccaagatcacrccattgcactccagcctgggcaacaagaatgaaactttgtctcagaaaaaaaaaaaaaaaaaaggactagttttgtggcctaacatatggtctgtttttgagaatgaaccatgtgctgaggagaggaatgtgtattctgccaccgttggatgaaatgttctgtaaataactattattaggtccatttgttatagtgcagattacgtctcatgtttctttgttgattttctgtctggatgatctgtccaatgctgaaagtggagtgttgaagtctccagctattattgttttggggcctatctctctttttagctctgataatatttgttttatatatttggatgctccagtataaggtgcatatatatttacaattgttacattctcttgctgaattgaccccttttatcattatataatgaccttctttttctcttcttatagttttttttttggaaatctattttgtgtgatataagtatagctacacctgctcttttttggtttccattggcatggaatatcttttttcatctgttttctttttcagtctatgtgtgtctttagaggtgaagtttgttgcttgtaggcaacagatcattggattttgttttgtttttaatccattcagccattctatgtcctttgactggagagctgagtccatttacgttcaatgttattgttgataagtaaggacttttctgccattttattatggtgttcttgttgttttgtagtcttctcttccttccttcctgtcttgctgtttgtgaaggtgattttctctggtttctaatttctagctttttattttttgtgtatctgttttgtgttttttatttgaggttaccatgaggcttgcaaataacatcttatcacccattgttttaaactgatattaacaccaattacaaaaagaaacaaacgagaaaagagaaaactaataacacttcaacttcatctaccttcttttttaagtttttgttgtttttattcatatcttattgtctatgtcttgagaagttattgtagttattattttagatgggttcatgttttagtctttctactcaagatataagtagtatacatgccacaattatagtgttacaatgttctgtgtttgtgtccttcttattaccagtgaattttctatcttcagatgatttcttttttaaaaaaattaacttctactgttgatatgtgggtacatgtgcacctttgttatatgggaatattgtgtgatgctggggtttggggcctgtatcctgtcattcaggtaataagcatagtacctgatagtttttcaacccataccccactcctcctttcctctctctagtagtctggagtgtcttttgtttccatgtttatgttcatgtgtgctcaatgtttagctcttactcataagtaagaacatgtgatattttgttttctgtttatgtgtttatttgcttaggataatggctttccactgcaaccattttactgcaaagaatatggtattactcttttttatggctgtgtagtattacagggtgtttatgtgccacattttctttatccagtctaccattgataggcacctgggtttgattccatgtctttcttattgtgaatagcacagcaatgaacatatgagtacatttgtctttttggtagaatgatttattttcctttggatgtatacccagtaatgggattgttgggtcaaatggtaggtctgttttaagttctttgaagaaactccagacactggctaatttacattyccatcaacagtgtataaatgtcccctttttctctgcagcctcatcagcatctgttagtttttgacacattttggtaacagccattctgactagtgtaaggtgggtatctcattgtggttttggttttgatttgcatttcttcagatgatttcttattgcttattaacaaccttttctctcagtttgaagtttcttcagcgtttcttgtaggatatgtctgctgtcagtgatagcagtttttgtctgtctcagaaaatctttgtttctttttcatgtttgaaggatatttttgctggatatactattctagggtaaacatttttttctttcagcactttaagtatgtcttgccattctctcctagcctgtaaggtttccactgagaagtgtgctgacagttgtaatggagctcctttatatgttactggtttctcttctcttcctgcttttaggatcctttctttatccttgacctttgggagtttgattattaaatgtcttgaggtagtcttatttgtgttaaatctgcttggtgttccataaccttcttgtacttgaatattgatatatttctctaggtttataaagttctcttttattatccctttgaataaacgtcctatcccagtctctctcactctctatgctttttcaggccaataaatcttagacttgccctttacaggctattttctgtaacttgtcggcatgctatattcttttttattcttttttcttttgtgtcctctcactgtgtattttcaaataccctgtcttcaagctcactaattctttcttctacttgatcaattctgctattgagtgactctgatgcattcttcagtatttcaattgagtgtttcactctagaatttctgtttgattcttttaaattattttaatgtatttgttaaatttatctgataagattctgaattttttctctgtattgtcctgaatttttttcttttttttttttttttgagatggagtctcactctgtcgtcaggctggagtgcagtggtgcaatctcagctcactgcaacctccgcctcccgggttcaaatgattctcctgcctcaacctccgagtagctgggactacaggtgtgcactaccacacccagctaatttttgtatttttagtagagacagggtttcaccatgttggccaggatggtctcaatctcttgacctcatgatccgcccaccttggcctcccaaagtgctgggattacaggtgtgagccactgcrcctggtctgttatcctgaattttgttgagcttcctcaaaacagttattttgaattctctgtataaaaggtcacttgtccctgccactctgggaatggccactggtgcctcatttagttgatttggtgatgtcatattttccttgatggtcttgatgcttgtggatgttcactgatgtctggacattgaagactcaagtattatggtagtctttgcagtctggatttatttgtatccttttggggcaggctttctaggtatttgaagggaattgagtattacgatctaagtctttggtcactgcagctatatctttattagggggtaccccacacccagtaacactgtgtctcttgccttcttgtagaggtactgccttggtggtgttgggtaagatctgggagaattccctggattaccaggcagagtctttaaatctttaccatcatttttccccaaagagaatttctttctccatactgattttcctggagttaggggatgggagacacaagtagacttgtggccactgtcagtgggactgcactgggtcagacccaaagttcacacagcactgggtcttgcctgaggcctgcagaaaccatgtcatggttaccactgatgctccctcaaggcccaagcaggtggcaaacccagccagacttgtggctttctctttagggtgatgagctccccctaagcccaggattggtccagaaatgctgtctaggagtcagggcatagagtaaggaaccttaggaatctacttggtgctctattccactgtggctgagctggcacccaagctgcaagagaaagtctttcccactcttccctcctcttttcttaagcagaagtatttccctgtagccacctcccccagcctgtagtgagtaatgcctggttattgctgatgtttactgcctggctcccactgtttacccaagggctcttctgtcagcttgtagtacatgctcctgggcctgggatgctcccttcagggtagtgagctcctctctggtccagcatgagtccaaaaatgccatccaggagccaagtcctagaattgtggaccccaggagtccttgggtggtctgcatcacagtaaccaggctggtacccatgcttcaggacaaagttcccgttaatcttccttctttcctcaagcagaacgagtctctttccatggccaacacactgggaatgcacagggtcacccaaggcctatgacaagtactgcctggcaaccactgatggttattcaaggtctgacagctctttagtcagcaggtgatgaattctcccaggactagttctttctcttcaaggcagtagattcccctctggtccaggatgtgtagaaatgttgtcagggtttacagccttataaaggcttagagtgcctttcagatttgtttaggaacctgttgtgctttagcccatggtggttgggctagccagaacttactttcaggctgctgggatgggcaatttccctctagctagggctggtctaaatgctgcttccatgggcactggctgatttctgcactgtgttactttctactgttacaagacagcactgaattccaaagcaaagccccataatcactgtactcctccatgtgcacagcttctctctccatgctacatggccaccaccattgctgggggttaagagagtggtggtgtcaatgattcaagactatctttccaaccgtcttcagtatctctttccttgacatgattttaaaaccagatgttgtgattactcacctgattttgggttcttaagaaggtgctttcttctgtggatagatagttgttcaacttggtatttctgcaggaggatgatccctagagggttctatttggttatcttgctcctatccccttataatttttttcctgaacagtttgagattaagttgaggacctgattcctggtagaagacaaaatctcaactaatttaattaaatgctgtaatcagcttttattattattttcaattcctgaattgggcagcatgtaaaaatagagaggtgctaggctaggcatggcagaacagttggttttcacaaaatagcttgaagaagcacaaggaaacagcataataaaaagcagattattatgttaacatcaggttacttaaggttctttttcttgtaagggttaaaacagaggggacttccttaccatgcaggctaaaactggcctgtttaggaatttggctaccatgtatcccctgcttttttatagatcagataaataatttagttttggtttggtgatgtggaactttagcatgaatgactccattttggtttggcttactggggcctagtggaggaactcagcccaaaacaatggtcttccataaattttatttaacatgctcttttaaccttaaatacttgaatgcgtatttcctaaacacaaggacattcttttatataatcgtagcataatgattaaaattaggaaattaacattgatagaacagtattctctaattacagacctgaagtgttaccagttatcctactaatgttctttatagcaaaatacagcatacgttggtggatacatcccaagacccctcagtagatgcctgaaaccacagatagtaccgaatcctatatatrctatttgcttttttcctatatataaatacctatgataaagtttaatttataaattaggcatagcaagagattaacaataataactagaaataaaatagaacaattttaacagtatgccaacatcactactcataggctttggggtcattattacataacattatggttacttgaacacaagcactgcaatatagagacaatacagagtcaagctgataatgagatgactaccaagtgactagtgggtgggtagcatatatagtgtggatatgctggacaaagggaagactcatgacctgggcagggcaaaatgggacagtgtgagattttattatgctactcagaatagtgtgcaatttaaaacttaggagttgtttatttctgtatttttccatttaatattttcagaccatggttgacagcagataaccgaagccacagaaaacaaaaccacaaataagggtggactgctatattttttcgtgtttcaagatccaatctaggatgtatactatacttacttattgcctctttaatcttttttattgtggaatacttcctcagcctttctatgtgttttatgagcagctattttatagaatattcctcagtttgagttttagggaaaattgtgaaaaacttcgaaatggaccaaaagattatcaggtatcttcaaaggaaaactagaagttttctagtataccctttcaaattatccgatttctatgtgagttctgaggctttcattgtattcatggattcatggtattttacaactctataggtcatataaaactgatagcaatgcaaatgattttttttttccatagaaatcgcaaattgcgtctggtggaatgcaactgattgccccctggctgttaatgttttcaattttttttgtatatatttctaaatgcatattggccattccttattttactgtatatgggtgagactttggattcttttttctgattggttataacatcttaccagttctgtcattaattactgagataaataaaatctttaacatatgttcattttatatgtcatgatgatatttgtcaaaagacaaaagcacaacaaatttagttttgttaaagcaaattaaatatggcctgaggaggcctctctacttctatatttgagtccttgtggatgaactgcaacctaacttaaaaggtagacaagactgaaaacctaacttaagaggatgctcctgtaacagtagttgattcttggccaatcccagcagccgtacttcaaccagtcatacactcctgagtgttcaaactgtgttcgaataaggcaaatgtggaactgtaaggaattcagttgtttctgtatgtcacttctgatttctgtgttacttccctttttttgtctataaatttgttctgaccatgaggcatccctggagtctctctgaatctactgtgattctgggggctgtccaattcatgaattgttcattgctcagttaaacccctttaaatttaacttgactgaagtttttcttttaacagtttaaagaccttacttggtgttatttgcagttctagaattgggcagcacttcattctataaaatagaataagtgttccaatgggctaaacggaggttggttttatagacaaagggctgaaaaaagcagaaaaaagaacaaaaagtggatcggtcattttaatgttaatttcctattaagggaggaatagggaaaaaaataatacaaaaataactggttggtcaacatcaggctacttaggttactttttgttgttaaaggcagagggaactttattgttacgctgactgagactggtctgtttgggaaatttggctattgtctctctctctctctcctgatttcttggaaagtcagataacaacttagttttggtttgctgatgtggaactttagtaccagtactacattttggtttggtctgttgggtctagtgcaacagcttagtctaaaacaatggcctcctataattttcatttaacatactttaaagaaatttctcccttaatgagtttgtgtaatatttcttcatggttagattcagcttatgtatttttaggaggaatacaacaaaagtgattttgtttctttagtacatcatatcaaaaggcacatgatgtatatgtcccatcaccaattctgttaacctaaatcacttaaggaggtgtctgctggtttttccactgtacagttactgttttctcttctgtaacttataagtatcttttggtgaaaaactttgagaatatattggtatcctatttcttaccaaattttcatttactgattttagcatccattgttgattcttgcctgaatcacttattactacaatgatctctaagtggtgattttctgtgtttttttttccatacttttaatttattaattggcattctactgtaaggaaatgcttttccttttcttccttttatatcactatggactcgggtttttattttattctatggattctaatgtttccattatttttgtatttattttgatgctcaattgtttcagggtcagatttgggcaatgggaacctcttcaggtgggtttctgtgtcattgcgacatgtcactatcattgagcacttccttactttctggtatagaaagatgtttcagatttatattgtgttgtttctttccagttctggaatcagccatttctttaaggaactgtaatttcttttgaaataaagatctgggcattagagatgcttattgctaatatgatagtaattatcccaggccatctcagcagataaagcactttgcttttttcttttaacatagtatttctggaagtcgctagatcaacatttctagaaatgatattcttttaaacagtttcattgcacttcattttggaaacaagtcagaatttattcaaacattctcctatgtaagagtgtttagattgtttccagtattttgcgattataaactattctgcaatgaatattatatatatatgwatatatatatatatatatatatatatatagttggaggtgtatcttcagggcaaattcttagatagtggattgctaggtaaaaattaatgactatgtatttttgttagacaatgcccagttcccctctgaaagtgttgtaccaaatttgtattcccaaaacagtatataatagaagagtgcctgtttacccagaacctcaacatcagaatgcattgttactttttaattttaaccatctgatagtatctcagtgtagttttaatttgtatttctatctaaaagttaaggctgaacatcttttcatatgtttaagggccttttaaaaattttttcttttagagacaggtcaccctatgtggcctaagctagtctctaactcctggcctcaagcaatccttctgccttggcatccccaagtactgggattacaggtgtgggccactgtgcctggcctagggtcattatgaaactatcttttgttatgaattttctgtttatatcttttttttttttttttttttgatggaatctcgctctgttgcccaggctggagtgcagtggtacaatcttggctcactgtaacctccacctccggggttcaagcaattctcctgcttcagcctcccaagtagctgggactgcaggcatgtgccaccactcctggctaatttttgtatttttagtagagacagggtttcaccatgttagccaggctggtctcgaactcctgacctcaggcagtccactcgccttggcctcccaaagtgctgggattacaggcgtgagccaccatgcccgacctgtttataccttttacacatttttctatcaaggctttggtctttttcacatggtttttaagaggctttttttttttaatgtaagggatattatctctttatctacaatatatgttattttctgtgcgttgttttttaaattttgtagtgtttttgccataaatgttttaaaacatttttatatagtcaactctatcaaattaaaaaaatttgcctctattttgagtcatattagaaaacctttcccttaagcctgcattatattgaaattcacttgtgttttcttctagttttctgtagtttcttttttacatttagactcctgatccatttggagattattattgtgtatggtgtaagatatggatctaattttaccttttcccagaagtctaaccaattgtactagcaytctgtttttttatttttttatttttatttttttttttgagatggagtctcattctgttgcccaggctggagtgcagtggtgcaatctcagctcacggcaacctgtgccttctgggttcaagtgactcttctggcttagcctcccaagtagctgggattacaggcacgtgccaacacgcccggctaattttttgtatttttagtagagacggggtttcactgtgttagccagatggtctcgatctcttgacctcgtgatccgcccacgtcagcctccaaatgtgctgggattacaggtgtgatgtactagcattctttattaaaaatttacctttgtgggctgggtgcagaggctcatgcctgtaatcccagcactttgggaggccgagtgggggagatcacgtggtcaggagttcgagaccagcctggccaatatggtgaaaccccatctctactaaaaatacaaaaattatccaggcgtggtggcatgcacctgtagtcgcagctactcgggaggccgaggcagaagaattgcttgaaccagggaggcggaggttggagtgagtcgagatccgccactgcactccagcctaggcaacagagcgagactacgtctcaaaaaaaaaaaatttacctttgtgtcatgatttgagatgccaccatcatcatatattaaatttctatttgaatctgtttctggacatgatattattccactgaagtctgctagtctatttatgcactgatatctcactgttttcattacggaggccatatagtatgttttaatgtttggtaaggttactcctctctcaaaacagggtttttttgtttttgttttttctttttttagtgttttgcccactattgttacatatttgtttttcttttctttttttttttttgagatggagtttcactgttattgcctgggctggagtgcaatggtgcaatcttggctcaccgcaacctctgcttcccaagtttaagtgattctcctgcctcagcctcccgagtagctaggattacaagcacgtgccaccatgcccagctaattttgtatttatactagatacagggtttctccatgtcggtcaggctggtcttgaacttcctccctcaggtgatccgcctgccttggcttcccaaaatgcttggattacaggcataagccaccgtgcctggctacatatttgtttttcgtaaggtctttttagctaacttgtctatctccataagaaaagcttattggtattttttgggagatttagttgaatttgtaaattaactttgggagaactacatctttatgatgttgtaycatcttatccaaaacagggatatcttttcatttcttatttttttattttatttgagatggagtctcgctctgtcacctgtgctggaggctagagtgcaagtggcacgatcttggctcactgcaacctccgcctcctgggttgaagtgattctcctgcctccgcctccggagtagctgggattacaggtgcgtgccaccatgctgggctaattttttgtatttttagtagagatggtgtttcactatgttggcaaggctggtctggaactcctgacctcatgatccacccgcctcggcctcccaaagtgctgggattacaggcatgagccacagtgcccagcccgtttctttaagtctatttgtctttcaagaatgtttaaaaacttttcttaaatagattttgcacgtttattaagtttgtttgtaagcatttagtgttttttggtgctaacattaattatattttctttaccattctagtctctaattggtttttgttttcgcatatgaagtctactgatttctgtatattaatcttacatcctgttaccttagtgaattcttttattattcaagttggttttatcattacttctctgtggttttccagaaatttattactgacattataaggctttctgggggagcatggcaggttgcctaagctggtccaaaactggtttgaaagagcagggaaaggagactgacttggggtttttatgatggttagagggtagagccagggagaggatttctacatgtggtttggctggtggcaaaagagaggggctttttttttttatccctttgcttaatgttaggtagaaaggggaaagagggagagttaaggtctaaaagctggcagtagtcaaacatcaaaaatggaatcagactattatagtttctgatatatttggatagaggtctgcaaagtcatttcttatttaaaaaaaagtcttctgtttagtagtattttccctttgttatttttttattttgtacatttgtgctttatcccccayattattaattcattagctaatggcttattttgttaacttttttcctaaaaccgcaggctttgaatttttaggtctgctgtttttctactccccatatcattactttctgttcttatcttttttgtgtcattctttttgtttattttctagcttatggagctgagaatttagtttcctattatcatttttcatttttactgctaaagtgtttagagctatggagttttctgactgctttaaatgtatcccatatattttttatgagtagagcttttaatgttatcattatttttagattctatctttcacttcatttcccctttcacccaagagttgtttaaaagacacttaagaaatttgcaggtaggaagacctttttgttatttttcttgttaataatttctagttctattgcattgagtgttgtttgtattatttctactttatggaatttactaatgtttcattgtaaccaaatatatgatcagtatttgtkaatgttccatgtactcttgagaagttttattgcctattatcagggtaaaatgtttgatatatgtatacatccataaaatttactttatcaagtttattgagtcttttctctgtgtttttggactcattgatctactaaggtgtcttataatctcttattattaatgtatttctacctttatttccttacattgccttatagttttgccttatacaagtaattactgtttcatttgggatatttcttaactgccatgtcttcattttgatttgtggctctcagcattaagaaatatccttctggtaggctgaggcaggaggatcacttgaagccagaagtttgagaccagcctgggcaacatagtgagactatgcctctacaaaaaattaaaaaatattttagctaggcatggcagcatgcctctgtagttctgctgaggctgagaccacaggattgcctgagcccaggagttctaggctgcagcgagccgtgatcatgccactgcccattgaactttagcctgggcaacagagcgagtccctgtctctcactctctaaagaaaggtatccttctatgcacatttaatgtgtaagcttaaattctacaattttgatcaggattactacttgttttcttattgttttcatttgcctataatacctttgcccatttcttgatatttagtctttcggaatcaccttgttttagttatgtgtctagtattcagcataatacattcagtcctattttaggagcaaaattgcacatctttatgttttaatagttgaggctcattcacatttattaatgtgactaatatgtttgatttcagttctgtcatattattttatacaggttgagtatcccttatccaaaatgtttgagactagaagtttttcagatttcagatttattggattttggaatatttaaagatacataatgagatatcttggggatagcacccaaatctaaacatgaaatttatttgtttcatatacgctttattcacatagcatgaaggtagttttatacaatattttaaataattttatttatgaaagtttgtgttaaatacttaaatgtggaattttccacttataacgtcatgtctgtgcttaaaaagcttcaaattttggaatgatttggattttgaaattttgaattaggratgctcaacctgtaattatatactatggtacattttatgtttttctttatctaccagatatttttcttttctcctttagttttgaaatttctgtggtatttaagaagatttatatttttgttttattggttacctttgtacttatattttaaaacacccttagaaaataggggaatattttcttatttaacttctactatctgctttgtcagtttttttttcccagtggtggctgttgaaaagcactaatattttatgtcattctatctcaaatccagacaaataacctcagttgtttcaacaaacttctctataaaatagaagaagctgggcagagagcagcaagatttatcaacagcatcattaaaattacccagtgcactaacattactaactatcctgacacaagctaaacacttaattacctaccatctctcattgcttgtgatgtattcttttttgttgttgttgttgagatggagttttgctcttgttgcccaggctggagtgcaatggcgcggcctctgctcactgcaacctccacctgggcctgtaatcccagcttgtgatgtattcttattcacctgcacagactggaaatgatattgaacccaggaactaagatacaatcataactaccatttattaaacacatacttcatgccagtgctgggctggacactgttccaaatgaccttattaatcttcccaacaaatctatgggatacatgtttctatcctatttaaaggagaatgagattaatgaatttcatcatgtgtagagaacagttttaagcccaggtctacctgactgcacaggccctgttctttgtttttgtttgtttgtttaataatatccttgtatatgcctgtactataacttaaaaaaaatcattgctttgtcagtttttttggtatcttttaacttttacctcttgcctatttagtaatcaatgagcttattctactttcctctttttctttcctacacttcacctttttttaataggwggactttttctttctagtagtagttttagattaatcttagttttggtggctcccttcttttctctttattttactcaattttcccttcctccccctcttcccctcccctctccctccctccctccctccctccctccctcccttccttccttcctctttcattctttcctttttttccaaagacaaggtctcatgttgcccaggctagagtgcagtggctactcgcaggcaggatcttgccgttgatcagtgcggcagttttgacctgctccatttccctcctaggttggtttacttctccttaggcaacgtgataatcccttggcccccacaggtcaccttattgaagcccaacttagtgcagacacctggacagcgtagcgcaccacagcccagaacttctaggctcaagcgatccttctgccttagcctccagagtagctggaactacaggcacacccagggcgtccggcttttttgcttaatttttgtttcactatgttttgtagttcactaatgttttgtagttcactatggtcttcttttctcccttcttcttttttccccctattatagataacttaaagtttggcatttcgtcttctagttatactgaagacaaagtttttgkatacttttatttgttcttgttttgttttttgaggatgtatagagaaagatttaggcagccgcatctaccaggtagtccagtagatgtattttgagtgatatgctagcgatatcagttattgtctccctgctgcaatcttttgttctcatccacagcctctgctgaaggagtaaacacaagtgaccatatttgtaactaaaacaagtgaccttatttttactaaatgacctcaccctttggccacagatgaatttatctttcctgtatggatacaggacctaaactctgccaagctgattatatcttttgagaatttgaacgaaaggacacagaaacgtaatcagttagtataggatgctggagctgttaagtcttgtagagtcaaggccacagtgtcatgaaaactgaaggtatggaggagcagaaactaagaggttcacagaagtaggtggaatgcagagtactcagcagagagaagtttataatggtgtctttggagcaacaagagaatgaggcaggaagagagccaaagaaactggtataaacagtttctgatgactattcaattcccaagagacgagcttgaataacttccaacaatattcaacatatttttctattattttattacattttcttgaggttttttgggtgtgggtctctgtttcttaattaattaatttcctgaatatattaggctttaataaatgtttatcatcctggtgttattacccagatacaatatgatgtgggactacaaataatgagggctattcacagaattgacttgagataatttgagagtatcmagttattaaatatattacaagaattttggatctggaagggacctatgaggaatatctagttcaaattctcaaattttagggaagagaggccaagagaaaatgatttgccgaactttgacattgaattagaggtctcattagaattagaactgtggtttcctgatacccagtctagttttcatttgactacatgttctgagttagacagtataaccccccaaattcatatctacttgaaactgcagaatatgaccttatttggactagcatctttgcaaatgtaatgaattaagatgaggtcgtactcaattagagtggatggactttaatccaatatgactggtgtccttacaagaaggaaaaacagacagaatgccatgtgatgacacggcagagattagagtaataaagctgtaagccaaagaacaccaaggattgacggctgctaccagaaggtagaaagaggcagggaagaaatgattctcctctacagctttcagaggtactactgacctctggttttagacttctggctgcagaattgtgattataaatctctgttgtgttaagccatccagtttatagttcttcgttatgacagccttaggaaaccaaatatactaccgcatggtacacttttaatgtaaagagattcttccctgaatgtcaccaaaaaagtatacagaaactacattcttcaaaagggaagaaaatagctttttctgttgggtatatcaatcttaacttttaaattcttcagtgtgcttagctatacttttgtgccatttagagattacagtattgttcatcttgggattttcaaggaagtatgtcactaggaaattttgcttttattcttttaaggaataattaatggtggcaggcatatggaktgtgtgtgtgtgtgtgtgtgtgtgtgtgtgtgtgtatgtatgtgtgtgtatgttatgttacggattttctgttatatgatattctgaaatattgtacttttattttcaggttactgaagctaaaggagatgtttaactccaagtttggatctattcccaagttttatgttcgagcaccaggaagagtcaacataataggtatttcaaaagttccttctcttaatttttttcttcatcctttgataagatctaaatttttaaaaatatatttctttcttaatttttcccaaaatagaatatttcacatgtatctactaatagtaagatgtgcctttgcataaggaacacactttacttttatctttcccaatccatgttattagtattgttcatttgttttttaaatgtattaatttgttgaaaccaagttgttaatattgttttcataaaaaatgaaaatatttttctaggccacaggttaaaattttagactgtggtaagtagttttgatggttttatatttactcactgggttagaggagcacagggaaaccttaaaattccttgctactaaaagtgtggtccagaatttgcagcccttctagatgaatttatctttccttttgtttatcctgtgaagtactttgaattttactaccttttagtggtaaataacacaacctttcaacattttgtttactatcattttatcaatgtccctatatataataattgacatagttgtacttagactacataccatttgtatctttttttcatttaatatatcataaatatttccatgtatctatttccattttctgctggtataacagaattccacagatggggtaatttatcaacaatagaagtttatttggcttgtgattctggaggcagagaagttcaatatcatggtactcacatctggtgatggccttcttattgtgttattctcttttttttctgagatggagttttgctcttattgcccaggctggtgtgcaatggtgcagtctcggctcactgcaacctctgcctcccgggttcaagtgattctcctgcctcagcctcccgagtagctgggattacaggcatgtgccaccatgcctggctaattttttgtatttttagtagagacagggtttctccatgttggtcaggctggtctcgaactcccaatctcaggtgatccacctgccttggcctcccaaagtgctgagattacaggcgtgagcctccacacctggcctcttgtgtctgttaactgacctctccctacctgcccttcctgccctcactacatgttatccttcccagcctctagtaaccattaatttatcctctatttttatgagatcaactcttttagcctccatatatgagtgagaacatgaggtatgtatctttctgtgcctgacttatttcacttaacataatgtcctctaagctcatccatgttgctgtgaataacaggatttcactcttttaggtggctgaatagtattccattgcacacatacaccacattttaaaaatccattcatctgtgaatggacatttatgttgattctgtatcttgactattgtgaatagttttgcaataaacaagagagccacatatctctttgacatactgatgtccttttctttggatatatacctagtaatgggattgctggatcatatggtggttctatttttagttttttgaggagccttcatactgttttccatatggctatactaatttactttcccaccaacagtgtagaagaattcttatttctctgcattctctctaacacttattattttttgtctttttgataatagtcatcctaactgaagtgagataatatctcctggtggttttgatttgcattttcctgattattagtgatgttgagcatttgtctatgattgtaagtcatttgtatgtcttctttttagaaatgtctatttagatcatttgccaatttttattttattttattttattaatttatttattttgagacagagtctctctctgttgcccaggctggagtgcagtggcacgatctgggctcactgcaacctccacctcctgggttcgagcaattctcctgcctcggcctcccgagtagctgggactacaggcacgtgccaccatgcccaggtaatttttgtattgttagtagagatggggtttcaccatgttggccaggatggtcttgaactcctgacctcagatgatctgcccaccttggcctcccaaagtgctgggattacaggtgtgagccaccacaccgagaccatttgccaattttttaattggaatatttgttttactactgttgagttaagttttttatatattctggagattaattccttgttcggtgaatagtttacaaatattttatccctttcaacaggttgtctcttcactctattggaaggtttcctttgctgygcagaagctttttagtttgatataatttcatttgtctatttttgtttctttgcctgtgcttttatagtcttattcataaaatctttgcctagaccaatgtcttgaagtgtttcctttatgttttcttctagtagtttcatagtttcagttctgatgtttaagtctttaatccattttaaattcatttttataaatggtgagatattggggcctatttttattcttttgcatatggatatctagtttttccatcaccatttattaaacagattgtccttttccctatgaatgaaagtaactttgttgaaaatcatttggccttggccaggcatggtggctcacacttgcaatcccagcactttaggaagccgaggagggtggatcacttgaggtcaggagtttgaaagcagcctggccaacatcatgaaacctcgtctctgctaaaaatacaaaaattagctgggtgtggtggcacacacctgtaatcccagctacgcagggggctgaggcacgagaatctcttgaatctgggaggcggaggctgcagtgagccgagatcaaaccactactgcactccagcaggattctgtctcaaaaaaaaaaaaaaaaagaaaatcagttggctgtaaatacatggatttagctctgggttctctattctgttctattggtctgtatgtctgtttttacgccaaaaccatagtattactgtagctttgtagtatatttgaagtcagatagtgtgatgcctccagcttttcttttcttcttcttcttcttcttttatttttttttttggctcaggattgctttggttttttggggtcttttgtgattccatacaaattttagaattaatttctgtgaagaatgtcattggtatcatacgaggaattgcattgaatctgtagtagtatggtcattttaacaatattaattcttccagtccaagaatgtgggatgtcttcccacttttttgtatcctcttcaatttctttcatcagtgttttattgttttcattgtacaggtcttttatcaccttggttaaatttattcctagatattcattttttttagctatttcaaatgggattgcttgcttgatttctttttcaggtagtctgttattggtgtatagaaacactagtgattttaaaaattttttcaaagtacttttatttattattttaaaatcttatttttccataagttattggggtacaggtggtatttggttacatgaatacattttttagtggtgatttgtgagattttggtgtacccatcacccaagcagcatacactgcactgtatttgtagtcttctatcccgcgctcccctcccactcttcctcacaagtccccgatgtccattacctaattcttatgcttttgcatcctcatagcttagcccccacatatcagtgagaacatacaatgtttggttttccatttctgagttatttaacttagaataatagtctccagtctcatccaggtcactgcaaatactgttaattcattcctttttatggctgcatagtattccattgtatatataccacagtttctttatctacttgttgattgatgggcatttgggttggttccgcgattgggttggttccataataccaatgacatatagtggcaattgtgaattgtgccactataaacatgcgcgtgcacatatctttttcaaataatgacttcttttcctctgagtagatacccattagtgggattgctggatcaaatggtagttctacttttagttctttaaggaatctccacactgttttccatagcagctgtactactttacattcccaacagcagtgtagaagtgttccctgttcaccacatccacaccaacatctactcttttttgatttttagattatggccattcttgcaggagtgaggtggtatcacattgtggttttgatttgcatttccctgatcattagtgatgttgagcatttttccatatgtttgttggccatttctatatcttcctttgagaattgtctattcgtgtccttagcccactctttgaatgggatggtttgtttttttcttactgatttgtttgagttcattgtagattctggacattagtcctttgtcagatgtatagattgtgaagattttctccaactctgtaggttgtctttttactctgctgactgttccttttgccatgcaaaagctctttagtttaattaggtcccagctgtttatctttgcttttattgcatttgcttttgggttcttggtcatgaaatccttgcctaagccaatgtctagaagggtttatccaatgttatctgctagaatttttttagtttcatatcttaggtttaagtccttaatccattttgagttgatttttgtgtaaggtgagagatggggatccagtttcattctcccacatgtggctagccagttatccccgcacaatttgttgaaaagggtgtcctttccctactttttgattttgtttgctttgttgaagatcagttggctataagtatttgggtttatttgtgcgttctctattttgttccattggtctacgtgcctatttttatactagtaccacgctgttttggttgactatggcctaatggtatagtttgaaatcaggtagtgtggtgcctccagatttgtttctttttgcttagtcttgtttttgctatgcaggctcttttttggttccatatgaatttttatttatttatttattattattatrctttttttagggtacatgtgcacaatgtgcaggttagttacatatgtatggttccatatgaattttataattgttttttctaagtctgtgaagaatgatggtggtattttgatggggactgcattgaatttgtagattgcttttggcagtatggtcattttcacaatattgattctacccatccatgagcatgggatgtgtttccatttgtttgtgttgtctatgatttctttcagcagtgttttgtagttttccttgtagaggtcttttgactcctttgttaggtatattcctgagtattttattttattttttatttatttattttttgcagctattgtaaaaggggttgagttcttcatttgattctctggtcgctgttggtatatagaagagctatatttgtgtacattaatcttgtatctggaaactttgctgaattcttttatcagttccaggagctttctgaaggagtccatagggttttcaaggtaaacgatcgtatcatcagcaaacagtgacaatttgagttcctctttaccaatttgaatgccctatatttctttctcttgtctgattgctctggctaggacctccagtaccatgttgaaaaggagtggtgagagtgggcatcttagtcttgtcccagttctcagagggaatgctttcaactttacctcattcaatattatgttggctgtgggtctgtcatakatggcttttattacattgaggtatgtcccttttatgtcaattttgctgagagtcttaatcataaagcttgctggattttgtcgaatgctttttctgcatctattgagatgatcatgtgatttttgttttctattctgtktatgtggtgtatcacatttatagacttgcctatgttaaaccatccctgcatccctggtgtgaaacccacttgatcatggtagattaactttttgatatattgttggatttggttagctgggattttgttaaggattttagcatctatgttcatcaaggatattgaactgtagttttctttcttggttatgtcctttcctggttttgatattagggtgatgctggcttcataaaatgaattcgtaaaatgaattcggaaaggttccttctttctctatcttgtggaatactgtgaaaaggattggtttcaattcttctttgaatgtctgatagagttctgctgtgaatctgtctggtcctgtactttttttttgttggtaatttttaaattaccatttaaatctcactgcttgtgattggtctgttcagggtatctaattcttcctgatttaagctaggagggttgtatttttccaggaatttatccatctattctaggttttctagtttactcatgtaaaggtgttcatagtcgccttgaatgatcttttgtatttcagtggtatcaattgtaatatctcctcttttgtttcttagtgaggttatttggattttctctcttcttttcttgggttaatcttgctaatggtctatcaattttcttttctttttttgagayggagtctcgcttttgtcacccaggctggagtgcagtggtgtgatctcagctcactgcaatgtccaccacccaggttcaagcttctcctgcctcagcctgagtagctaggattacaggcacccaccaycatgcccagctaatttttgtacttttagtagagacgagatttcaccatgttggtcaggctggtcttgaactcctgacctcaggtggtccacccgcctcagcctcccaaagtgctgggattacaggcgtgagtcactgcgccggcccaattttatcttttcraagacccatctttttgtttcatttaccttttgtattttgtttgtttgtttgtttcaatttcacttagttctgctctgatattggttatttcctttcttctgctgtgtttgggtttagtttgttcttgtttctttagtttgttgaggtgtgaccttagattgtctgtttgtgctctttcagactttttgatgtaggtgtttagggctatgaactttcctcttagcactgccttagctgtatcccagaggttttgataggttgtgtcattattgtcattcagttcaaagaagtttttaatttccatctggatctcatttttgactcaatgctcatttaggagcaggttatttaatttccatgtatttgcatggttttgaaggttccttttatagttgatttccagttttatttcattgtagtttgagagagtgcttgatataatttcaattttcttaaatttattaaggcttgttttgtggcccatcacgtggtctatcttggagaaagttccatgccctgttgaaaaggatgtgttttctgtggttgttggatgaaatgctctgtatatatgtgttaagtccatttgttccaaggtataggttcaatccattgtttctttgttgactttctgtcttgatgacctgtctagtgctgtcagtggagtattgaagtcccccactattattgtgttgctgtctatctcatttcttaggtctattagtaattgttttataaatttgggagctctagtgttaggtgcatatatctttaggattgtgatattttcctgttggacaaagcctttttaccattgtataatatccctctttgtctcttttaactgctcttgctttgaaatttgttttgtctaatataagaatggctacctctgctcgctttggtgtccatttgcatgaaatgcctttttctacccctttactttaagtttatgtgagtccttatgtattaggtgagtctcctgaaggcagcagatagttggttggttagtccttatcctttttgcggttctctatcttttaagtggagcatttgggccatttacattgaatgaaacactagctatttttaatactgattttgtatcttgcgactttactgaatttatcagctctaaaagctttttatggtttttaggtttttctacgtataagatcatgttgtgtacaagtagagaccatctgacttcctcctttccaatttggatgccctttacatttttctcttgcctgattgctctggctcagacttccagtactattttgaataagagtggtgaaattgggtatgcttgtcttgttctagtgcttagacaaaaagctttccatttttcctcatttggtatgacattagctatgggtttgtcatatatggcctttattgtgtattgagacatgttccttctgtacctagtatgttaagagtttttatcatgaaagaatgttgaattttatcaaatgctttttctgaattgattgtaaagattatatgggttttgtccttcattctgttgatgtgatatatcgtatttttggatttgtgtatgttgaaccccttccttgcatttctaggattaatcccacttgatcatggtatataatctttttatgggctcttgggttcattttgccaacattttattgaggatttttgattatatgttcaactgagatattgtcctgtagttttcttttkctgttgtgtccttgttcagttttggtatcagaataatgctggcctcatagaatagtttcaaagaattccccgcctttcaatttttttgcaagtctgaaaagaattggtgttagttcttctttaaaggtttggtagaattcatgggtgaagccctctggtcctgagcatttcttcgttgggagactttttactgttgcttcaatcttgttacttgttattggtgcgttcaggttttctatttctacctggttcaatcttcttaggttttatgtgtccaggaacttatgcatgtcctttaggttttgcaatttgttggcataatagttgttcacaataggctttaatgatcctttgtattttgtggtgtcacttgtaatgtctccttttctgttttttttaattttatttatttgtgtgttctctttttctcagtctagctaaagatttgctattatgtttaccttttcatttcattaatttttgtctcaaatttacttctgctctgatctttattatttctttccttctactaattttggatttggattgtttttgctagagatgtaccattaggttgtttatatgcaaaatttctacctttttttttagtggctratttattttattttattttattttattattattatttttttgagatggagttctgctcttgttgcccaagctggagtgcaatggtgcgatctcagctcactgcaatgtctgcctcccagattcaagtgattttcctgccttagcctcccaagtagctgggattacaggcacccaccaccatgcttggctaattttttgtatttttagtagagacagggtttcaccacgaaggccaggctggtcgcgaactcctgacctcaggtgatccacccgcctcggcctcccagagtgttaggattacaggcgtgagtcgccgtgcctggtctattttattttatttttaactttcgagatgtagtctcgccctgttgcccaggctggagtgtagtggcacgatcttggctcactgcaacctgcacttcctggactcaagtgattcttgtgcttcagcgtcctgagtagctgggattacaggcatgtgccaccatgcctggctaatttttgtatttttactagagacggggtttcccaatgttggctgtcacacacacacacactcacacacacacacacacacacacacacacacacggccttttcatttctaccacatggctgggcttcaatttttcaaacttgttcactctgcttcccttttaaatataaattccagtttcaggtcatttctttgcttatgcataagagcataggttgttagaagcagccagactacatcttgaatgctttgctgcttagaaatttttttcaccagatatcatcactctcaagttcaaagttccacaggtccccagagcaggggcacaatgcctccagactctttgctaaagcataacaaaagtgacctttactctagttctcaaaaagttttgtattttcatctgagacctctttagctgggacttcattgttcatattattatcagcattttggacacaaccattcaacaagtttcttggaagttccaaactttccctcatcgtcctatcttttttctgagccctccaaactgttccaacctctgccacttacctagttccaaaggtgctttcacattttcaggtatctttatagcaatgccccacttctgataccaattttctgtattaatctgctcttgcactgctataaagaagtatctgagactggataatttatttaaaaaaagaggtttaattggctcacaattttgcaggctgtacaggaagcatggctgggaaagcctcaggaaacttacaagcatggtggaagacaaaggggaaggaggcacgccgtacatggctagagcaggaggacgagagggaggggaagtgctatactcttttaaatgatcagatctcatgagaactctatcatgagaaccacactcaggagattgtgttaagccattagaaaccacctccatgattcaatcaacacccaccaggcttcacttccagcattaggtattacatttcaccatgagatttgggtggggacacagatccaagccatatcatatgggtctaggcattgatccctttcttcttggttttctaatttgttggtatatagttgctcataatagtctctaatgatgccttgactctctgctatcagttataatatctttaaaaaaaattmtctgactttatttatttgaatcttctttattttttactttttcttttttgtttgaaatggagtctcgctctgttgcccaggctggagtgcagtggcgctatctcaactcactgcaacctccacctctcagattcaagtgattgtcctgcctcagcctcccgagtagctgggattacaggtgtccacgaccatgcctggataatttttgtatttttagtagagatggggtttcaccctgttggccaggctggtcttgaacgcctggccttgtgatctgcccaccttggcctcccctcccaaagtgctgggattacaggtgtgagccagtgcacctggcctcttttttacttagtgtggctaaaggttttttgatttagtttatgtttgcaaaacaccaacttttaatttcattgatttttttttgtagttttaaatttcaattttacttatttttgctctgatccgaattcttttcctctactaattctgcatttcatttgcttttgcctttctcatttgttaagatkcatctttaggttgcttatttgacatatttctacctttttgatgtaggtgtttattgttttaaatgtgcttttttgtactgctctttctgtatcatggagattttgatctgttgtcttttcactcccaattgtttcatgaaatttaaaaatttcttaattttttcattggcccactggtcattcaggagcatattttttactttccaagtgtttgcttagtttccaaagtttttcttcatgtttatttctaattttatttcattatgatcagagaagttacttgatattattttaacttttttgaactttttgagacttgttttgtggtctaacttaagatctatcctggagaatattctgggcactgatgagaagaatgtgtattctggggctgttggatggaatgtttttataaatatccatttgttctatagtgcagattaagtctgatgtttctttgttgattttctccctggataaataccctagggctgaaagtgaggttttgaaatccccagctattattctataggcatctatccttctttttagttttaataatatttgttttacatatctgagtgctccagcattgggtgcacatatatttacaattgttatatcctgttgctgaactgactcctttgacattatataatgaccttcgtctctttttatagtttttatcttgaatcctgtttatttatgcataactactcttgctctcgtttggttttcatttgtatggagtatctttttcttttttaaaaaattttactttaagttctgggatataaatgcagaatgtgtaggtttgatacctaggtatacgtgtgccatggtggtttgctgcacctgtcaacccattgtctaggttttaagccccgcatgcattagctatttgtcctaatgctcttcctccccttcccctccaccccacaattggccctggtgtgtgttccggaatatctttttctattttattttattttttttggtctgcatgtctttattgatgaggttagcttattgtttttgtttttataatccattcatccactttgtcttttattgggaatttagtccatttatattcgatgttatagttataaggtacagacttactactgccattttgttatttattttctggttgttttgttggtcctctcttccttccttcttgtcttcctttgtgtaaaagtgactttttctgacaatgttttaatttattatttaaaactttttttgggctgggcatggtgcctcacgcctgtaatcccagcacgttggcaggtggaggcgggtggatcatggggtcaggagatcgagaccatcatggctaacacggtgaaaccccatctctactaaaaaataaaaaaagatttagctgggcatggtggcgggtgcctgtagtcccagctactcaggaggctgaggcaggagaatggcatgaaccygggaggtggagcgtgcagtgagctgagatcatgccactgcactccagcctgggcgaccgagcaagagtctgtctcaaaaacaaacaaacaaaaaaacccaactttttttgtatctgttacaggtttttgttttgtggttactgtgaggcttgcaaataacataaccaattattttaagcagatgacagcttaactctgattacaatgaaaataaaaaagaaatcagcaaaaagaaaacaaaaaaaccccccaaaactttaccttaaccccatttcttcactttgtcactttttttttttttttttgagatggagtctcactctgtcacccaggctggatacagtggcgtgatctcggctcacttcaacctctgcctcccgggttcaagcgattctcctgcctcagcctcccaagtagctgggactacaggcacctgccaccacacccggctatttttttttttttttttgtatttttagtagagatggggtttcaccatgttagccaggatagtcttgatctcctgacctcgtgatcttcctgccttgtcctcccaaagtgctaggattacaggcttgagccaccatgcccggctgctttgtcacttttgattgtctctgtttatatctttttatgctcagaaagctgtttcagttactatttttgataggtttgtcttttaatcttcctactaagatatgagtgttttaacactatagttacagtgttagagtattctgtattcattcatctgttcatttaccactaccagtgagttctgtaccaccatgtgatatatatttttttacattaatgtgcttttctttcagattgaataactctctttaacattttttgcaagacaggtctggtgttgttgaaacccctcagctgtgtttgtctgggaaagtatttctctttcatgtttgaaggataattttactggaaataatattctagttcaaaagttgtttttcttcaacactttgaatatgtcatccccctctctcttggcctctaagtttcctgcggagttgtctcctactagacatattggagcccctttatatgttctttgcttcttttctttttctgcttttaggatactttctttatccttgacctttgagagtttgattaatatattaactgagttagtcttatttgggttgaatccttttggtgttgtgtgatcttcttataccttaatatttatatcttttcttaggtttggaaagttttctatcagtatttcactgaataaactttctaccctgatctctctatctctacatcctctttaaagccaataactcttagatttgccccttttaggctattttctagatcttgtagagaggcttcattcttttaaaattatttctcttttctctcctctgactgtgtatttttatatagcctgtcttcaggttcactatttatttttcttgatcgattctgctgttgagagactctgagacatttttgagtttgccagttgaatttttcagctgcmgaatttctgtttgaaatttcaaaaactattttaatctctttgttaaatttctctggtagaataatgaatttcttccctgtgttatctttaagtttgttgagcttcctcaagacagttcttttgaattctctgtctgaaaggacatacatctccatctttctgggattggtcactggtgtcttctgtagttcatttaatgaggtcatgttttcctggatactcttgatgcttgtggacattcatcacttatgggcattgacaaattagatatttatttgtctgtgtagtctgggcttgtttgtacccttcattcttgagaaggcttttcatgtattcaaatgggattgagtgtgttgtgctctaagcctgtggtccgtatgggcatatcggcacaaggaggtgctctaagcccaggaatgctgcaattcttcctgacatctagaggcactgccttgacgagtttgggtaaggtaaaggagaattccctgggttgtcaggcaaagtcctcttgatatcttccctttactcctcccagtcagaagtagtctgtctccatactgggctgcctagagcacttccatggcttccacagctggcactgtgctaggtcacacctgaagcctgtataatactggatcttgcctggttactgctgatgtttattcaaggcccaagggatctttagtgagcaggtgaatcctgccaagactgggttcttctcttcagggcagtggattccctctgaatgagagtgggtccaggaactaagtcctggaattgacagcttcaggaatctccttggtgctttacttcgrctgagctggtacccaaattgcaagacagtcttctgtactcttcccacttctttccttaagctaaaggaatctctccccaaactgcacttcctggagttgggtgcagtgcgatcaggcactcccctggctgccacagctggtgtcacacttggtcacacatcacaagtctactgcctccaaggccggtgcagtaccagggcttgcccgaggactgcagtacttgtggcctgacagccacttaagcttattctgggcactaggccagtttagttagccagaggtgaggttggttgggactcaggttcctcctgctgagattgagaattctgtcttgcccagggctgatctaaatgccccctccttgggtgctagcagagttctgctgttttgtgtttttctgtaacatggctgcactaagttccagtgcaaagacccacactcacttcaccctccctcccccaaacacagtttctctgtccatgctggaagggatcctgtaggcaatgcaagactgtctttcctgtcctcttcaattcctctatccctgatgttatgttaaaaccaggtactgtgattttcaggtactcacctgaattttctgggttcttatgaaggtgtttattgcatagatagttgctcaatttggtgtaagatcatggaagggttctatttggccatcttgctctgcttccctttatttttatttactgttaaaacctggctcatggtcagttttttcctgtatgtaaactttcttgaggtgcttttgttttatatattagcaatgattaaaaaagctttctcttttttctaggagagcatrtagattattgtggatattctgttcttcctatggctgtagaacaagatgtgctaatagctgtagaacctgtgaaaacgtacgctctccaactggccaatacaaatcccttgtatccgtgagtatttaaaattgttagtgtgtgtgtatgtatggttctgtttgtacccaaatgaactctttaggagacatcaaatttgtaacaggtcatttaacttattgatattttgtgtctgacattaaaaaaattctaaggccattatttattgttcattttgttcatttgtcaattcatttaaggaatatttatcaaagacttatcatgtgctagacatagtcttagataccaggtgatacaaagataaataactctgtccttgtccgataggtacttatcatctattgatctaattatctccagcaaagtcaggtctgatgttttcctatgttactatggcaccttctaagtatcttgtcatagcatattattatgctgkattattattatctgtttatttacctgtgtcacccagtagactgtaaactctgtgacttcaggcattgttgcctctcttcttcaatgccctagcatataaaacagagtctggtgcctaatagaggtaagtttctagtacatatgctttatcaagttaacaaagtctttaaaaaaaatcttagtttgctaagattaaaaaagtttactaatgggtattgaatttaattaaatgtctatttagaattgaagatcagtttttttaaaaatatggtgaattagtctgacgaattttctaatgttgagccctttttgcatttctgggataaactctacttgcttctaatgtattataatggatttgacttgataattacagaaaaagattttggcttgtatttggcatattatatgtttggcttgttcattggttagtttatctgcaataacattcatgtattcggaaaatatttttgataagactctataccagtttgtgcaagacgtagaagttttttacttttatatggaacttactgtagaagatctttttttccttttcatttcgcatgtttgataatatatcttgtgtgcattttggacccttgaaaagctcacattatgtcaagcatattttcgtgtcattgtgtatgaacatttaaaaatcggtgcatagtattttgtcatcttgatttagtaaaatttacttaatcattcccacaataatgaatatgtggtttcagtttcgtttttcacaaaagtagatcctgagacagacctggatgaaggtagtatatttgagaaatggtcccaggagcagtaggaaagagcatgaagaatgagttgggcaattagaggtgaattatcaagacatatagtccctgctagaggcaggaggcttgattctaccaggacccctaggaagcatgcagtatgcctcctagaattgtccatttgttwtagcattcattgtgtaagtatatcttaatttgtttgtttaccaataatggacatttagatcattcccagtttttgcctgtatgaataatactgctacaaatatttatgtacgaatatatgtgtggacatatgtttcatttctgttgggtaaatacctatgattggagtgtctggtttgccatttatttatttattgagacagggtctcaccctgttgctcakcctggagtgtagtggggcgatctcagctcaactcaacctctgcctcccaggttcaagagattctcccacttcagtctccggagtagctgggactacaggcacatgccgtcacacctggctaatttttgtattttttggtagagatgggatttcaccatgttgaccaggctggtcttaagctactgacctcaagtgatccacctgcatcagcctcccaaagtgctgggattgcaggtttgagctactgcatccgtcctggtttgcctttgatatggtttggtggtgtccccacccaaatctcatcttgaattktaactcccacaattcccacgtgtcctgggaggaacctggtaggaggtaattgaatcatgggggcaagtctttcccatgctgttcttgtgataaygartaagtctcatgagatctgatggttttaaaaatgggagtttccctgcacaagctctctttttgcctgacaccattgatataagacgtgacttgctcctccttgccttctgccatgattgtgaggctcccgcagccatgtggaactgtaagttcattaaatctcttgcttttgtaaattgctcagtctcaagtatgtctttatcagcagcatgaaaatgaactaatatagccttttaaagaaattttctggctgggcacggtggttcacgcctgtaatcccagcattttgggaggctgaggtggatggatctcttgagcctgggagttcgagaccagcctgggcagcatggcaaaagcttgtctccactaagaatacaaaaaaattagttgggtattgtggcatgcacctgtaatcccagctactcaggaggctgaggcaggagaatcacttgaacctcggaggtggaggttgcagtgagccaagattgcgccactgcgctccagccagggtgacagagcgagactctgtctcaaaaaaaaagatattttctgcttgccaaagttgtataattttacattttcaccagtggtgttactaacatgtcttaaaattttagctattctcataaatgtgtagtagcatatttcaagtttttaaatttctctgattaatgatgttgaacatcttttcatctacttatttgctacctagatatattctttgttgaagcgtcttctcaaatcatttccctatttttgagtttcttatagatacaagtcttttttttttttttttttttgagacagagtcttgttctgtcatttctgtgttgggacattacaggtcctttcttctaggtattttgaaatatacaatacatggttgataactatagtccccctactctgctatagaccattagaacttattccttctatctaaccgtatgtttttacctatttgccaacctctttttatcccccgttcactgaccattcctcacctctattatctattattctaccctgtaccttcatgagatcagttttttaagttcccacatatgagtgagaatatctgatgtttgtttttctgtacctggcttattccatccacattgctgcaaatgacatgattttattttttttatggctgagtagtattccattgtgtatatatacattttctttatttattcatctgttggtgggcacttaggttgattccctatctttgctattgtgaatggtactggaataaatatggagtgcaggtatccccttgatatactgatttcttttcctttggataaatacgcagtattagggttgctggatcatatggtagttgtgtttttagtgctctgagaaatctccctactgttttgtataatggctgcactaattacattctcaccaacagtgtataagtgtttccttttttctgtgtccttaccagcatctgttttctttwgtcttattagtaatagccattctaacttgggtaagatgatgtctcattgtggttttgatttccattttgctgatgattagtgatggtaagcagttttcatatacctatctgccatttgtatgtatgtctttggaaaaatgtctcttcatgttatttgtccacttttaaatgggattattactagtttttactatcgagtgttttgagttccttgtatattttggatattagttccttgttggatgaatagtttgcaaatattttctcccattcaacaggttgtctccccactctgttgattgcttcctatgtgggcagaagctttttagtttaaaatagttttatttatctatttttgttttatttttctgtacttttgagatcttagtcataaaatctttggctatatcctaaagtgtttcccctatatttctttctagtagttttatagttgtgggtgttatgtttaagtctttaacctatcttggattgaattttrtatatggtgagaaataggggttcaattcattcttctgcatatgggtattgagttttcccagcaccatttattcaagagggtgtttgttcctgaatgtattttcttggtacctttgttgaaaatgagtttgctggccgagcgtggtggctcatgcctataatccctgcactttgggaggctgaggcaggcagatcacctgaggtcaggagtttgagaccagcctggccaacatgatgaagccctgtctctattaaaaatacaaaaaattagctgggtgtggtggtgcgtgcctataatcccagctactcaggaggctgaggcaggagaattgcttgagcccaggaggtggaggttgcagtgagccgagatcgtgacactgcactccagcctgggcaacaagagcaaaatctctgtcttgaaaaaaataaaaaaattaaaaaaaaaagaaaatgagtttgctgtacatacatggatgtatttctgggttctcccttctgtcccattattacttgtgtctgttttgataccaataccttgctgtttgggtttttatagccttataatatattttgaggtcagatagcgtgacccctcttgctttgttctttttcctcaggagtgctttggctatttgggctcttttttttggttttatacatattttaggatatttttctatttttgtgaaaatgacagtagtattttcatagggattgcattgaatttgtagactgctttgggcagtatgttcattttaacaatattaattttttccaatccatgaacatgggatgtcttttcatttgtttgtgtcctcttcaatttcattcatcagtsttttctagttttccttagagawctttcatctccttggttaaatttattcttaggtatttttttttgtagctattataaacagcatttctggcttaatttctttctcagctagttcattattgatgtattgaaatgctgcaaatttttgtatgttggttttttatactgcaactttactgaatttatttattaggtgtaagagttttttttagagtctaggtttttctggatataaaatcatgtcacctgtgaaacaggacaatttaacttcctccatttcaacttggatccttctatttttattcttgcctgattattctggctaaaatttctagtattatgttgactaggagtagtgatattggtcatcttttttgggttccaggttttacaggaaaggcttcaacttttctttatttgatatgatgttagctgtgggtttgtcatatgagacttttattgtgttgtggtatatttattctatgcctgataattgagagtttttatcgtgaaaggatgttgaattttattacatgctttctctatgtctattgagatgattatgtggtttctgtcctttattctactgatgcgatgtgtcacatttagtgatttgtgtttcttgaacaatccttgcatccctgggataaatcccgcttgatcatggtgttttatctttttgatgtgctgtgggattcagtttgcggcaattttgttgaagatttttacatatatgtaaatagggatcttggcctgcagttttggtttttgttacacctttctctaattttagcatcagagtgatgcttgccttttgggactaggttaattcccttctcttcaattcattggaattgtttgaagaggattggtatttgttctttgtaagtttggtagaatttttcagtgaagctgtccagtcttgggcttttctttgttggaagccttttcattttactgtttcaatcttggtacttgttactagtctgtttatgttttttgtttcttcctgatttaatcttggtatgttgtgtgtttaggaatttatcaatttcctttaggttttctggtttgtttgtgtatagtatagttgttcataacagtgtctgataagcttttgtatttccatggtatcagttgtaatgtccttttttgattctgattttgtttatttgggtcttctcactttttttcgtggttaatctggctagcagtttatcaattttgttcttcttttcaaataatcaactttccattttcttgattctttgtattttttcagtaaaataatttcaacttttattttagattcaggggttacatgtgcaggtttgttacttggatacattttgtaatggtgatgtttggggtacagatgatcccatcacccaggtagttagcatagcagccaataggcagtttttcagcccacacttcctgcctccctactgcccccgccattgcttactagtcctcagtgtctattgttcccatctttatgtccctgtgtactcatatttagctcccacttataagtgagaacatgcagcagtacttgattttcttcctgtgttaatttgcttaggactatagcctccagctgcatccatgttgtcgcaaaggatatgatttcatcctttttatggctgcatagtattccctggtgtatgtataccacagtttctttatccagcccaccattgatgggcacctgsgttgattccatgtgtttgctatggtaaatagtgcttcaatgaacatatgagtgcatgtgtctttttttttttagaataatttattttcctatgggtatatacccagtaatgggattgctgggttaaatggtagttctgttttaagttctgtgaggaaactccaaactgctttccacagtggctgaactaatttacactcccaccaagagtgtataagcattcctttttctacacagccttgccagcatctgtttcttgttgacatttacataatagccattctgactggagtgagatggtatctcattgtggttttgatttgcatttgtatgtcttcctttgagaagtgtttgttcatatactttgcccatttttaagtgggattatttgttttttgcttgtttatttgtttacaatgtttacagattctgatattagacctttgtcagatgcatagtttgtgaatattttctctcattttgtgagttatctgtttactctgttgatagtttctttcgctgtgcagaacctctttaattaggtctcacttgtcaatttttgtttttatcacagttgcttttggagatttagccataaaatcttggccaaattctaagcatttcctaggttttcttctaggattcatacagcttgaggtcttatatttaaatcttttatccatcttgaataaatttttatatatgctgaaagataggggtccagtttcattctactgcatacggctaaccagttataccagcaccatttattgaatagggagcccttccttcattgcttgtttttgttgactttgtggaagatcagatggatgtaggtgttcagctttatttctgggttttctattctgttctataagtctatgtctgtgtatctgtttttgtaccaatactatgctgttttggttactatagccttgtagtataatttgaagttgggtaatgtgataactccaatttttttccttttactttagttttttcactgattctcctctgagagaagtggtgttcttttaactgtggtttaaatggaggatagtcaattggcttcatttctggttgctttcagagggccaaggctctgtacaggatctttatttgtggctagattcttgcccctggtttcacaagtgatgtatattggcagattatttttggtgttttaatttgggatgtgatccagtaaatggtgcttaagagtggtggccagcagataggctcttaatcagcttcacagctttttttgtatttcagtgcatttgcagtagtggtctatagtggggtagggggagacagatgaccctctcagcaggtctgttcctgagctttgaggaagccgcctctgatcactggcactgatcctgtctttttctttaattaggtcttccgggctgcagggctccctcaggcagaggctatgacctgcagataggccacrccattcttggactggtcctgtagagcagggttccccaatccctgttactgcttcatggcctgttcagaagtgggccacacagcaggaggtgagtggtgggtgagtgagcattattaccacctgagctcggtctcccgtcagatcagcagtggcattagactgtcatggaagcatgaaccctattgtggactgcatgtgggagggatctaggttgcatgctccttatgataatccaatgcttgatgatctgaggtagaacagtttcaacctgaaaccatcccctcctccccaacatacaccatccatggaaaaattgtcttccacaaaactggtccctgtgctaaaaaggttggggactgctgctgtagagggagagatgcccttctctggtgctggcttacaagcctctgtgtttcactcctctctgtcttctgagggtgtgggctccttccctgctctagcactggctacagatcttggctcaagattcccaagctgcatgctgcagccctgagctgttgggactggcccacagctccatcttttggctccctttggcacagcaccaactgtgctgggggattccaactgcttccagacctctgagaaagtactcaggctggccttttgataaagcacccatactgggcagtggaggctgcactgtactcatgttcctgttagagcagctgggcagaggccttggaaggggctggtgggcaggagtgcctgcagaacagacatgccccattcccactggaaagtcagccctgttctcttgacccagtggtcaactggggttagagttactcagaggaagaaggggagcgttgggggatgggcacctatggctgtattctgcttgcggctgtcatgtgtgccaaacctccattccatataggctggagtacttttactgcctactctccaggcagatccccttgccagtttaaatgtttatgggcgtcataggatctcttgtacctaggattggagatctgcagcaagagtgggttgccccactatcccttcactaacccctccctcaggaggctttcagggctgagcatgagccctagcattcagcaaccccacacaaggttcccagcttcttctcttttcagcctcagtgtcwgtgttgcttctctatctactcttggtgttttctgtctaagatttgctcaaagtttattagtttacttaatttttagtctcgttcagtgggagtggtgcttcctggctgtgtctagtcagccaccttatctgctatccctccaaaagctttaaccctttatgtttttttttagtagctactttatttacttctattctgatcttcattatttctttccttcyactatttttgggttttgtttcttattgcttttctaattccctgagatgcataattaggttgcttatttgaactctttctttctagatgtaggcattcattgctatgatcttctctgttggcagtgtttttagtatattccatagattttggtatgttgtgtttcagttctcatttatttgaataaactttttgatttctatgttaatttcttccttgagctagtggtcattcagaataatgctgttaaatttccttgtatttatacagtatcacaagttcctctttttattactatctaattttaatccattgtatctaagaaggtatttgatacacactgtctagttttattctgttgtatctaagaagatatttgacatgatttccattttaagaaatttgttgaggcttgttatgtgtcctaacatatggtctatcctggagaatgtttcatctgctgatgagaagaatgtatattctgtagctgctggatgaaatgttttgtaaatttctgttaggtctatttggtcagtagtgcagtctaaatccagtgtttctttttaaattttctgttgtgatgatctctgtaatgttgagagtgggctgctgaagtccccaagtattattgtattgtgctgtctttctccctttagtcataataatatttgctttatatatctgggtgctttgttgttgagtgtatatgtgtttagagttgtcatatcctttgctaatttgatccctttgtcattatataatacccctctttgtctatttttacttttttttgacttaaagtctattttatctgatataagcatggctattcctgcttgcttttggtttctgtttgcatggaatatatttttttcattctcttactttcaatatatatgtgtttttttcagatgaaaagaggttttatttttgtagggggcttattatagggtcatgtttttaaatcagttatcctagtttgtatcttttaattggaaaatttaatctttttacattcaatgttattattgatatgggagggcttattcctgtcattttgttaattgacttctggttgttttatatatcttttttcttttttttatttctctcttgtttgttgtggtttggtggtgttctgtagtggtaacatttgagtcctttctctttcttattcatgagtttgctctaccagtgggctttatacttttatgtgttttcctgttggtgtatatattatccctttgcttccaggtatagtactcccttaagtattgcttgtaggttcagcccattcatgataaatgtgctcagcttttgtttttctaggaaagacttcagttctccttcatttatgaaggatgattttgttgartatagtatccttggctgccagtctttttctatctacactttgaatatatcatcccattttctcagggcctgtatggtttctgctgagaaatccactgttgttttggtggggctcctttgtaagtgtctagatgcttttcttttgctgctttaagaattttcttgttgtctttgacttttgaccactttgctataatgtgccatggagaagaccttttaaagtcatatttgtttggggatctctgagcttcctgtatcagaatatgtaaatctgttactggactggggaagttttcagctattattttgttaagtaggttttctatccttttggttttctctgctttcttgaacaccaaaaattcaaatatttggttgctttatgatgcttcataagttacataaggttttttcattctctcttatcattttttccttatatttgtctgactgtgttatttcaaaagagctatctttaggtactgaaattctttcttctgcttgatctagtttattgttgaggctttcaaatgcatgttttatttcattcagtgaattgttctgttccaatatttttgtttattttatgatatccatttgttaaatttctttttcatattctagaatttttttccgatttctttgtatctgtgttctcttgtctttcactgatatatatatatatatatatatatatatwwtttttttttttttttttttttgcgakggagtctcaatctgttgcccaggctggagtgcagtggcatgatgttggttcactacagcctctgcatcctgggttcaagtgattctcatgtctcagcctcccgagtagctgaggattacaggcacccaccaccacacctggctgatttttgtatttttagtagagatggtgtttcaccatgttggatgggctggtctcaaactgctgacctcaagtgatctgcctgcttcagccttccaaagtgctgggattacaggtgtgaaccaccacacccagcttcactgagctttttaaatgtcattactttgaattctatttctggaatttaataaatttctttgtcattggaatctgttgctggtgaattgttttgcttcttccaagtttttgaatttgcttttatagacagtgactttttctcaaagatgtacctatgatattggttgggttggcatgttggcattgattcttggcacttgtagtattgtagtctctgtataattcctttggctataaacagtatcactggtctctgatttcctcagtgacttaggatatggttgttgttggagactgtggatcctggcagttgtagcagtgagctgggtgagtggctgggtccttggacccctgggtagttagtgtcacctgtgtgatggcagtagcagtagtagaacaaccctctggctccaaagcattctgcattgttgttggtggctgtattaggctgggtgagttggtccccygtgccacaggtgttgcatgcaggtggaagctagctgtggtagtagtagtacgttgggtgggctcatctttaggtctctgggagagtattcaggtgccaatggtggtagattggwcacagccattcttagtaccctggattgtatgcttaggcataggggtggagtctggcagggcgggcctatcctcaggcctcctggtggtgtatgcaagtggtaggcagtagtagagtgaaccaagccacctagtggaatgcccaggtggtggtggcagtggctgtgatgtggcccagctgcgggggagagtggggttgcttttactggcagcagtcrtagacaattggctggggagcatgcactttggctccaggtagtggctgcaggtggggtagcgtttcctcggggcacttgaaaatccatggtggctctgctgctgtgaataccagggttctgccagtggctcatggtttggcctcagcagtgcaatggaagttgctgtgagtgagggagtctgtatttagggctcgtgaaaatacacagcagtcccactgctgggagtattgtagttattgccagtggcttacattttggctctgacaacagcagttagcactcgtggtgtctgtgggtaggggacatcagagaggttgcaaggatgtggagacaggagctgttgatccccatggcaggatgcggtctagtagagtctgggatctcaggatagtgatgtgcaagttgcttaagacttgggggtgtgtggaacccagcatgaatttcctctttggagcaatgccatcatgtgatttccaagtagttcctctgtcagtcgcatggtcctaaagggttgaggcgctctcctatggctaggattgcaggagtccttgatagtaatgtggaccacttggggtgtttctcttgccctttacccacgctgaagagcctctccaggctcccagctgattctggctgagcaggctgccctgatttcctctccttccttgccttaggtgttccttgtcacttcttgttgaattcagtgttctctcttacatgatctattctaactatgattgtcaacttgttattttggttcttctttatggaggaggcaagtaccagatgcctacaggcattcttctgtgcctccgacttcatattttttttgatgctactcttattataaatggtctaccccagatccagacacacacaggtgtcttataatggtctacctaccccaggtccagacacacacagggtagacactgggcagatgtttctttgaagaacaagtaaatgaataaaatatgtaagtggaaagtattaatgtaataatgggtcatgtctgctcattttcaggattcttttctcagaattctacaaacatggaagtgggggtagagaaagcaaatggataatgtaatgcagggttgagaattggtgggaaaatgagtggttttgaacctcaggaaaaggctaggtagagaggtgagatagggatgtgggaaagagcaaagatcaataactaatcaaaaagcagtttttttttgtttttttctgacagacttgagccatacttctaattctgtgggagctggcacttttcagtttgtattagtccattcttacactgctataaagaaatacctgagactgggtaatttataaataaaagaggtataaatggctcatgattctctacaggatatacaggaagcatggctgcggaggcctcaggcaaattacaaacatggtggaaagcaaaggagaagcaggcatgtcttacatgagtggagcaggaggcagagggctgggggcagctacacactttttacacaaccaagtcaagtgagaactgtatcacgagaagagtaccaaagggggaaatccacctctgtgatccaatcactttccaccagaccccacttccaaaactggggattataatttgacatgagatttgggcagagacacaaatccaaaccatattattctgtccctggcccctcccaagtctcaggtactcacattccaaaattcagtcatccttctcaacagtcctcagagtcttaactcattccagcattaacttacaagtccacagtccaaaatctcatctgagacaaggcaagtcccttctgcctataagcctgtaaaataaaaaatgggttagttattacttccaacatacagtgagggtacaggcactgggtaaatacttcttttccaaaagggagaaattagccaaaagaaaggggctacaggccccatgtaagtttgaaacccagcaagggagtcattaaatcttaaagctccaaataatctcctttgattccacatctcacttccagggcacactggggcaaggggtgggctcctaaggttgggaagctgcacctctgaggctttgcaaagtaaagcccctgaggctgctttcatgggctagtgttcatgcacctgcggcttttacatgtgcatggtacaagctcctggttgatctaccattctgcagtctcgaagacaatggccctcttctcacagctccactaggtagtgccccagtggggctctgtgtgagggattcaaccccagatttcccttcagtactgccctagtagagattctccatgacggctctgctcctgcagcagggttctgcctagacatttaggcttttctacacatactctgaaatctaggcagaggctcccgaagccttaactcttgcactctgaacattggcaggctaaacacctcatagaaacaccaagttttatggcttgcacattctgaagcagcagcctgagctgtatctgaagtcctttcagccacccctggaggcagaggggtcaggatatggggagcagtgtcttgagcctgtgcagggaagtgggaccctggtccctgttcatgaaaccattcttccttcttagacctacatgcctgtgatggaaggaactgctgcaaaggtttctgaaatgctttgaaagtcttttcccctttgtcttggccatcagcatttgactattctttacttatgcaaatttctgtagctggcttgaactcctcctccaaaaaggccttttcttttctaccacatggccagscttcaaatttttcaaactcgtacactttgcttcccttttaaatataagtttcagtttcaggtcatttctttgctcacgcatatgaacataggttgttagaagcagcaggctatatcttgactgctttgctgcttagaaatttctcctgtcagtaacctaaaccatcactctcaagttcaaagttccacatacccctagatgcctccaggctctttgttaatgcataacaaaaatgacctttacactagttcccaagaagttcctcattttcatctgagaccttcttagctgggatttcattgtccatatcactatcaggattttcaaagcaaccgttcaacaagtctctaggaagttacaaattttcctcatcttcctgtctttttctcagccctccaaattggtccaacctctacctgttacccagttccaaaygcaaattcacattttcaggtatctttataccaatgcccctgtccttgttaccaattttccatattagttcattcttgcactgctataaagaaatacctgagactgagtgatttataaggaaaagaggtttaattgactcacaattctacaggtgtacaggaagcatggctagggaggcctcaggaaacttacaagcatggtggaaggcaaaggggaagcaggcatgtctacatggccagagccaggaggaagagagagaggtgggaagtgccacagactttttaaataaccagatctagtgagagctctatcatgaaaacaataccaaagggggaaatccacccccatgatccagtcacctcccaccaggtcccacctccaacactggggaatcacaacttggcatgagatttgggcagggatgcaaatccaaattatatcacagttctttctggaacgttgctcatgtagcttcctacatatgtgcaactatcctcctctttttctcctcatacctgcctaccccctytgttcatattcccctctcaaaatctctttctgtttttcttttcttagtgactttcaagatgtccttttaactaggaatagaacctgtcagatatgctaacataactgtatctgctttcaaattgtgtgacctcttgttgatggtgagcaacatattttcaacttctgtgagtgacagtagagtaaaattctgatgagctgaagtcagactacgcatttttggaaagcagctaaacctctttgagcctccaggaagacgtcctctctctatcaaatgcggacttttagaaataatactctctcagccacgtatgccacccagtattattatcacgtgccattactgtttggtagttatttatgttcatgtcatcttggctagattgtgaacttttaaaaggcaagccttctgccttttacctttatattcccatgcatgctttgtatgcttaagtggttagccacttaatatattttaaaagagataatgtatccatgttattgagttaaaataatccatggaaggcatctattacaatgattggcatatagtagatatttagtcagttatattagagcactcagtcaatatggggaattttgcttcatttcctcctctttaattgattctcccatttcacatacattgtccttcggctgattttaggagcctatttatttatctgcctatttttcattttgaagtattttttttgactttcaaagaagacacaagaatagcataaggaaatcccacattccatggatgtatgcttagtatattgtatcaaggaggcacaaaacatccctttactggtggtgttaattttgatcatttgattaaggtggcatctgtcagatctttctaccataaagatgctatatttcatgctgttaatagagaaaaaccctaggctgggtaattataaaggaaagaggtttaattgactcacagttccatatggcgggggaagcctcacaatcatggcagaaagcaaatgaggagcaaagtcacatcttacatggcagcgggcaaagagagcatgtgcaggggaactcccctttgtaaaaccagcggatcccatgagacttattcactatcatgacaaaagcacaagaaagatccaccccccatgattcagttacctaccatcaggtccctcccacaacgtgtgagaattatgggagctacaattcaagatgagatttgagtggggacacagccaaaccatatcagatacttttttttttttttgagacggaatcttgctctgtcgcccaggctggggtgcagtggcacgatctcagctcactgcaacctctacctcccgggttcaagcgattcttctgcctcagcctcctgagtagctgggactacaggctcccaccaccacacccagataatttttgtgtttttagtagagacagggtttcaccatattggccaggcttgtctcgaactcctgaacttgtgatccgcctgccttggcctcccaaagtgctgagattagaggtgtgagctgctgcgcctggcccagatactatgtttttccattgtagttcataagtgtctggtggggaaatactgtaaatatcttgcttctcatcacatttttactaagtttagcccagtttagccagtttattaagtttaacagtccattgatgattgtttcctgaaacaaattatcatacagtttaccatgtagtgacttttctattcacatcattccttctatatctattagttagcattttaccataataaagagtttttctttcctcttcatttagctttgtattcatttgttaacttacattagtatagactcatggaatcttattttgttaaattgattatgcatcaaaatcatcattttgtttatttgtttttttttcttaaattgtgcagatggtaaaattggatgggtggcagagatggctttgagtactcttgtttcagtttgggggtgtgccaaacagcaggcccagaggataagcattcatgtggtttacaccagtttaacaaggaccaacatgaaagagaaaatagttgtagattactctgaaatatattgtttcctctgtgtttcaggaaataaaaagggtcagttggaggtagtttagtcactaaggccactgcaacttcctctcttaactcttagcagctggagatgttttgctgtagacacacagtttgaacataaaaggtaaaggagagtcagtatcgctgtgttggcacaagatggcagcagtcatccattgattttgcagctcaaggcctacagattttaaattaatggtgtcttttgtcttcgcagggacttcagtactagtgctaataacatccagattgataaaaccaagcctttgtggcacaactatttcttatgtggacttaaaggaattcaggtaaattggtttataaggcacttactaccagttgagattatcatgtgtattctgtcagatttattttatttactacatctttttcatctccttacagtactaaccgatgcttctgttctattttgctagtttgtgtttcagagagtggggaagatatgactgttttggggtggtgttcacagggggcagtagtggtttttatacagctggctgttcataaataggtgcatctgacaaacatctgtctggttttaaaatctttgtttaaacatacttttgaggatatgttttaatactattatttacatttatacttgggatgtataggggtatactgtaataggatttagagtcagcccaggtttgaatctgggctcttctcagctgtggtaatttaacctcttaagtctcagatttatccataaaatgatgtcattgctatcctgacaaagagttgttaaaagaattacataaagcttgatggtagccatttaataaatggtagctagtattgttattgctacttcagatgggattaaaaaaagatataatgaaatgtattartataagtattttccaagaaacattgaataattactttgaaaatctctaatgttacatacaagaacaagaaaataaaatgttttcactctcataattgaaaaagtatcaaggaccaaaagaaaattgatatttgctgtttttagagccacttttatattgcaataattattttagatgtagtgacttgcatagaatcatagtaggacaataagaagtaaattttgcctttgtgagctaaaagtaaacaaacaaactgacccatgttttagagagcttgtgttccttactgcctggcagtcctatctgaaactttgtaatgagcagctaggacttagtggcacatccattacagaaatacatcaaatttatttctaatgtgtagtcctatactgtaacagtggtggtttttgttcttaaagttaatgaattcatttctttctttcttttgtgttttcctttctctcagacacatggtaataacttacaggaaaagttattggcaggttttaaatcttcaaatcatctggcttatcatatgcattagtgggaattacagtatttggaagcatttgcctggcaaatgcaattttaatcttccttgtaacaacatgcctttttgcagcatatgggtaaagtggcctaaataatgcatgttgctttgtgttatttttgagcatttcaggttttaaagccttcctgtttggtttgacaatttatgtgcaaaagcaaacttatacaatgaacttttggcagaaaggtaatttaaatgctagcctgttcagaaactttcaaattcaaatactagaaagtttcagagaataattcacttatattacattgaacatgttatccttttggcatagagctattacagaatgtggcatatacccatttgcattttgaatttgttatacattttcatttaaacattgcataatacgttgttttttgtttttgtttttttgtttttgtttttgtttttgttttttgagacggagtcttgctctgtcgcccaggctggagtgtagtggcgtgatctcggctcactgcaacctctgcccccggggttcaagcgattctcctgcctcaccctccttagtagctgggattacaggtgcctgccaccgcgcctggctaatttttgtatttttagtagagacggggtttcactatattggccaggctggtcttgaactcctgacttcgtgacccacccgcctcggcctcccaaagtgctgggattgcaggtgtgagccactgcgcccggctgataagttcttaagtgtgattcccactcaagacacctgtgtttgatcagtttatattaaatatattgtattcttcaatttttttttttaaacaagctgtctgatattctgtatgaaagggcattggcaacagtagagtttcagtttatagtttgtttgtatatctggaaggaaatttttagatgacttgaaatcaggaagagaagtacacccagctaaatttcttcttattgtggtgcgagaattttgctagctaggacagacagacaaaaaattaaggaaaaaggtcttttatttgcagaattttgttgttattttagttattctagctagctgattgaaattctcccwtgtataataggtatgatgaaatgcataattaggtaatagtatttcatatgttaatcttcagtcatttgagtaatttgcaaagactatggtactttttcttgagaaggaggtagacttgaatttatttgtaaacttaaaccacaaaggttatgatatgatatcatccaaagtgtcctagtgttagaaagtaatgtaagtatactagagctttccatatttaaatcagaatctgattatttctttgggctttcctatttgtagaaatagagtttcctcaacttgtttagggtctgtattctcatttgtggctgaattctaatttgactatctttaaagctaccatatggctaaactgtatctataaactgtagtaagcatctggattttctcatgtagctggcatattaaatcacaatgacggtttgctggctcaggtttctaactgcagtggaaaagttttcaaacaggattcagagacctgggccctactctcgtctccctatgtgtcatcttgggaaagtttcttcatctcttggtgcctaggttttttcataagtaaaacagaactgagaatgtttggaactcctttttttcagagaaccttctaaagtaaggcactccttagaaacaagtcactgcttgggggctggacttttataataacagaatgctggagttgtgctgcatggagatttaaattacctcacagataattgtatatttcttgtcctgctacttgacaaattggattataattgttttatattttttccatatttgttcaaatcaattaatactcaagaaaaagaacattcaaggcaattttatattttttccatattcaaatcaattaatattcaagaaaaagaayattcaaggcaagaaaattaaaggcatttaagggaattactctgtggctaagagtcattaaataaaatgtcacatatagtctcaactaaattgaattgcataagtagtttctataactattataagtctattgatagacttttgttctctggggaatgaaagaagctttcactactccttgaattcaatactgaattactgttgctgtttttccttatattcttaggaacactttggtcttagtaacctgactggaatgaactgcctggtagatggaaatatcccaccaagttctggcctctccagctccagtgctttggtctgttgtgctggcttggtgacgctcacagtgctgggaaggaatctatccaaggtaactacctttgataggaaacctcatagaaccctctcctaataatcattagcatccaaatctcaaatcagaatgccttccttgattgaaaaactgtcttctctaaaaggactgcacatgtgggcaagcattgtaacttaacaagtgataaatcactataaagtagcttataccctccaaacagtgagtgaatagatctgtgaataactgtataaaaatacattgtattaaatatgggatttgaatgtatggatatcattttagatcacctcattcacaagttaaatttagggcaagaaattcttcctctcatggttgagcctgcttattttcacccaaaaccttaaattaaaaatttgacaagtagtgggttacaagggtaaagactaggtaataaaggaactgaatatgccagcagattagtcacagaaataaactttaaaatattgcattacaagacgaaatgcttatttaaaggaaatataaattgtacaagaggtcagaaagcctcaagtttataagttcacataaatctctgactctgcagtttagagcaggtgtgctcagctttaattaatgctttagcattctggttcaaataaaatgttatcataggttctttttaccccatgtacatatactaccaggtttacggatggtttggacagatcaagagaaaggcagccacatgcttagtctcttttaagcatgtttaaactttcagtttgaaaattttatgtataggaggaaggcagaaatgaaggagaaagcaaaggttcagacagaatccttctttttagctgtcctgtgtaagtgtacattaattagcccttagtgagcaatgactggttgggagggaaagggggcttacatattattattattttttgagaagagaagaagcaagggacaggaagtccatgtgtaaaatgtgtttcccctggtacaattttcaatctgatttgtttatttattcatttgtttgttcatcattcaaccattatttatttaatggctattttgtgccagataatgttcaaggcattggagatataataagtatagtctcaactttcactatgcttatagtctaaaagggaaaagagacaagtaaataggcaactgcaatagaatatagtaagtggataagtagttttctatgggagcagatataacccagatttagagagcataggacatctaaatggagacaacaaagattaaaggagttgtagatattgatggcatgataacactgatgacatcagataagcatgtattgggtggagagaacatcatgtggaaatgtccagagtaaaagcaatcatggcttgttggagtaacaaaaaaaatgtctcaatatggttgaagcatacagcaatttggataacagagcaggagatcagttgctgggccttgtaaactttgttaaggaatttaggtatcatcttcatagcagtgggaaaccattgcagggttttaggaagagggtaaggtgatcatatctgtattttagaaagatctccctggctatattacaaagtctgcatttcagggttttagyagtagggaggtgatttggtttagagtagtggcaatgagaatggttagaattagatagattcaagatctcagaatcagtaggacttggtcattgattgggcatgggaatggggaacagcaaagactcaaagattatatcggtgtctggctggtatgattcattggaataagagatatgggggaaaaataggtttgagtggaagctgaaatgttgagtgtgaggaatctgtgggcatactgatggagttatttagtatttagttatgaaaaaaatatgaaggtcaggaggagatctggacttgagatggtacatttgagaatcattagtttatcattgtttttgaagccataggagtggatcaagatacctggtgttggaatataggtggaaagataaggaaaactaggacagagccccaagaaacatgaacatttgaggaatgggcataggaagggatgtccactgaagggattgaggagtagtccagtaagtatgagaaaaaccagaaaggtgaggcaacagcaaagacaaggaagataatgtttcatgaaaggagtggtagtgttgtcatatgcttctgagaggttaccacaagttctgagaagtatccattgaatatcacaacaaagaagttgtacaaaactttgacaagagcagttttagatggaaatgggttgaagggtctataaggggtaagaaagtggtaaagttcagtggatacaaaaagtctggtgatgcatagaaaaagataatttggtatttggaggagggtgtgaagtcaaggaattcatttcacttttaatgggaggattggtgaaacttagtttttctatttttctggtgttttgataatatacctatctaagaaataggaaggaaagaagataaagagaaacacttgaacccttagaattaattctgattgtctgttttcaaagtcggaaatagcaaatacatttttttatcggaactatcttactgcagtgcctaagcaaaaagggaacaatatgtatatcctggctttctcagctagtctaagttgtactaacaatatttacattttctaaggactgagcataattatttggagagtttttttttttctggagtgagacagaatcttgaatgaaaggaagtctgtaatttgttcagtctttaatttaaatgccatgtgattttactcttgtaaaaatcacagaatataagaattcaagggactttagagatgagctagttcaaaatgctccttttactgatgtattagtgttaccataggaaacaaatgacatgttaggtataactgaagagagtttaataaagagacttttacagagatgtgggtaaggtcaagggaactaactaggaagggttctcttgtgaagctggaagccattgtactttaggagctgtggatatagagtaatgttgccagaaatgcagcaaggcagagaaagaatgacacaggtgaaaatggcaatgagtgggaatagttgaggggaatttaccatagaggtcagccttttggggtaggggaagtgtgagaatagaggaacagagggacaaccgaaaataactagcctgtttgataaggacactaagtcccacaacagattggtgactaaagcctttcctattatttcatatccagtaaaccccattcagttgcagacaacaattactgcagatgggatataataagtagatgtggaacttgttaattcattaatatactaaatgttgcrtatctgaaaccagaaaacaatatggctaatcacccagagaatctggaagccagaaattatgaatcagaatgttactggtacaagagagtatgatgtggcaaaagatctatgaaaaaggaaaatctagagacttctgatttcagcatgtcagaataagacttacctactctttttctgtgtccctaaattaatcttcttttctcaaaaatcatttccaaacaacagggaaaataagaaaaggaagcacaagctttatctttggtaagccaaggagacataaataaccataaaccacaaaatacaaagatggaaagtggatagaggaatgttacatgacttaggcgaatggagaaaggtcagagccaagtgcctgcggagggagttgcagatggaaaggcagctgactcatcccacagctctctggcaaggcttaggaagaaagcagggtaatatggtgggtggggatttatctgaaagcctttgtgaggactatttagaccctaaaaggcctctcttcacctggaccatttccccctatctttgcaggagtctctggagaaacaaccagagatcatttgtacttggggacactgagcactgagaaaggcaggacgagaaagacttgaaaactgggagattagaggacattctgcatctgaaaaatgaaattcttagctccattcttctggtcattactggcacactggcaacctcaccaccctacactccagcaggaatgttggaggatccttctcaaaggaaacttaaccatcccagagatggttcatacagatactgacatttggtgacccccttctccagctcctctatgaccttgttagaagcccatttacaaagcttctaataagctttttagtgactcactcttaaatatgatagggcatcaaagtatagtaagattttggaagaaaacctacaaaatgaaccaaacaaacaaaaaaaacagagaaaacaggaaactagaggaaacagagacaatgctgagagcagaagaatcaaagacatgatgtcctcagagagataaaagaaaatgttaagtccttgaaaaataatagtgttacttttttaaaaaaggaaccaacggtaagatagagcttttgcatattaaaaatatgacaagacaaaatttagcaaaaagattggaaacagctgggcatggtggctcatgcctgcaatctcagcagtttgggaggctaaggcaggaggatcgcttgaggccaggagttcaagaccagcctgggcaacacagtgagaccttgtctcaaaaaaagagaacagactggaagaactctctgatatagtagggaataaaagagctggacaataagagagaaaaacaggaaaatttatggatcaattccagaaatccatccaactagtaaggaaaaacagaaaaaacagttattagaaattattattattattaaaaatagagttggggcctctctatgttgcccaggctggtctcaaactcctgacctcaagtgatcctccctcatcagcctctcaaagctctgggattataggtgtgagccactgtgtctgtccagaagattttttttttaaaataatatttctccaaagtgaaaatgtgaatttggattggaagggctcactgggtgtttggtataataaatgtaaaaggccaaaccaaagaatatcatctggaaattttgaaacttgagtgttatagaaaagacactaaaagctagttgacagagcaagagaaaagaacggaaagaaatcataatcaaaggatcagaaatgtaaattaatttctcaaaaacagtattggaagataaaggcagttgataaatgtctctaaaatattaataaattttagtttaggctatctgtttaaatgaattaatcaaatgtgagggtatagtaaaacattttcaacatgtaaagtgtaaaagtctagaggatgtaatccaccaaaactagggagtaaaccaagaaagaagatcgcatgggaactaggaaatgagaaatccaatatatgagagaggagttgggtatttatagaacattggtatttgtagaacataaggggaattccaacataacacccataatatccagcagcttagaaagcagtgcagattaaaatgaggagagggaaagatggaacttataatcttatcagtaaaacaaaaaaaaagccaaaaaaactggttaatctgatatgttcaaccatgtggaaaatggattcagagtaatttcacagagctgttgtaggatatgacaaagctcagctagatatacaaatctaagcaaatgaagaaatggggcaattattaaatataggaaaaacaaaaaagtttgtaacagaaatgaaatcaaccatttttttttgctcataagtgaacaataatctcagtaattaacacaacaaatatgaatttaagcaaaattttgggcataactttattgagaaaggtggaggagggtaaaggaaaggtggatgtaagagagctaaaatcctcacttatcataataggaaagcaataaataatgtttaaaatgaaacaacaggcaataacatttaccaatgttatttggaattggaagcaaaagcaaagagccaaaagtatttgccgttgtacacattgcattggggatagggatgacagagtgagctaggggctgcctttgttgttgttataagccttttacctctatttaatcttttagattatatgcaaatatcactttggcgaaagtaaaataaaagatagaagaactgaatagaatgaaaaataagaatggaaatagaatgaaaagtaagatgacctgtatgaccacacctgggggaacctgaaagatgaagagatgagaagggattcaatgagtcaaggctagagattgagaacagatgagctgttggaatgtgaccaaatcaatggcctagggtgaggtctgttgatgggttttgggtggaagaatccaagaaaatacaggcatcttccatttagtggcagtagtccattccaacaaatcagatgttctgcacaaaattattcagcgagggcctatttttttaaaataggaaaaagtataatgcattattcctcaactcaaaacctctaactaatttcctacaatgttacaaaaatacagtaaagctttctttatataagtcacacagaagtagcatgaaaaatgtttaaaccaattttcttgaacattaaacaattaatatggttgttaacaagcagttactttatatagtgataccggtatgtcttctgtattgacacctggtgtttcagtactctgcatactattttgttaacaatgttgtgtttaggttttagggtgtaaatatgtatgttttcctatataaacacctttcagaaagtgttgttttgagagatatgaacattctatgaagtttgggtatcaaaaatctttcgccaagaaaatgttagttgctgaggtgttctacaagatatgcctgtattttgtaagaatgggatttgggttgctctgatgtccagtttctgtctgttcttggagttgtccttggaggccaagaagaaaggaccaagtgcctcttaggaatcttagaatagaaatagctggcctacttgggaaacaggttgcaactctaaaagctagtcttgggtagtaaggtgtgttagactagcatctatccacaaattcctccctctgctggtgtggggttgggagtagattttgaattcatgaggttgtagactgagcaggtgatattcagaaaacccactttggaggatctgggaggtacagtagagaagtatagggttgagctgcatcccccatactgaagtctaaggaagagaaaacccatattatcttggttgatgaagactgaaagagccagctgggaatagtggggtaggggagaattcttgtatgtggatatctctggcattttgtcaaaaacacaatttacatgattctgagttacccagaatatgaattggacataaaaccttcctttgagagttatagttcactggggaacctggggaatctcttagatggcatcaagaatcctgtattgggaagcccagaataacatgtataatactggatttgtgaggagtgctttcaagagaagaagacagataaacttcctaacctaccacttgaaagcagtgattcggtggcatttgttgaatacctactatatgccatgcgttgttctaggcactggaaatacaactgtgaataaaaccagtgaagtgcccctgcttttatggagtttccatattggcagaagtgatggtatgagaaagataatgaagagctatacaaataaatatataatatcagctaggccgtagttaagggaaattgtatattttatctagggagttaggagaagttctctccgagaagaggacatttgaacagagaccttagggagtgagcagctgagaaagagtgtcagagggaacagcaagtgcaaaagccctaaggtgaaagagagtttgtcatgtctcaggaataagaggtccctgtggttggggtgtggtgagacagaagcggggagaggtgggaggtgagttgagagagttggtcaagggccatggtgtgtagcatcttctttggctttcattctaagcgtaatggaaaacctttggagggctgtgagctggggatggcaagatgtgatttacatggattaagttcttttacctgggagtattataccatacccctgacagtggcaagagaggaaacaataagaaagaaaagagaagagaaaaaagaaaagaaggaaggaagacaaatggtcaatgcccttatggaacttaaatgcatatagtggaatagtaacagaagatttattaactgaccatctatctcatacaaagtgtaaggtattttatatgtaaatgaataaagaggttgaaataatgtctccttggtgaagttaaacagggacagtttcaagtaattggtgagttctaagaaaatgttaaaggaaggaaaggctgggaaacaaagcactgggaggggcccaagggcatttcaggcagagtgaacccataagtgtattttaacagttctctgagccagacttaaaatatgtgtcagccaaggcctagaaattctcttgcagcctcatgaaattccttttaaaactttttgactacagggatgctttctagttgcttaagtccctgaacagatttacttaacttcatttcaggggcaaattagttatatagacaggggttgatactcttttcaggggagtgtttttgaagtttgaaacctgttctgtactggagacctctaaggttcataaacagagtaagtggaatgttcaaagttctgtgccaaatatgtccacattttcacttttctgagtttacaagtgctgtttccttgagaaagtacaaggctgtatttttcttcacatatagctgcatttcagtgaaatatttcttggccttcagaataagaccttgtgcctaaagaataaagacatgtctatgttataaaatgaaaaggatctcaaaattatataaactatgatttgaatgttttaatagtttgttacatggtataagaaaaatcagaaaccaatttgcactgtcactaattattatgcttagaagtccacataaggacattgtttcagtttgcttagaataacaaaacctcatccatataatggttaaggaaaatagtagtttaaaccattccagccagatgttgagtgctaatgaactgcagcagtatggcctctgaaaagatggtaaatccagaatacaagctttgaaaagaatctcttaattaggtgttgaacatggactgaagccatgtgctcactggtacaaaaaccaggaagctatagtgttagctctgggtggcctgtgtttaaatgtgttctaagttttaggttaataatgtaaatacaaaaccattcacgtagttttgtcaattaaaagagatcctctggttgtatccttttttaggagtaggattggagactgaatcatttctttaatgattttgagtagtttggattcacttgggtgatgtgacactaagctatttgtctttgcagacgttgtttgggtcacttctgggttttttttccgttttctttcctaggctaaatacttgtttacctttagcgtaaacgaaggcaaacaagcataattagggaacagcagatttgaggagtgtgtgtcactgtttgcaagtggtttcaaatgaaaccactgttgctacaaattaatatgtatgcctagttgtgttttgaacttttgttgtgatccttaaatcgttattactcagtgactgtgtttcaaggcctccagattttgacttgcaccctacaataagttaagtgttacacagtattcaaataattaactggaayaatgcaagtgatattaagtactacacatatgtgcatagcctttacctactacatcagttgtgtgcattgaacataacttaaagatgaaaatacaaggatagataacccccctaccaaattcagaagtgtttctcatttattttcatgcatttctgtttcacagaggttatggtagccatcttggtcaagagttacctatgctgactcccagactaatatttgatagagtaaggaagacaatgaaagactgacttaactttgtcccctctgtggccaatttgctctgtaacttgtgataacttccctatgcctcagtttctgtttctaaaataagggtgagaatagttcttcctttaacttcacaaggatgactcagttaaactggcttaatacctacagttctctgaccttcctgataggagattttgatgaagttcagggaaagagtttagcaagaaaataggtaaggtaggaaaataaattagtagtcagggaagtttttgtaattgtatgaagttttgttgactgtattggtggtataaaaagtaaagtagaggttccttttcaaagagactctcctccctgtctaattaggaataaatagtacttctcttagaagcaaaatttattcaaagagctgtgctaacattcttaaatatctgctagctctaataaagaaatcaatgtactttatgttcttagctcccacaatttagcctaaatatttgccctggcatgcttatactggtccaagcgggcattaggttatagcctgttcctcttccttatttggaggtgtttttacctttctcagcattccacaagttacttcctccttcctttgttctcgtctgccygtgcctcttttaaaaagttctaagttgctagccaattgggacaaatacagaatgtgaggtcccgtactagccaatggaaaccggacatagcagtagggtggacgcgtcaggttataaatgactytgtctcctttgtttggtgtactctkgtggtaaaactgctggcgagtgtaccctttctgcagaaagtaaaaatggccttgctgaggaaattaaatttatgttcaagtgctatttctttatggcaccggggaacaagcatttctaacagtggtcatgggaagagtaaggagccaaatcatattgtgtggagaagaaagtgattcaaagagaaaaggttaataaatgagactggttaaagcatgcactgcagtattggagacacaaagatttggaggttattactgcaaaatatgactttaaagttttatgttagaattttcatgagagtaaaagatgtctttttaaaaaaattactgttaagcacctagatgttttatgcacatcaactctaactttgtggtagtcttgtaaataagttttactactatttcaattttgcagaggaaaatatgaggctcagagaatttatataatgtcaccaaagacaaatcacatgtaactggagttgtctggattccagctcacatatttttgatccaaaatggatacttttctattcagccatgctgctacctatggtataatgtaattataccatattgtctgatataatcagtatcatagacatcggaaaaccctggagatgaggtccagccctaacattctgtgatccttctgatgtcctaaaagacagggaagtaaattatacattttcatgtatataattaatgtgaattggattttttaaataagttgacagattttatactctttgtcaaagttataatgatatttttttgaaatcctactatatccaaagcaaacggttggattctcaggatataggaaaacttagatacagtctttgggccttagaagtttataatttcagtagggagattagattaacataaaaatggaaatgtcatgcaaaagtagcatatacaaattcttccaaagaatacgaaaacaaagaacacttcccaacttgtattatgaggccagtaaaacctttctgccaaaccaaatgtgatagcttgataccaaacctgacaaggacatcacaagaaaagagaattacaggtcaatctctctcatgacattggatacaaaaaattctgaacaaaatgttcacaaatttaatctggtaatattataggctaatacattgtggccaagatgagtttattctaagaatttaaggttggtttatcatttaaaaatcagtgttatttaccatattaacagtaaaacatgtcatcttgatatataaaggaaagagtttgataagatttatcatgcattcatgataaaaactcttagcaaattagtagaattcagtataatgactgcctttgggaattagggaagagaaatgattaggtagagacatgaagagaccttctagagtgctggcagaggttcattactttttcttttattgtggcaagaccacttaacatgagatctaccctcttaacaaaattttaaatgtataatacattatcattgactataggtgcaatgttgtagagcagatctctagagcttgtccagcttgtttgactgaagctttatgccagttgattagtaactccccatccacctcaccctgcaccagcaacyatcattccactctgattctaagtgcttcatttcttaaccttgatggtggttacgaggatgtttcctttgtgacaaattattaagctttatttttatgctttatatacttttctctatgttctgtacttcctaaacataaaaaatagcaagactttcttcaaccctaggatcaaccactgttaaaagatttttaatgaatccttccagaaatactctatccaatgtaatatatacatatgtttgccctttttgtaaaacacccaggaaaattttatatataaatatatgtatatattggcccggtgcggtgcctcatgcctgtaatcccagcactttgggaggcaaaggcgggtggatcacttgaggtcaggagtttgagaccaccctggccaacatggtgaaactctgtctctcctaaaaatacaaaaaattagctgggtatgatggtgagcacctgtaatcccagctatcaggaggctgaggcaggaggattgcttgaacccgggaggcagaggttgcagtgaggcgagatcgcaccattgcactccagtctgggtgacagagtaagacttcgtctcaaaaaaaaaattatacacacacacacatacacacacatctttccccttgctttgctttttcacttaaaaccataaattgggaatcattccatgtcagcacatctacatatactgaattctctttaatggctgccttgttttctaatatacggtcatactataatgcccaattatagattttggtgtgatggtaatgttctaaaattggcctgactattggacatttcagttgtttccagggttttgtataatatcagttttaatacttaataatatttctttataaggatatgctatactttatttaactagacctctatgatggaaatgtaggttgttttcaagtttccactattataaagaaggctctgatgaatattcttgtagacaattattttcatacttattcacttttttatttaacataaatcccagaacataaagttactgggttaaaagatatgataactttacttttgaaatacactgcccaatccggaaagattttaccagcaatgcagcaacattgcatgagaggatctattttcctactactgaagttctatcaatcttttaaatctttcctaatctgaaagatgttgtcatggccatttctttaattattagatagtttaattagatagtttaaatgtttaatcttttccatgtcttttattgatcacttgcattttttgatttggctgtatatcaactcagctcattttctcctggagtatttatcaatcatcttattactttataagaactcttcatatgctaaccattcatctattatatgttgcaaatatttatccctgctcaaactaattttctgtttgacttcttttaaactaacaattgtgaagcaaaagtcactttagtcatatttaatcacatatagcataggatcattatatgtgcattcaattttatcttccttgagttgaaaatactctataatctctcatttcattttgaagtacttggacacagggagcctcatagactcagggattttacttagcatctctcaggagatctccactaaatggatcccagggttctcttgtctactacaggtgtgaccttttatctttagacgcttactcagaggaaccaaaactgtgactgatttgcattgtaagcaggaatattttttctttctttctttttttttgtggtgaaagcaagtttattaagcaactaaaggaataaaagaatcactacttcataggcagagcagccagcaggaatattttttccaatagcatttgtgcagtaagacatacacttttgaatcatgaataatgtaacttaccatctgtttagcacttggaaagtttcaaagaactgtaccatgatccatatgataggccatttaactctgttaagtaaggtacaactgccaacttcttagaccagagccctgcctctcagagacttcctggagcctagctataggagtgtttacttaggactctagactttatgttatatcaaagagatatggaagatttcacttttatagtatattaacattgtccccatttcatctttggaccttaaaacaccaagcatcatcatcatcatcatcatcaacaacaactacacaaaactgttgaggggcacagtcattgggtggataggcttaggttcattcagcccttctggatcttgggtcagccactggtattgacaatagggatgaattttcaatcttgaaggacatataaatttgttaagaataaaagaagtgcagttagtctggcaaattgtaaataaccttaaaacttttctccctaaagagagatgattgtatcactttcttatgagcatctttacagtgcctgacataaaggaggcaagtaattggattgggttgaattagtgaactaccttcatctgtaaagcagccattttcccctagtgttagtactatatttggatgaattaacaactggttgttaattttgactgtatttatataaattaaagtgaagcaagaccctgtggaatttatttgtgaccatcaaagaccataaatctcttacattttaagtaagttacagagaaagtaaaattggtgatgagtcctgtggttacaaaggcattcagagattatctgattatttcttcttctgataaaattatgttattgctttgtaaaatataagcaaaaatctaagcaatcaggactctttatgctgtcaagaccttttcattgtaatgaaagtgctcctttttatttttataatttaatttgtatttatatttattttcatgacaaaatattttaattctcatcaggttttataaatagttcttcaaatgtcactatggtttaaatttggtgataaagcagagaatttggataaaagaaaatttggtgataaaggaagaaatttattggaaaaatttaaaagatgtagattttttagggatagttcacagaaacctatgtgttaatgcagggtgcttttatatttagaagttttcattgattttcttcaattatttgggataatattgttacctattgacagcgatgttacatctctcacacacacatgattagatgtattgttaatgtaccacttaaaatttttttccaacttttaattatgagaaaatttcaaaaggatagaagaggcaagaataggcaatgaacatgtatgtctttcacatagatccttggaaacattttgccacatttgctttatctttctctctacttttttttctgagccatttgggaattaattgcggacatcacctctgagtacatcaatattcatcccctcaaagcaaggcattctttaatatgccacactatatcattggaacatttaacattgatataatattattatctaatatgcagttcatattcaaatttcccaattgtctcaatagtaatgtcctttagaacttctttttcttgttctttttctttctttcttttaattttttctgattgagaatttacttattcaagataattgaatacattctggatctgaaaaattaaaaagaaaggaattaaatactactcataataatactcagttttaccaataattggatttaattaatatcatcattgcatttagtttttttttcatttttttagtttactttattttagaacagttccccagcatttttttgtcttttatgacactgacaattttgaagcgtccaggccaaatttttttgttcaaatttcctgaatttggatttgtcagacggttgccttattattagattgagactaaggttttttgccccaagaatactgtataggtgatggatgtccttcttggtgaattgcatcacatggtttctgtttctccaattgtacttaacattatttaatacacagagataggtagagatctgctgtctatcaaaataatgccatagtttaggtatgtcatatgaattcccytttataaaggtggagtttttgttaataaaagttctttaaaagtgtattaaaagtgatgatagagactataacatagtcttctattacatgttttaattaataatgcatgtttgtcaaatgagtgaaaaatagcaatgacttaaaaatcacaaattctcaattttgtcaaggaatttcaattcattattgcactgctatttaagtctgttcatgttcttcattgttttgtttaggaaacaaaatgtactaagcttggaataaactgtttgagatgtctaacataaaaataaccaaagcagatgtaattttatactgccactgtgtatatagggttacattatttcacttgcagtcacttagggtttgtatatatcacatttcagtataatgacatgggcaggctccaaagaaaataccaagcaacgcgaatttggtttgactaacaaatatttacatgtctttgtgtctgtaattattgtaatcttttaaggggtttatgctacacaggcttaattctctagagctctgtgttagattaaaagaggctgatcagtagtatatataactgtaaaaatgatactgtagcccgtctagataaattggtataagccagagcttctgcagggaacaggtggacttaagagagccctgacatgggcagatagctgcctttcatgtgcatgctttcttatgtgttttagccttttctttctttccagatgggtggtgttgatggaaccatcatttgattgttatttgatcttttcaggtttctctagtcatgtagttagcacattggaagcaagaaaagataaacagtacagtcctttcctcatctataggaggcagacagatagttgtattgctggtactgaaccattcacgtatatttgcttactcagtaccatccgtgtcaatttgcaagctttagccagatgtarttggttaaatagattctcccctgttgcccccttgattaaagctccttggcctgtaagatgtcaatatcctattaacttttaacttcactatagcgcttcttagtttgtattgtaaagatgtttccctctagaccatcatggggttttcaagcatagagactatttattttttaaatgtttggatccccatagactcaaatcacaactgatttagatcaggcagtatggtgcctaactgaattaattaaaaaaatgtaatctcatttgcaacataatttcctggtgatgacataaataattatttgagttttaacttgagattctatcaattttacaatttggtttaatccagaggatttattcatttatccacattgactgaggagttattatgttccaggcagggttgatccactggtctctctcctgcctctcttatggctgatgtctattctgagttgttggtgtctctgccacactggctggtgactgtcattattagttttaggcatttgtgctagttgctgggttccgcctagttgctaataggctttgtctgttatatacagacataaatcccataaatttaagcatgtgaattagtaaagttgtcatagtaacagttctagtaaagactgttcctcttggatgtcacacttdaacccgctgaattttgtcacctgcctcttacattctcagatgaaggagttattacacagggaggtggtaaaggagcaacagaggcaaagaaatgggatgcactcatataatataattggctacccaaaatggagatgtttctaaaggcataaatatctctggatgcatgtggaaacctctcttttatccctgattgtattctcctttagtgtaaagaataggcattacatagctattataactagtaaagttagagtttttgtttatcagaaatttaagatcaattaaatattttctaattaaagtgttgtagttaaaaattataaatattgactgaacacaatggcagtgagaatacagttttcaagtgtgagttttagcactgagggctagttcatgagctgggtgttcccaaagccatgggtagaagtaggaaatacagcacaacatcttaaatgggtgaaactatatttcttaataaccctaggtttttcctgatctcattagaaatgattatatgttccttaaaatttttttaaytgtaaaagcaatatattctattttataagattatggattattttatttaattttaattataattgtaataaaataacattttatttaattttaattataattataataaaataacattttatttaattagaaattaaagaaaattatccataatcttatacaaccaaatattggactcacagtcaccttaagtattgtgaggaaaataaaatctttgtatctttaaatattacaactcaaagagactacatttagctcatatgttgattcaattaacaatttttaataacatatctattttgtgtcaggcactattcctggcactggggtagagcaattactaaaatgcagtgcctgctctcatggagcttacaattaagtggggaaagaagggtgatggaaaagaaataagtgaaaagataacctaaagtgttaaaagccttgaagaaaaagcagggtttgagatggagagtggcagggggtattagtatattttaaggaagtaagggaagttctgtctgatgaggtaacgtttgagcagagattttgggataagggcattccagactgaaggaatggtggatataaagatcctgaggtggtgggatattgatgcactaactatatgctaggcttttaaaatcctaacagtgacacaatgaagtaggtaattattataatttgtattttgcagagaaggaaacttacatgctttaaccactgtgctatwcacccacatgatgtaatagagcagagagttaaagtatgtaactcaggtcccaggaggccaggaaaagttccccagaggagttgctccttgaatttagttgtagtgaaaragcaagtagaaaatgagaagggtttagaattctggtctgttttctcctgttactatatccccagaagcacatttatttggaagcatatatatatatatatgtgtgtgtgtgtgtgtgtgtgtgtgtgtgtgagagagagagagagagagagagagagagatggtatctcattgtggttttgatttgcatttctctgatggccagtgatggtgagcattttttcatgtgttttttggctgcataaatgtcttcttttgagaagtgtctgttcatgtccttcacccattttttgatggggttgtttttttctcgtgaatttgtttgagttcactgtagattctggatattagccctttgtcaaatgagtaggtggagaaaattttctcctattttgtatacatatatatatatgtatactaaaaattgataagctatagaggagatgatcatagacctcagggaaggataaagtgagtagttccattatttattttattttattattattatactttaagttttagggtacatgtgcacaatgtgcaggttagttacatatgtatacatgtgccatgctgttgtgctgcacccattaactcctcatttagcattaggtatatctcctaaagctatccatcccccctccccccaccccacaacagttccccagagtgtgatgttccccttcctgtgtccatgtgttctcattgttcagttcccacctatgagtgagaatatgtggtgtttggttatttgttcttgtgatagtttactgagaatgatgatttccaatttcatccaggtccctacaaaggacatgaactcatcattttttatggctgcatagtattccatggtgtatatgtgccacattttcttttttttttttaattattattatactttaagttttagggtacatgtgcacaatgtgcaggttagttacatatgtatacatgtgccatgctggtgcgctgcacccactaacttgtcatctagcattaggtatatctcccaatgctatccctcccccctcccccaaccccaccacagtccccagagtgtgatgttccccttcctgtgtccatatgttctcattgttcaattcccacctatgagtgagaatatgtggtgtttggtttttttgttcttgcgatactttactgagaatgatgatttccagtttcatccacgtccctacaaaggatatgaactcatcattttttatggctgcatagtattccatggtgtatatgtgccacattttcttaatccagtctatcattgttggacatttgggttggttccaagtctttgctattgtgaatagtgccgcaataaacatacgtgtgcatgtgtctttatagcagcatgatttatagtcctttgggtatatacccagtaatgggatggctgggtgaaatggtatttctagttctagatccctgaggaatcrccacacagacttccacaaggtttgaactagtttacagtcccaccaacagtgtaaaagtgttcctatttctccacatcctctccagcacctgttgtttcctgactttttaatgatcgccattctaactggtgtgagatggtatctcattgtggttttgatttgcattcctctgatggccaatttcatgtgttttttggctgcataaatgtcttcttttgagaagtgtctgttcatgtccttcgcccactttttsatggggttgtttgtttttttcttgtaaatttgtttgagttcattgtagattctggatattagccctttgtcagacgagtaggttgcgaaaattttctcccattttgtaggttgcctgttcactctgatggtagtttcttttgctgtgcagaagctctttagtttaattagatcccatttgtcaattttggcttttgttgccattgcttttggtgttttagacatgaagtccttgcccatgcctatgtcctgaatggtaatgcctaggttttcttctagggtttttatggttttaggtctaacgtttaagtctttaatccatcttgaattgatttttgtatcaggtgtaaggaagggatcgagtttcagctttctacatatggctagccagttttcccagcaccatttattaaatagggaatcctttccccattgcttgtttttctcaggtttgtcaaatatcagatagttgtagatatgtggtgttatttctgagggctctgttctgttccattgatctatatctctgtttcggtaccagtaccatgctgttttggttactgtagccttgtagtatagttttgaagtcaggtagtgtgatgcctccagctttgtacttttggcttaggattggcttggcaatgcaggctcttttttggttccataaaaaaaataaagtagttttttccaattctgtgaagaaagtcattggtagcttgatggggatggcattgaatctataaattaccttgggcagtatggccattttcatgatattgattcttcctacccatgagcatggaatgttcttccatttgtttgtatcctcttttatttccttgagcagtggtttgtagttctccttgaagaggtccttcacgtcccttgtaagttggattcctaggtattttattctctttgaagcaattgtgaatgggagttcactcatgatttagctgtctgtttgtctgttattggtgtataagaatgcttgtgatttttgtacattgattttgtatcctgagactttgctgaagttgcttatcagcttaaggagattttgggctgagacaatggggttttccagatatacaatcatgtcatccgcaaacagggacaatttgacttcctcttttcctgattgaataccctttatttccttctcctgcctaattgccctggccagaacttccaacactatgttgaataggagtggtgagagagggcatccctgtcttgtgccacttttcaaagggaatgcttccagtttttgcccattcagtatgatattggctgtgggtttgtcatagatagctcttattattttgaaatacatcccatcaatacctaatttattcagagtttttagcatgaagggttgttgaattttgtcaaaggctttttctgcatctattgagataatcatgtggtttttgtctttggttctgtttatatgctggattacatttattgatttgtgtatattgaaccagccttgcatcccagggatgaagcccacttgatcatggtgggtaagctttttgatgtgctgctggattcagtttgccagtattttattgaggatttttgcatcaatgttcttcaaggatattggtctaaaattctcttttttggttgtgtctctgcccggctttgacatcaggatgatgctggcctcataaaatgagttagggaggattccctctttttctattgattggaatattttcagaaggaatggtaccagttcctccttgtacctctggtagaattcggctgtgaatccatctggtcctggactctttttggttggtaagctattgattattgccacaatttcagagcctgttattggtcttttcagagattcaacttcttcctggtttagtcttgggagggtgtatgtgtcgaggaatttatccatttcttctggattttctagtttatttgcatagaggtgtttgtagtattctctgatggtagtttgtatttctgtgggatcggtggtgatatcccctttatcattttttattgcgtctattgattcttctctgttttcttctgtattagtcttgctagcggtctgtcaattttgttgatcctttcaaaaaaaccagctcctggattcattaattttttgaagggttttttgtgtctccatttccttcagttctgctctgattttagttatttcttgccctctgctagcttttgaatgtgtttgctcttgcttttctagttcttttaattgtgatgttagggtgtcaattttggatctttcctgctttctcttgtgggcatttagtgctataaatttccctctacacactgctttgaatgcgtcccagagattctggtatgttgtgtctttgttctcgttggtttcaaagaacatctttatttctaccttcatttcattatgtacccagtagtcattcaggagcaggttgttcagtttccatgtagttgagcggttttgagtgagattcttaatcctgagttctagtttgattgcactgtggtctgagagatagtttgttataatttctgttcttttacatctgctgaggagagctttacttccaagtatgtggtcagttttggaataggtgtggtgtggtgctgaaaaaaatgtatattctgttgatttggggtggagagttctgtagatgtctattaggtccgcttggtgcagagctgagttcaattcctgggtatccttgttgactttctgtctcgttgatctgtctaatgttgacagtggggtgttaaagtctcccattattaatgtgtgggagtctaagtctctttgtaggtcactcaggacttgctttatgaatcttggtgctcctgtattgggtgcatatatatttaggatagttagctcttcttgttgaattgatccctttaccattatgtaatggccttctttgtctcttttgatctttgttggtttaaagtctgttgtatcagagactgggattgcaacccctgcctttttttgttttccattggcttggtagatcttcctccatccttttattttgagcctatgtgtgtctctgcacatgagatgggtttcctgaatacagcacactgatgggtcttgactctttatccaatttgccagtctgtgtcttttaattggagcatttagtccatttacatttaaagttaatattgttatgtgtgaatttgatcctgtcattatgatgttagctggttattttgcttgttagttgatgcagtttcttcctagtctcgatggtctttacattttggcatgattttgcagcggctggtactggttgttcctttccatgtttagtgcttccttcaggagctcttttagggcaggcctgttggtgagaaaatctctcagcatttgcttgtctgtaaagtattttatttctccttcacttatgaagcttagtttggctggatatgaaattctgggttgaaaattcttttctttcagaatgttgaatattggcccccactctcttctggcttgtagggtttctgccaagagatccactgttagtctgatgggcttccctttgagggtracccgacctttctctctrgctgtccttaacattttttccttcatttcaactttggtgaatctgacaattatgtgtcttggagttgctcttctcgaggagtatctttgtggcgttctctggatttcctgaatctgaacgttggcctgccttgctagattggggaagttctcctggataatatcctgcagagtgttttccaacttggttccattctccccatcactttcaggtacaccaatcagacgtagatttggtcttttcacatagtcccatatttcttggaggctttgctcatttctttttattcttttttctctaaacctcccttctcgcttcatttcattcatttcatcttccatcactgataccctttcttccagttgatcgcatcggctcctgaggcttctgcattcttcacgtagttctcgagccttggctttcagctccatcagctcctttaagcgcttctctgtattgattattctagttatacattcgtctaaatttttttcaaagttttcaacttctttgcctttggtttgaatgtcctcccaacgtagctcagagtaatttgatcgtctgaagccttcttctctcagctcgtcaaagtcattctccatccagctttgttccattgctggtgaggaactgcgttcctttggaggaggagaggcgctctgctttttagagtttccagtttttctgttcwgttttttccccatctttgtggttttatctacttttggtctttgatgatggtgatgtacagatgggtttttggtgtgtatgtcctttctgtttgttagttttccttctaacagacaggaccctcagctgcaggtctgttggagtttgctagaggtccactccagaccctgtttgcctgggtaccagcagtggtggctgtagtacagcggattttcgtgaaccgcgaatgctgctgtctgatcgttcctctggtagttttgtctcagaggagtacccagccgtgtgaggtgtcagtctgcccctactggggggtgcctcccagttaggctgcttgggggtcaggggtcagggacccacttgaggaggcagtctgcccattctcagatctccagctgcgtgctgggagaaccactgctctcttcaaagctgtcagacagggacatttaagtctgcagaggttactgctgtctttttgtctgtgcccttcccccagaggtggagcctacagaggcaggcaggcctccttgagctgtggtgggctccacccagttctaggttcctggctgctttatttacctaaggaagcctgggcaatggcgcgcgccctcccccagcctggctgccgccttgcagtttgatcttatactgctgtgctrgcaatcagcgaggctccgtgggcataggaccctctgagccaggtgcaggatataatctcctggtgtgccgttttttaagcccgtcggaaaagcgcagtgttgggttgggagtgatgcgattttccaggtgctgtctgtcacccctttctttgactaggaaagggaactccctgacccgttgcgcttcccgagtgaggcaatgcctcgccctgttttggctcgcgcgcagtgcgctgcatccactatcctgtgcccactgtctggcactccctagggagatgaacccagtacctcagatggaaatgcagaaatcacccgtcttctgcgtcgctcacgctgggagctgtagagcggagctgttcctattcggccatctttgctcctgccccagtagttccatktttttttaactgaatggaacaaaatgtttgaaattgtttgaatgtttgaatattctttgggcttctgtgaagataaaatattccaaaagcgcytgtgagtttttaagattcttgctagcaaggaaaaatagcccactcaagccagcttcattaaaaaaggagtgtttgctttaagtatgtgtcctaaaatgcgaaggagggtatgtcagttagcttttgctgtgtaacaatttttttcgaaatatagtggcttaagactaccaccacttggactgggttcagcttgacagtaattctgtctattttgtctggactcattaagacatctgatctcagctgctggtcaagttggcacttctgcttctggattggctggctgtcagccgacatgataggaggccttgggccacatgtttatcatcctccaggctagtccaggcttgtccaaatggagatctccagcttccaagagcaggtggagggcaagctccaatgtacaagtgcttttcaagtttctgtttatatctcatatgcctctacccaaattgagcaaagcaagttttatcccagatttaatgagtggagaaacagatttcatcttttgatgggtggaactgcaaagtcacattgcaagggaacggaaacagagaggggaagaatttgtggtcattttgcagtctaatataatggagctgggtttcaggaatgcacagaaacctaagtgtcgttaagactgcctctctcacttgtcttgctctctgttttgcttgtctgtttcattcttcttaatcttcagaccagcttcctctacttctctggtctccattttagaaaatatggctgctgacagcttctatgatcatatgagatagacatagatcgcttaaaactgactctttccccattgggaagatttttctgaagaaggaactctagaaggggaatctggttagtgtcttcagccaggtacccactcctggatctatgaatggtgataaagcattttgttgggtggatgggagattgggtgtgtgtgtgaatctggcaattatgagttatattgttataaccttgtggtattaatagttggaggtagagtgctaagaaggaggaaaaagagttcagtgtccccagaaaagtgtagagatgggaagagggtggctagacatctcacatgggtccattacgatgagttttataactactgtattaatttcaggggattgagagtagtggctgggacctgggaggaacgagatgatgaactaaaaaccagtatggaagggaggtacttgagccacgtaaaggggtaaagggtgttaaagaaaaaaatattcaatgatatttgttaaaacatggcaaagcaggctttcttaaggaccattgtgatgagattttgcaatgggagagagaaattgggctcaactctgaatacagcatggccaaatgggaagttatagccaaggagcagggtaggagccagtgaatgggaaattaaacatcaggagtaatgaggattccagctaacctgacctaaaaggattcttgctgaatgcaggccaaggtgatcagtcattacctggaggatgttggaagatgaggaaccttatcagatatcaagggtgatcagatattgagggtggggtgttctcactaaactgatttagcaaggtgaacagatgggcctagtagctggttcaggagcatgactgaagtttgggcaagcaaagaatcgttgtcaaggtcttctgtctccagagtctcagtccaatggggaataccaatcccttcaataatggcagcagtgtttctagtaacagactgggaaatctgtttgggtatgtcttggatggttttatcacttaaaccctttttcttctacacataatgccatttctgtgataacatgttatttctgttttactggaattttctagttctttatttcctccttttcatgttggtcatattatagatgttttgatagttattggcatatttttcttgaataaatcagaaaaatggaaagaagtaaaatccttacttctttcatatttttatcaaagaaggaagttggaaaatattgactataatgaattttctagattttttttctgtatctcagcacataaacatataaagaagaatgagataggtttttctgttataaaactctgaatgaagcaaaagaaagtgatatttcactctccaagatttgccagtgtcatataatgactgcatagttccaggattttaatttggtacatattcatttatcaggggaagatttttgtctctgaatatggtgggttagcagggaaatggggagttgacattgtatattcatttgttcattcattcatttattcagcattcatttatcaacaaatagtttaggtattagagatacaaggtgaacagaatgactcctcccctcatggagcttagactaatggaggaagactaatattaaacaaacatacacaaatatctgtacacagattgtgataaatgttatgaaggaaacagattatgagagagaacagggagaacccaatttaaatggggaagagtagttttgggaaaggctttgtggtgtcagttgagatgtaaaagctgagttgcaggtacaagccaaaaattactcattttttaaagtcactatgtcatatgtcaatgtaaaatgcagagtgttctagattgctttgcagagctaaaacttcagctatagaaattagtaatatatccactgaaagatgtggatagaaagaatcatgaagtaagagagaaagtgagcagagctgcagtctgaggcacaggtggtgtaatgtaaggacagtggctgatgttgcaggctgctgtttggtccagtagcagggagcccattatccaccttgcaaagcagccagccagggttctatccttactggtataccttagaaatgatcagaaatgatcatcttctttttctccccttcttctactgtctctctttagacaatgttagcatcttttgctccatggattggcagtgtgtaaaatggatttattttctagcaaattaccttaccaattgggtacatctcctggtctaggttagtttttgttccattagaaattacttccctctcctttgagcccttctaccaatagtgtgctaaactaaatgacatttttatatttacatccaagatagtgattatgcaacatcatctgcaatattgtttctatttttatctaagttttgttaagcattgtatttataacatttataatttgggggagtgtcaggagtaactatatgtaggtacttaaggaatgaaaatctggagaaagagattacaatcatttatttttcaaaggataggttttctaggtcagctttttgccttatggattagagtgtacttgggctgtgatttgtaattagattgttcatgaaagttattggttgtcagcacttcttttggttctcccatggtgtgtagcatagagccgcaaatatatatttaaaaagtgctgtacaagagatcaaatgaatctgcccctgaggtacttcttccatagggtatattgtgcagtgcaaggtcaggggcctggtagattgcatggagggtgaaggtgagctcttgtggtagtctcaactcagcataggcctcataaacatggggagtagagttgtgcccaagaacccacattttggaagacaggacaaaatggaaattctctactgtttcatgaagttttccttttacttccctctcctattttgcaaagagcaaggaatttaacccttttgtttcagcatttctacatacattttcatcttttgtagaacagaatatttataaatttttaaaatttggaggaggacaaggaagtatagtttttccctaggaattgaagttaagacgctgctgtctctgaaccccagaactcaggggccctctccctatgtgcatttttattccactcacctcccaacttgagatattaataggagatcattttctaccctctgttaccatagtgatctcactgcttcacaaattagcccttttcattcttggaccactctaatcattggaaagattttccttctatttaatcaaactctatcctttctacctatatatccccaattgtctcctccttttgatagtagaatcctttgaagtttgaaggaaccgcttgtgcgtcctcttattctttctctaagccacacatccactgttgtttcaactattccttatggaatatggctactggacctcctcaccattcttgctccctcttcttagaatgtactcttgtttatcatcgctcccctaaygtaactattcctcccatctgctatgtctcagttttttattctatttgtaccaagtgcctattttctttatgtttaaagtgtctaggaattatacaatccaaaatattcagtaaggttaataaattagaagtagaaaactaggacaaaagaaaagaataaaaacataccaactcttaattacttaatgtaattgttttgtttaatcttacttactaagattcctggaggccaaggtgaaagggcaatagtaagttatagaggtctcatgatcagaatagaggaatcattccagttcttcagaagaggcagtattttccctgggggtgctaaattctgaaatgcatttctcacatggattctttagagcacataaaatataatgaaaatcacctctgcaatgtctgaaaacaaatgcaagagtggtgttcacatgactctttcttataatgaccttcagtagatgctctgagcataacatttgagcacagtgcagtaaaatcaatttatttcatgtaacaactcttggaacaccctcagcatttcctgaccctaaagatgcttcccactacatgtcaaagtgtttgcgaattaactattgtatacataaaaccctttccccaaggcaaatgtgtacactgagatatgtatttggttgactcrgatgatgattcatagaggttctttctttctctttcgtttgcatctatatctgtatgatcagatccatattaggaaaattagcaagtattctcatagttattattatgctagggaaagaaatagtaactagtcatcgaatgcccctctcttcttgtcattctctaggagagtccagattggtttaccactagaaatcctgcagttaggacctcaagagtgggacaggactgttctgctcaaaacacagtataaggaacccttcctccagggaataggagggttcctctatccatgggaaggaacatgcaattccaggacacgcttgccaaaccacagagattgtaagcctgccgcccatccattattatcattatttagcatttttagaaggttagagccaaaataagtattctgccagccaaaggagtgacaccagcctttaccacaggcattggaggccccgctggtatttagtagctgtgacttgggtcatattattgtctgattccatcaggccggccaggctcctgcctcctgttggctttccccaacaacttttttttaggcagttttttctcccctcttctcctcttcccagtagtagttactttggtatgtgtttgctgactattccctccaactcccaccctgtgttttctaagaatttaaacaatgaaagggattcagtcaattgtgctagtgagagataagtatgcagggaaggctttgggggctcctgaattttgggatcctggtctactcctgaaacctttccctgagagataaagtatagtattatgcttaaaagcatagaaccaagactctgagctcaaattctggctttgccacttactagctgaatgatcttgggcagtttatttaacctctctatgcttcagtttcttcattataaaatggatttgaaactccctccctcacggatttgaaactagatagaacacaaaaagtgcttagaacagtgtctgaggcattgtgttagctggcattacaattattgggctacagaaatcataccaagctattagccctatattgagatcactctgggttgcgaaacaattaagaacattgggatctttgggaggaaactatttgggaattgtgtttggaaatggataayggcaaagccctccaagcctcaggccatccagcaacgtacacgttttttaacttgaagagaaaatggaggaacattttgatgartcagaaatgtctgcctcctagaacttatggtcaacttaattgttcattctaatgaaaaggagtttcagttcagatatgcataaattgtgctccattggctcaccagggcccaattttgggcacagcctgtttcctgaagcagaatgacaaggtagcttggtggacttttgagccaggcctttctggctttgaatcttattttaggtcagcttattgacctttttgagcctcaatttccttctctatgaaatagagaagttacaattctataaaaagttataattctttttctgggttgttttgtaaattaaataagatgtacaaaataccctgcacagtgtctagccctagaagacatttggtatttgtcagctttcttcacttttttgttaatattctttcccaatttgtttaatttatcaagaaagccttgtcatgtaggaaatcatttaaagagctgtttcagatttaatatgcatgcagatcacctggggatcttgttaagttgcagattctgattcagtaggtctgggatggagcatgagattgtgcacgtttaaccagttcccgggtgacatcaatgctgcgtgtgaagactgcacttggagtagcagagtatactgtactcttttctccctttgcatctcattattaccttttagattcatgttaatattttaacagttttaccacacacatttgcacatccagagtcatcatctggagaaatatccaaggttgtacattgttaggtactaataagattcctcctcatgcagtacaggccgtgatggttgaggtctagaagaaacctatcatagacatttccccaggattcccatgggcctaggatcccaaagtgtttgaataaaatactttgctccagcctgattgttgaaggtcccttctcagaatctgggtccctctgtgacttggattgcagatcagttaggttaaggaagtggtctttgtctttctcttgtcgacaagtctggagggagccactggaagactgtgcttctgccctcactgagcacctgagatatttttagagccccatgtcccaactactagctttctccaggttcattagatcacgttctctccactgtacacagatagaagagtgtactgttgtccttttgtgatacacactttctgagcccattgagcttttataggaacatacgaatatccagccctaagaactaaaaacaagctatgtgtgaaaaaagcatgagtgcttaatgcaaactctgagtgcttaatgcaaactctgtggtgtttctacatttttgcagatttcttagattgactttggagaaacctcctcactgttgttgtttttttctagtttctgcttattttgatatttaaactccttcctttctttcctgtattatttacaggaacttttcagcctgaaccatcagggtcatttgcatctgctgtgcccagtttgggaattggctgtctttgtcctcaggcaacttttcttgaagtaaaaaatgcgaaagttgctaattcctttgcattacatctcttaagttagagatgtgaagaagaaataatagcctccttcttgaaaaaaaaatattagaacaggcttttttttttttcccttacaaagtgtctgtaagttagagcttgttcatcagccatgtttcaaaacaaagcaagtctgcttcagtctcttttagagttatcttggtgccatttcatggagaacttctctgtcctggatgggctctacctaatatgtttgccaacttggggaagaatttgaaaatagccccaggtaataacctagaaattttgaaagttagggtggagaaggattatagagggagaaaatagagaaaatatttgaggtaaagtcagaggagccattaatgtttttactttatctagatgaaacagtcagggttgtaacagaaaacagatggcacactcaatgctgaaggacagtttatttcactaggactgtttacaaagatgtgggtttaggggacacccaggactagttgtagctgtgctgttgctgcccttgggcctgaaggtaccctcgacagggagagacatcactttactctccctcccttccccatttcctgcyagagtcctctgttagaagaacctgatgggaagcagagagcaccggagcctgttgatgcacaattatgcattgcttaacaatggggtaatggactgagaaatgtgctgttaggtgattttgtcattgtgtcaacatcatagagtgtactaacacaaacctagatggtgtagcctactacacacctagtctatatggtacagcctattgcttctaggctatagaaccagtacagcatattactgtactgaatactataggcagttgtaacacaatggtaagtatttgtgtagctaaacataaaaaaggtaaagtaaaaatatggtttaaaagaaaaaatcatacagttatattgggcatttattatgaatggaccttgcaggactggcagttgctctgggtgagtctgtgagtggtgagtgaatgtgaaggcgcaggacatgactgtacactactgtagactttatcaacactgtccatgtaggctacactaaatttatataaaaatgttttccttcagtaataaactaaccttagcttgctgtaactttcttactttataaacttaaaattaaaaaaaatttttgactcttgtaataacacttagcttgaaacacaaacacattgtatagctgtacaaagtgtttctttatatccttattctgtgagctcttttctatttttaaaattttttaattttttaacgttttaaacttttagtttttttgttaaaaactaaaacagagtcaggatcatcaatatcactgtgttccacctccacctcttgtcctactggaaggtcttcaggggcaataacatggatggagctgtcatctcctgtgataacagtgccttcttctggcatacctcccgaagacctgtcttgagactgttttacagttaacttttttttttaataagtagaagacatatgctctaaaataatgataaaaagtataataaatatgtacaccagtagcatagtcatttattaccaagtattatgtactgtgcataatcatacatactacacttttatatgactggcagtgcagtaggtttgtttacatcaacatcaccacaaatgtaatgtgatgttacaacagctctgagctatggtgtcactaggtgataggaattgttcagttccgttttactcttatgagaccactccaaaatgcttttgtgcagcacatgactgtagttcatcctgggcagccttctggggcagatagcaggatgaaggcaagtggacagatctggagaggcaaacagaagctgtcactccaggtttacattttcttttggaagacttgttcacctaaagacactatcaatattgtgagctccttgagggcagacactggcctattcacttatctgttaggtcactatttaaatgattgttgaatgaatgaatgggtctgtttatttccttcctttctcttgacttgcacttatggcagccgactataacagtataattttgtcttggttagagccttgtgttctgaatagttaggcttcccataggcatggttaactaactcagcgaaacattccttccagtgtaattcagcttttaacaatctcattattaaaactgctaaacaaaaacaggtcactgtattaatatcttgagtcttttgtattattattattgtttttttgtggatatccaggtttagcgaggcataacattcatgaatctttcgcccttctcagtgctaatcagttagatttaattagattctctattaaattgaaccctgttatttcatttctcctcttacctggagttccactggcatgcagatggataaactttaatttaggaagcccacaaggcttttgtttcctacccaggctgcttcaagagaaccacacaaagggctaaagtagcttcattaactatctttagtagctttaaaagaagatctgtaaataatgtcaggtgtctcctaactgtccagagggcagaagtctgaatagacaccagcttattggttacacactttggcaaagtttcccatgcagtcaaattgtcttccctaatgattctcagtcattagggttttgaaagaagggatagagagcaaaatgtcacaagtgactagtttggaagtccctgggtttcttgtggtgctcaagtgtaagagcaaaagaaaatacatggtagagacgggagtgaaccccttcttcattagagctttgctgatctagcttgagggttttcaggttgtgtgtttgtgtttgtggggtacagtggaaaagccttagaatcacttagccatcaggtaraaatatgcctttgtcctttgctaaagagaatggtgttcctgaattcattttgatctatccatgaagttagcttccagtatgcttcttttctttatgcttttgataatgttcttttgatagctactccttattctcatgaaatctattgagattttacataatttaagtaggtatggagtattgattcagtgtctttgcaagtcactctgtctgattataatccttggaggacattttatggttctattttcagtgtcccaaaggacagacagaaaaagcatgaatagactcactcacatgtctccctcacatcatccataatgacagcattctctgcttccttttacagtgtagtgctgttaaggcaccagatcccttcattaatggttctctgagttcaggtcatgctatctctggcttaggccatgggcctagctaatttatttattaattatttattatttctttgatttctgtgggcctaatttttgtttaccatcagaagaatgcaagcttttttyttaatagaatctgaggttttttttttttttttttggtttttgtttttttaaccttttgtttctagtttctttttttcttttctttttttttttttttttgagacagagtctcgctctgtcccgcctgcaggctggagtgcagtggcgcaatctcggctcactgcaagctccgcctcctgggttcacgccattctcctgcctcagccactcgagtagggcgcccgccaacacgcccggctaatttttgtatttttttttttttttttttttttttttttttttttttttttttttttttgagacggagtctcgctctgtcgcccaggctggagtgcagtggcgggatctcggctcactgcaagctccgcctcccgggttcacgccattctcctgcctcagcctcccaagtagctgggactacaggcgcccgccactacgcccggctaattttttgtatttttagtagagacggggtttcaccgttttagccgggatggtctcgatctcctgacctcgtgatccgcccgcctcggcctcccaaagtgctgggatgacaggcgtgagccaccgcacccagctgtttctagtttctttatatatcataaccatttaggatttgacctttctggccgggcgcggtggctcacgcctgttatcccagcactttgggaggccgaggcgggcggatcacgaggtcaggagattgagaccatcctggctaacacagtgaaaccccgtctctactaaaaatacaaaaattagccgggcgtgttggcgggcgcctgtagtcccagctactcgggtggctgaggcaggagaatggcgtgaacccgggaggcggagcttgcagtgagccgagattgagccactgcactccagcctgcggacagagtgagactccgtctcaaacaaacgaacaaacaaaaaaggatttgacctttctgcttatggtactggggtgaagaggtagggccgctggggaaaccagctggtgggcctgcagttgaatattttactacaggcatgttttattttgtgagtagagactccctgcccctgtaagtagacccaaatgctttaaatcgggcatagggctgggtgcggtggctcacgcctgtaatcccagcactttgggaggccgaggcgggcagatcacgaggtcaggagatcaagaccatcctggctaacacggtgaaaccccgtctctactaaaaatacaaaaattagcctggcgtggtggcgggcgcctgtagtcccagctactggggaggctgaggcaggagaatggcgtgaacccgggaggcggagcttgcagtgagccgagatcgcaccactgtactccagcccgggcgacagagctagacactgactcaaaaaaacaaaaacaaaaataaaacacaattggacatatattttcctgtttgcctcaggcttcattactccttaatgttgaattggctgttttagaggaatccagattctttaaattctctttccctgaacacttaaaaaatggtcttgtattctatagtaattataacttgtctttacatttggcttgggacttggctgcttttttatgtaaatcagatgattccttattcatcatgtaaagataacaccaactgtgtagtactttagagcactataaggtgcttttatttgaagttttaaactttagtttcttggatcattacaataatcctgtggctagggaggtgggtatttttctccttattatggataggaggtaatatatggtggtggttaagattatgggtgctggagtcagatcatttgagtttggattatatctttaataattactagcctagtctcagctaataaacccactcagtttcctaatctgtaagccacagagacctattttataggtgtattagtccgttatcacactgctgtgaagaaatacttgatactgggtaatttttaaaggaaagagatgtaattgacttacagttccacattgctggggcagcctcaggaaacttacaatcatggcagaaggcaaaggagaagcaggtactttcttcacagggcggcagggcggagtgagtgcaggcaggggaaatgccagacacttataaaatcatcagatctcccgagactcactcactatcatgagaacagcatgagggaaaccaaccctgtgatccaattacctccacctggtcctgcccttgacacgtagggattatggggattacaattcaagatgagcttttgggtggggacacagccaaaccatatcagtagggttgtgtgagaaataaataattcaggcaaagcaattagaacactacctagcacataataagtgctcaataaaccttaactactaaaactattagcattgttaatagaatatgaatacatggaaaaaataattaataagcataaatttctcaaacttctcaatgttctggttttttcctcttaagagggaggatacttaaattttggtgaatctcatttgtcttttcatatccctttgaggtagtgaaaaatagattacatcatctccattttgcagggactggttgaagtccagtgagaaaagaatacaggctttggagtcaggtgaggttcaaatcctggcacttccacttctggttatatatctctaaacctcatttttctcatgtctataatggggataagcagaactttgtttggaggtttgaaggagataatgcttacaaaagaaataatgcaaggtacttagtatacttaccacatactgtgactcagtaaatgtggctgttattgctgttgaggggaggggactttttacactggcccagggtcacagttagttgggcacccaggttccatcatctcttacataatgatgaatgtactgcttcatctgggtatgttgtttctctacattttaaatccaagtgttttgatcttttggttactaatttatttttaatgtacatattatggacactggctctgtgtgtcagcagactatgaacaatgcctattgcatcaaaatcctaagtttacctcatgtcacaagacaaaagttaatgttagtgaatccacatgaccaacaaggaatatgacacttgcagaatctgtcagatggtgtttgggcagctattctcagaaattgaaagcagcaggtgtttattaatatttactatgtgttcggcattatgtgaagtaggggacacaaaagaaacaccatactttattcatctctcacaagaaacagatgtgatagaaacatgaaacaattaacaattaaggagcaataataacactgtgattcacagacatgtagataaaaagacaagtagagccacacttaaagcatattcaatacatgataatagagttattaacagggagtgctgaggaggagttatgtggtatgtatgcatatgggtggtggtgcaggttccacggcaaggtgctgcttgaattgttgactagttgggaatgcggtggggagtattgagtgaagagaatggaaaatcatatttgtaaagacaatgagatgtgaaagagcctgcggtagtaaagaacagcatttgtttagtatccctcatggctggagcttaggatttacaggaggagtggtgggagagcaggctggagaagtgcactagggttaagtcattaaagaccttgtgtaccatgctgtagagtatgagcattaaggtgttggcaaccaagcaggcaagagatgattatatcagtttttcagaataattattctagaaacatcatatagtaaaacagaaataagggcccgaataaagtcttacaataaattaaactgaatagatgaatgaatgaatagtagtgtgagtattagacgatactaacttaaatgtttyaggagtttagaaaaaggggacaccatgatgggaataatattcgaagaagactccatgatgaagaaagattttttatttttttatttttttttgagaaggggtcttactctgtcaccaggctggagtgcagtggtgcaacctcggctcactgcaacctccgctgcccaggttcaagagactctcctgcctcagcctcctgagtagctgtgactacgggcatgcaccacaatgcccagctaatttttgtatttttagtagagatggggtttcgccatgttggccaggatggtcttgatctcttgacctcgtgatccgcccacctcggcctcccaaagtgctgggattacaggcgtaagccacagtgctgggccatgaagaaagatttgagtggtcagcccagggatttatctatagtagctagccaataaactggatattggacaaaagtacaatttatacaggacagaagacaggaagtaataccaagttgcataaacatgtgtgaagtggtcaaagagacaaatctaactggataagaatggtaaatgatacaatttcgtatgcataatggtcccagattttggaagccttcgaaatgcctggttgaggcgtttagatttatttcttaatcaataggaagccattaaagattcttaaacagatatttcaagattttcagtttgggttagaacatcttggttggaggaagatgagcctgatgagatgacaccagttctgattcttacatttaatggaaatgccagagagacttcattacttttggacaggaaaataaagtttaatgaccccactttggttatgggtagactgtggaatagtagttcactgttgggagacaaaggaagctgaggcaaaaatgaatgattgcccatatgagattttcagtgataccagtctagggaaggatagagtaaatagaaagatggtagaaactgcttgctctgtggagactwttagggatggcraaaacatagtgtgcacggtcaatatcttattccatacccatagcagacattgttaattgattttggtatattttcctatagtctggagccctttttaatgcagtgctccaggcaggctactattagttgatcagagttggtgctggaattcaaacctgtttgtcatgcctgtagtaagaaatgaatgagaaatgggttatgactactcacagtacaaatcagtttttacctttccaggtggaacttgcagaaatctgtgccaagagtgagcgttacrttggcactgaaggaggaggcatggaccagtctatatcatttcttgcagaagaaggaactgtaggtagcattccaagtaggaaccattcagaaattcctagtgggaaaatttacatggagaagaaggccctgagagccccaggatgcttggttatggacagcctactatattaggctctattgtaggatattatttcccaactgcttgtaactcaaggctgccaccagttaatctactctatttcatgttgattgcctttctcttacgcttccagaatgatactcaggtctgtttttctcatgtgtctagctttttcccctcttctatttttcttcattgttaagatgagctttctcaattccctagttattggaacctcatttcctgctcctatcctaaatcacttcatctcatgcatttttataatctcttgttggttttaaacccaaatcatagttctcttaccacatatattcacagtccctctttttataatttactctttggtatcatttttcctgtcaacatttttggggcttcagtggtgggaaaaagaatgttgccagtaagccaggaatgaattccttagctggataccgcttccccttggctatcaactcctttaggcagagcagaggttttagttgttgctcataagctgctcatttccaaaatagagcaaacatttctttaaaacattttcttagtttttcatcagattcctacaggcttggctattttccaagaacacctggattccttcttagtaagaatatttgttattgattcccctaagccaaagacatgaggcatgaggaaatttgttttaatactaagaaaatactttgggtgttttggatgagacgcaacaggcagacatgagggccagagtcctgatgttaatgtaagttagctatagagtctgaacacagtctaagttctttgggcttacaaaacacttcaccatctgacccctgctttacccttctatcctaacctctcaccacttctcacccctcaaactgtaagctctaaccaaatttccatgcccgtrgctccattaacattccatgttgttttttgcccctggacttgcctaagttcttccctcttcttgacatgctttttgaggaaagaaaccctctgtctgccctacttttttcatcttttagaactcagtttagatttctctttttcaactgagtggaacctacagtaggctgtactgatgagatgcttcagctatgtatccatatagcatctgtgctttgctaccattgtaacacaacttggaaaggtatttgtctgtctactagmctgtctttcccacttgattgcgggctctatgagaggaatgacagtgtctttcctgttcactgttgtatttccagtgcctagtacagcgcctggaggtcaataagtaatatttgaatgaatgaatgcatttttgacaaaacactttaagataaatacataaacacttgaacattttctgcattctaataaattatatttctcctttcatttttcttctaacaggccaagttgatagaatttagtcctctgagggcaaccgatgtaaaactcccaagtggagcagtgtttgtgattgccaacagttgtgtggagatgaataaggcagcaacttcccatttcaatatcagggtgatggagtgtcggctggctgcgaaggtatgaacttggcaggctagtgaaacttgaagtagggtttttcttgtctttattttcattgttctctattactttatctctttccccaaattttagggcaacattctgactgcacagcattccaactgaaggtctttgggtacagagaaatctgatttctaactcagaagacagatgaaccagttgagtcttctggggtggcactgggaagaaaagggcagcttatatatgtgaagcagaattataggttaggtctatgggtggagaaagatagttggggacaattgatgggaatgaccacagctggtcttgtttcctcaacaaaagtgatggcagcctcacccctcctggtcctctaagatgcagtttttttattgggttatcattcgttactccaaaaatacaggattggtgaagtccccccagaccccgtacccagaaagaagatttttacatgtctactagggaaacacaaaccagcagggagtcttggaagtctctctttagaaaactgccacagttaaaccttaaatctatttaggtagtattcattgactagctattgtagttctagcggcatgaagatatacaaagggacataggacatgggactagagagagtggacagtagagttaagagttcaagttaagggattatgaaacaggaaatggttaatatgtgatcagatagtaagtaatccagtgatccaacaagtgacacagtaattaaatattataaataatccagaatagctcataatacgactagaaagttggagagaggactgaggctggaggctaggaagtggattctgggtcaggagctccactgtgctttcttccactcttgctttgatctcctgatggatactgatggatatcacctaagacttatgatcaacctttaccaggtcttaaatacagcctgaaatctattttctcagtagtaataatttcataccttctttacttctctcaaatacccattacttgattcagcctaacttccaaaagtgattttctcccatatttcatgttggaaatagatgtggtcacatagactttggcttcctgtcatcatatctgtatgtctctctatatctgcatctcctgtcaaagccagcccttccatgtgtggctgcagggaactcactccatctttaacttgttcctcgcctctatttctctactaaatcctttctatcagactccacctattctagtattttgtattagaaaagtctaccctaagcctcacaactctctccatctactatttctatttctactttttcattctcttcacagctaaacttctcaaaaattgctttatatatgttatctttactcctctacctccctcttattccttaatttactaaaatctcacttctgcgttctccacaatgttgaatttgctctttcttaggccaccaaaggttttttcattggtaaatccagtggatgcttttcagtcttcatcttatttctcattgttatttcttatctttcaacagagttaaccagtctttccctcttgaaatattctcttccttaggtttccagtatacttcacttcctgttttttcttttcccccttatatttttgttgctatttctttttagttttagccattccctccaccgacccaccctgggcagggatgaagggatggcaggaattcactcctcctcccacagatgtttaaatgttggtgttcttcaaggccttggccttggtcgtcttcttctttctagtggtctttcttctgttggtctcatgccctcagcttcaacttccatctctatgatgatgacttcctaataaacatcttcaactaaggctttcttggttgagctccaaacctctatatcccatgccttattgaccatctttacttgaatgaatcatagacctctcaaactgagcatgttgaaattgaactcagtctttcacagaccttatatttttccatcggtcccatcatcacttattgactatcacattagccttctcactgttccttaaattcatgctcatctctttcccaatcattctttaaataacagcatgacggcttagaaatttaaatctgagcaatttaaattcccctgcttaatacctttcaaaagcttcctatttcgttggaataaagtaaaaggtccatatcacgacctggagagccaccatatctgagacctgtgcacctcatcctcttcatctcttagcatcacctgctttccttacactccagccatgagactcattctcatctcagagactttgcacctgcccaggacattcttccttcagccctctttgaagtcttagtctaaatgtccctcaaggaagccttccctgacttccttactcctagactaagttagagccccctttatattttgaagcacttcatttttcagttatggcacttatcacaatcatttatttaatgtctgtctcttctttcagattcagttttacctgagagctgaggctgtgtttgtcttgttaactcttatatccctaatgcttgatgtgatgcttaagctgaagagacacaggataaacatttgttcaatagatgaatgacaactccctgtatcacctgctctgtagtttattttgcacaatttcacagttttttacaagtacctattgtatgcttagcactggcctagatcctgtggaggtgtgtaaagtatagttttcccttgttactgacttagcacttctcctcttacttctatcctctgaggttgggaaattcaggaaattagagatatactgaacgaggaaaataaaagctttttgtttctggaatatttggggggcatacattttttgaaaaattatgatttaaatgttttgaatttttaatttacttattaagatagtgtctaaaaataatgtaatagaagtgctttaacattgaactcttcatagtatttgatcagtgcatatgtgcagagaaacagttctgtaaactttttaatatcaagggttcaatgaactttttttcttttacgacacacttcctttttcaggagatggaagaaattagtgtcttatttgtttgagggcttagtcttgttgaccttttatcttgaggttgatgagtaagtgttgccttcctaaggagacctcaracatacacaacattgttttcaaagttttatcacgaaattagatatcctctaccagatccataggtgagctgaaacaagtattagacatgtaaaatcagttcatgttgtgactactctcccaaagatacaagaagaaaatgatggataaaattgtagtgctgagtctctgtagtaaaagttattgggatgtgggaatgttttttgagagttaactagaaaaagggcatctcctttggaagcagtagtagctgaagatcttaatccactgcagaacctcctgttcttgaggatgttttctcagtttaactgcgtaaccccatatgcattttagaggtactttggtcagcaaaattggcatctgaatttggctttttgctacacactcctcccaattgacgtagataaacacactgttttaaatactctgaatttttctcttttaaaatgtggaagaaagaaaaatgaaagactttatcaagatggaaaatgttttctaaatcatgttgctgcaaatcactaaaatcccaggttttatacaaaagggaaatgaagataaaactgctaatgtgcactttactcagagatattgatattaggaatatgcttttgcttaggaatataggctggaattctactaagcatattttctttgcaatatggttctattcttccatttttggcaacatgtgaatgaatataattattgtttgaagatggtctcattaaataaataacctctcatgtaaaaagtttaaaaaaaagcttatctcaatctgaccaaactttctgttttccaacaacaataatgaagtgtcagttgaagaatggctaatcaagatagttttgaaaatgagactgagactgatcagctagggctccacatggcaaagttgtaatgaagaacatttatttttcctttcttcctatttttctcagatccttttttgaaaatgagtacctttttttaatcaagttaacacagagaagtacactaaaccagtaaagacaatttttctttgttttgcattaatgctagcaatttcttctattctcaacttctttctcatcttgtttctctgtctctgtctctttctctccatcagctttcaaaagctaattcatgcaaattcataaaaagtcagagccttgtagagcatttgactaaaattaaaaatttttcaaagcaaactcgagatttataattactacttgtataaatgatatcttaatgaagcacatttttatgataaagtagccaaggatctttagtaggtacaacatttttcatattttacacacatttggggcttaaatgtttccagaagtgcttttcttatacagtatcccttagttatgttgaagaataaaatgtgtgatacccatgataagtattatgggaagtcaggtagggaagagaaattatactgttgctttttgcataccctgagctccttgtggcaacatgagaagcagtgaaagagagagtttcatatgttcctttgacacttcaaggaaaatttacagtgattctttacagggcctgtctggtcaggggccatcagtcacccagtttttcagctcctttcatttagtagttggtatgaaacttattctttgtctggtgatagaatgggaggagaagttggcataatagtctcagggttttggcagtttccttgaatttgagcagagaaaaaccaaatactcaagaatgtagccaatttcacgcagccagttgattcaatagtgcatactctgccaagactctggcatggagtattcaggcaatggtgagtccgagctgcatggcagaggacatacatactggggaataggggtaatgtgtttagtggaaccagattgtggcaggaccttcagtgctatgctcagccttacccaggcttggctttgaaagcagtggttgttagcaaggtattttagaaatattaatatgacagcaggagcttttgccttggttgaagagaagtaggtactagagtatcagtgaggatgggataaaaagggagagatgtgagagaagctctgactggacctagtaagggttgggtacaggctctctgtgattggatttttgttttccttctggcatatacttcattactttgaggaagttttccttgactacctcctgacctcagttaggtgaaacactcttttatgtgctcttaccatgtcctgtatttttctattatagcagtttatcataattggattaagttctttatgataaatgtagttttaatttaacctctgtcttttctggtgggctgtgagctgcacgtggtcaggagccatgtgtgccttactcactgctgtctgcctggagcctgggaagtaataggcactcagtagacactcactgtgagcagatgcacatgaatgaaggaaatgaagaaaaggtgttgagtcaataagggctgcagcttcaaggtgcaatggttggtgaaaagcatagtgctgccattgataggttttgagaaggcaggatggactagaagttgactaaaaagtaggagatgatgagaattcttcatgaatatcttaacactttctctaccataccctcttaccagaagacccagggagtctcagaccaagaacagagggcttagtatttttgtttgtgtctgggacaacctgaaagtgctagggagttaatatccttgagagccacctcaatcagtggtaactgggagttattgggtaaatactttggctttcttgcccatggtgggacatgactgagctttacacatacaggttcctgagaacctgtgatttgaagctcagcgggcccagactcacctgccaatatcagtacacctcatattggcgtcttttcctgtttcactttccattcctctcttaatgcttcttaggatcaccttcccctcaaattcttaccctcaaatttttgtcacagggcctgcgtctgagagaaaccaacctaaaacagagttttagcaccatttatcagtgcctctttccatgactgtggacaaagcacttgttgcctgcttttttgtccacagagcatggaacagagctcaggaacctctcagaagtggtatctgataggaatacttaatgtttgccatggtgaaaagaaagtggtgaatgtggacaaagaactgccttctcttatttccccaccctactactgagtgagaaagttgtgacaaaataacctatagccctgacttatagccctgcttcacaaatgtgaaggaggccagtcacctgggccacaagtgcctccatgaagctctgtctttgaacaatggtgatcttatccacccatttccttcatctgaaagtcatctttctgtttttcaagccaaatttcaaagggcttaagaggcttttctatttgactccctcaatgtagtgtaattcaacagctcaygggctgtgcagctgtcattgagggcatatggtagatttcatccttaattgaaatacacaccaaattggctgtgtggattctccagctgagggctcastggacaactggtgtcacagtaaagtgggatattgctggagtgaatgtgaactctatgttagtgcctcaatctgcagaagagcacatcaggaggctgcctttgaaaactgaatcttgtgggctgtagccatcccttgcagactttctccccacacatcactggcccagttttcttggatcaagtgcctggggcaatgtgactggttcaagagagaatgggaatgggaacttggagattactgtggactgaaagcttcttaggaagagcccactgtcatctcttgggggcagttctgtgatgtttttctttttttgtttggaaggaacccatttatcaaagtgtttttaaattactggaatgttcacttctagcacagatctaggtttgtgttttgaaatgcgtttctaagacttgatcggtgattttaattcatgtgggtaacatgatatagttatcatgcatacctcattgagaacgtggcctaggggcagcaagaaagagttataagacctggattcagtttccaactctgttattaactagttgagttactttgtttttttgttttgttttgtttttttgagaccgagtctcacttcatcacccaggccggagcacagtggcatgacttccgctcactgcaacctctgcctcctgggttcaagcaattttcattcctcagcctcctgagtagctgggatgtcaggcacatgccaccacgcccagctaatttttgtatttttagtagagacaaggtttcgccattttttttttttgctttttgttttttgttttaaatgacaccatgttccatgaaataattgaaccgaaaatcatagttctattgttttgtttcccagtttggccttaaaatcattaactcatttcaaatatacgagccagggttttaaaaagaggattaaattaatataagaacttctgttattaacattcttcagaagtcagtggctgtaaccagagtacaatagtcttttggtaaaccccgcttcctgtcaaaaagagaaaatcatcaacataatggaagagtaaatcagatgcacattttcttgaagactgatttccccttctcttgtttctttttgctgcttaaaatgcccctctgtcttcacacccaggcaatgaatattgtagacctcaggataagagaaatcctcactgttttgattgccacctactctgatattgcttggggagaatgacagaaatatattctggattggggttcccatgggtggttacagatttggtttgtacttaaccckcactgtcagattgaggaggtacctcaggatgcagttagaagccaaactctttttcttgagggtagaggaacatatagctctactaccaccagtgacctaatgaagtgcttcccataaagtcaccaatgaggttttcatttcaaatttaggactttaccccaaatgcccatataatgccattttcaaagagacatatagtaaacaggaagtaccctaattggatgtacagtatcctctcaggacccaggtcacatgagatttaagtagttttctcttgacttcctagggaggaatgcagtaggcatgaactgaataaggataaaagagtaaaattattcaaagaaacagccctgagggaaagtggtgacaggccaaaaaaaaaatcagtgagagattagttgtgtgtgtttgcgtgtgtgtgtgtgtgtttcaggacaaatacctacctagtctgtgagtgtaatacagacatgtttaattccaggcatctgaagccagtatgcatttccaagtaatggtgggaaagttggataggttgaaaggaaaacaacaacaaaacaaaaaacagcttaacgttgaatctggctaattaaaatagtacacatcaaattctgaatcaaaactgaccattatcttgatttgaatttgcagctcctggctaaatacaaaagcttgcaatgggacaaagtactgaggctggaggaggtgcaggctaaactagggattagtctagaagaaatgctgttggtcacagaagatgcccttcatcctgaaccctataaccctgaggagatctgcaggtgtctgggaattagcctggaggaactccgaacccaaatcctgagtccaaacactcaagatggtgagttggctggagaaagtatgatatatgttattccctcacttacagctggaaggtttcaatttctccactggttttagagaatacttgagggaatttggagactgtgttttggcaagcttaattatttagaatcttagcttcataaatgtattcattcattctttcattcancactatgctgggtaggcaagggtgaatgagacatgattcctgtcttccaggggcttataattcagtaagcttctcttttttatcttttttttcccttatccatttttttctggttattatgctacttgtataaaaaatggactaagttagagaactgctctaactctgtgaaacaatactcggaacactataaagtgttcacgtcttaggttgaaacttgtggcctactttagtgtggaagcttatttctatttgtggtctgctttcaattaactttatttttataccaataacatcagaaactgagatgaagcccaggtaaatgttgcaggcacaggatggagtcttgggctggcttgttcctcttagactagaggttatctatttgtgacaaatcagtactgggggcaaggacatctagttaagatccagttgcccttagcggatggttatgggggatgagtaggagattaatacaaacatcagcctcagggacccatttctgtctcattcagttcagttctacaactggttgttgagttgctactgtagatttacccacaaagtaatgtcttaaaggctggaagtactgaaaactttgggatgagataagggaatcatttggaagtagggattgggttttagtttctaacactgtcgatccaatttaatttgatgaagcttgattgagtctttagaaccagaataagcaaactatggcctactggccaaatcaggcctgccatctgtttttataaaataaacttttactacaacacggccatgtattagctatggctgcctttgcactataagagttgagtagttgtgatagagattaaatagtccacaaaacctaaaatatttactatatggttctttgcagaaaatgtttgctggctctcgttccagaaaggcagtagactaaagtttaccttagttttgccatgaaaataggcgtaacaggaatgcctctaagaataatctgtataatgtgctaagaataatgcttggtagcagaggtactaatagagtgatgagtgtggtgatggagttgtacttgggtctagggagaccagaaaacaaagaagtcaaagccagcttaaggccgggtgcaggggctcatgcctgtaattccagcactttgggaagccgaggtgggtggatcacttgaggccaggagttcgagaccagcctggccaacatagtaaaaccctgcctctaccagaaacacaaaaataagccaggcatggtggcaagcacctgtaatcccagctagtcaggtggctgaggcatgagaattttttgaatccaggagacagaggttgcagtaagctgacattgtgccactgcactccagggggagaccctgtctcaaataaataaataaataaataaataaataaataaataaataaataagaccctgtctcaaataaataaataaataaataaataaataaataaataaataaataaataaataagcaagcaagcaagctagccagcttaactaaggagttagcaaccagccaaaagttaaataataaataggtatttcctaggtaggcaaacagtcagaaagaattccagtctgacaaaacagtagatacagaggcagaaagaagtgagagaagattatatgtccagggaactacagatagttgagtgtttcttgaaaataatgtacatagtagagaatgatacagtatcaggccaaggttgtggacagacccagatcaccaaaggccttattaaataatttgtgtgtgtgtgttgtataggtaatgtgggaggtaatcaatatttattgaatgaagaagttgggtaaggtattggatagggagaggttcaggggaattgcctttctcctttgacctgagatattgatttctttaacaaatcgtattgacttctgtggactggaaattgtgctagatgctgggatacaaagataatcaggacacagtctctactttatagtgacttagtgtctaattgggggagagtgccatacaacaatcacaataaataatacctgctataataaaggtatttatcaagaaccctaagagtatggagggaaaagtggctcaggtcctgtagatggtggttcaattttgagctggatccttagagaaagttatgaatttcctagacttagagagattaccagcctttccaggtggagagtagagcttgaatgaagacaaagtagcacaaggagtcgagtactggagaacatgcaccaagaggtattgtgtgcagtatgagttagaagacaaaaagactgcctaaaaggatgccaattaggaaactattgctctatactctatactgaatgagaagagcctgaagtaggatagatggctcaactggtagattctcaagactgtaaaatagaattcagttgcaattggcaattgctggtatctaggagtgaaggaaagaagaaagagaagaaggaggggaaggagggagaggaagaaggaagaaaggaagggaagaagaaaagaaatataaggtaaataaatccaaggtatggataactgggaaagttaggaaattatagtattgaagtgattttggcagtaagatgacaagctcatttctctctctctctctctctctmtcwatatatatatatagatagatagatagattcatctatctatcattgaatttgtctggtgtgatagcaagatatctaaatagagatgtaaaacaggtaaagatccaaatgatataataattagatttgggggttattgttgaaaaggtgagaaagtcttaatagacattgaaaatgttgactatgaaatgattttaaaagagtcatttcatggtgtcacttagttcagaagccttcagaggcttaccattacctaattgcctgagctcttctagtcctgtcttaactaagttctgtcctgtgtcccttttgagcccatacttgcctgtgtggacagtgttaccttggttggaccattccacttactaattggaagcttggtcttccctctgggcttttaatcctaaataccactgtgcttttataaatgaattttctcccttttctgaaatgcagtttctacctgtcttaaaagcttaatataattcttatcttctgcttatgcttcttaatccacaacctattctcttgctctgtatccatcttcctttctttctgcatctgcctgtcttcctttcttttagattttttttgaataagtaaatttcccagaatgctttggaaaatacaaagagcaatttgcttatcaaacaacatgtattgctctctctctgcctctctatgtatatattcataagcttttcctcctgaagaataatgacttcatggtttttgtaaaaatgaggcatgcttcatcttatttctttttttccagaacttttatttattttctttttcaacttaattttaggttcagggcatacacactaggtttcttacatgtgtaaattgcatgtttctggggtttggtgtacacatgattttatcacccaggtagtgagcatagtatccaaagggtagtgttttgactctcactctcctaccactggccatcctcaagtaggccctggtgtgtacttttcctttctttgtcaccatatgtactcagtgtttacctcccacttacaattgagaacatatggtattttgttttctgttcctgcattaatttgtttaggataatgtccctcagctgcatccatgttgctacacaggacattatttcattcctttttatggcagcatagtattccacagtgtatttgcaccacgttttctttatccagtcaactgttgggcatctagtttgattccatatctttgctattgtgaatagtgctgcagtgaatatataagtgcatgtgtctttttcttttttttttttaagacagagtttcactctgtagcctaggctggagtgcagtgatgcgatcttggctcactgaaacctctgcctccctggttcaagagattctcctgccacagcctcccgagtagctggggttataggcacctgccactacgcccagctaattttttgtatttttagtagagacagggtttcaccatgttggccaggctggtctcgaactcctgacctcrtgattcacccgccttggcctctcaaagtgttgggattacaggcgtgagccactgcacctgtccacatgtgtctttttggtagaatgatttatattcatttgggtatatacccagtaatgggattgctgagttgaatggtagttctgttttaagttctttgagaaatctccaaactgttttccacaatggctgaattaatttacgttctcactagcagtgtataaacattcccttttcttggcaaacttggcaacatctgttgttttatgactttttagtaatagccattctgactggtgtgagatgatatctcattatggttttaatatgcatttctgtaatgattagatattgagcattttttatatgcttgttggccatgtgtatgtctttttttgagaagtatctgtccatgtcctttgcccattttttaatggagttatttgtttcttgcttgttgatttgtttacctttttcatagattctggatattagacatttgtaagatgcatagtttgcaaaaattttatcctatctctgtaggttgtctgtttactctgttgacagtttcttttgctgtacagaagctctttagtttatgtctcacttgtcaatttttgtttttgttgcaattgcttttagagatttcatcatgaaatctttgtcaagttctatgttcagaactgcatatactggctgttttttctagaatttttatagttttaagtcacacatttaagtttttaatctaccttgagttgatttttgtatatggtaaaaggaaggggtccagtttccattttctgtgtatgaatagccacctatcccagtaccatttattgaatagggagtcatttctccattggttatttttgttgacttcgtcaaagatcagatggctgtaggtgtatggatttatttctgagttttctattctgttgcatcagtctatgtgtctgttgttttatgctgttttggttactgtagccttgtagtatagtttaaagttgggtggtataatggctccagctctgttctttttccttaggattgctttggctatttgggcccattttttatttgaatttttgaatttttttttttctaattctgtgagaaatgacattggtagtttgataggaaaagcattgaatctgtaaattgccttgggcagtatggccattttgataatattgattcttcaaacccatgagcatggaaagttttcccatttgtttgtgttgtctctgatttctttcagccatgttttgtaattcttattgtagagatctttcacctccttggttaactatattcctaagtatttcattctttttgtggctattgtgaatggtattgtgtttttgatttggctcttagcttggacattactggtgtataaaaatactactgatttttgtacatggattttgtatcctgaaactttactgaagttatttgtcagttccacgagcctttgggcagagactatggggttttctaggtatagtatcatattgtcagtgtagagagatagtttgacttcctattttcctacttggatgcattttatttctttctcttgcctgattgctgtggctaggacctccaatactatgttgaataggtgagaatgggaatccttgttttgttctggttctcaggggaatgcctctagcttttgcctgtttagtatgatgttgactgtgggtttgttatagatggctcttattattttgaggtatgttcctttgatgcccagtttgttggtagtttttaacataaggagttcttgaattttattgaaagtctttatttctattgagatgatcatatggtttttgtttaattctgtttatgttgtgaatcacacctattgatttgcctatgttgaactaacctttgcatccaaggaatgaaggctgcttgatagtggtggactagctttgtgatgtactgctggattcaatttcctagtttttgctgaatagttttgcatctatattcatcagggatattggcctgaagttttctttttttgttgtgtctttgccaggttttggtattggaatcatgctggccttatagaatgagttaggcaggtgtccctcttcttcaatttttggaataattccagtaggattgctaacaggtcttctttatatgtttggtagaatttggctgtgaatccatctgctccagggctttttctggttggtagattttttattattgattcaattttagaactttttatttgtctgttcaggaattcagtttcttcctggttcagttcctggagtttattcatttcttttaggttttctagtttgagtgcacagaggtgtccacaatagtgtctgagggttttttgtatttctctgaggtcagtggtgatatcacctttgtcatttctgattatgtttatgtggatcttctcccttttttctttattaactaggcagcagtctgtcaatcttatttattcattcaaagaactagttttggtttcgttgatcttttgtatggatttttatgtctcaatttcatttggttcagctctgattttggttgtttcctttcttctgctagctttgtggttggtttgctattgttttcctagttcctttaggtgtgatgtttggttattaatttgagatctttctaatgttttgatgtaggtgttcagtgctataaatttcctcttaacactactttagctgtgycctacaaattctgatatatatttgttttcattagttttacagaattaatttcattgccttaatatccttctttacctaaaagttattcaggagcaagttgtttagttttcatgggattgtatggttttgagagatcttcttggtattgctttctttctttctttctttctttcttttctttctttctttctttctttctttctttctttctttctttctttctttctttctttcgtgctgtagtctgagagcgtgattggtatgattttttttttaatttgttgagaattactttatggctgggcatgtggtcagtcttataatacgtgccatgtgcagatgagaagratgtatattctgttgttgttgggtggagtattctatagatatctgttaggtccatttggtcaagtgctgagtttaagtccctaatatctttgttagttttctgcctggatgatctgtcagtagggtgttaatgtctcccactattattgtttggttatctaagtctctttgtgggtctctaagaacttggttttataaatctgggtgctctaatgttgggtgaatatatatttaggacagttaagtcatcttgctgaattgaaccctttatcattatgtaatgcccatttttgacctttttgatcattgttagctttaaatctgttttgtctgaaataagaatagcaacccctgctctttttgtcttctgtttgcttgatagatctttctccatccctttactttgagcctacatgtgtcattgcatgtgagatgagtctcttcaagacagcatgcagttgattcttgcttctttatcccactcatcactctgtgtcttttaagtggggcatttaacctgtttaaattccaagctaatattgacatttgagggtttgatcttgtcattgctttgttagctggttgttttgtagcattgattatataattgctttatagttgatatggtttggctgtgtccccacccaaatcttatcttgaattgtagttcccataatcccgacatgtcatgggagagatcctgggaggtaattgaatcacggtgccagttatccccatgctgctgttttcatgattgtgagtgagttctcttgagaactgatggttttataaggggcttttccaaccttcacttggcacttctccttgctgccaccatgtgaagaaggatatgtttgcttctcattccgccatgattataagttcctgaggcctccccagccatgctgaactttgtcaattaaacctctttcctttataaattactcagtctcaggtatgtccttattggcagcaagagaacggactaatacagtagtgttggtgggctatgtacttaaatgtgttttgtggtggcaggtaccagttttttgtttccatgtttaacacttccttaaggatcttttgtaaggcaggtccgatggtaatgaattcccttaggctttgcttgtctgaaaaggattttatttcctcttcacttacaaaacttgtttgtctggatatgaaactcttggttggaatttcttttttttaaggatgttaaccttgaggtgacagtgtagggagagatgttcaaatcaagcagtggcttgaagcttctgttaaactagccagacttccaaaggcccatgcgcagttcttattttctgtttccaaatttctaataattagatttagaaatgctcagtggccattcaaattaaacacacacaaagcaaaatccttcaatcctttagatgttgtttagaaacttttaggaatagtttcaggcttatttgccaggccttacccacaggtaggaattgtctaagggtgtggtagagtggtctggagtcttggagcctcaggggccagacttaattgggagggatgtttcccatggtgtgacccaagaagaaaatttgaagctgtggtcagggtaaggagagataggcasatgtatcaagcrtataactcaagaacacacattggaggacagaagaatttctgagaaggtaaatgggcagtgaagtagagagaatgggtcagttggtttagattctagcttaaaaaaaaaaaggaatttgttgggagcatttcttttgggagtgtccaaactgctctgggttggggtggcccagctgcttagccacactgtgctggggtagacccaaatttcattacttcagttatcaactttgcctgtgaccacatgctgacaaagtgctggtcagttcctgactcatttgtttgccttgtatgatctccagagtcatgggtgataatcatgacttttaataaagaacaaagccctgatgtagattgctttttaggaagacacctagagtcaatggtaaagaaaaaaagaacaaaacaacttgttatacactttatagttcccacgtgaccatttacacacaccttctaatttgaatctcacaacaaccctggggcacagggttatctgcatttcacagatgaagaaacagaggtgagagaatttagtgatttgtcaagaccacataggtggtacgagctggagccggactccaaatcctagtcttctaacttaatccagtactttttctgccatcactttttaaatcttggcacacttataagctgcccttagcaatcctgcaccaattacgggaggtgatatcagtattttgactttgcttggctctaattttttcttgagactaaggagtaatgataaagataggtagctttatgtccaaagagtttcctttatggctatttsccattctagtgttttggccttagaagagataagactgtgtggcatctagaagcttgctttatttaaggaacaactcaacttggccataatatgcataagctgttgtgttctagaagagccatgagaagtgctatggaattttcacgtttaataaaaatgcagttctcatagattatcttggttaagtctaagaagattagtttgtttttatctaataaaaagtataaaggtgctttacaatgtaaaaagggtcagttgtttagtaatttaaatgtccagttgagggttctcaattatgaaggaaattgatttaaatgtagcttataagatatcaagcactaaactctgtgatctcaacagattccattgttcttcttgtaaatgttttggaagaaaagttttccatagaaagctagacgaaactccaaaggaagttttagacccttctagagtttacagatgttggttgaacagaaatccttaaaatctgtgagatggacttctaatgagaaagccaataaaatgggtcctttggttttgtctattgtttttgtttttatgagaaaaataatagactgttgtaaaacaaagtataaaagaataaatcaaataataatgatttttctttcacacaaaagatattattctttaagttgttttggaagtcaagtttgcagaaaatttgctttcattagtccttttttctttctctctctgcctggtcacttccttttgcccatcagcttctattgacttctcagttgtctrgctgtggaggacaggttcatgccaggaataaaggttcctaccttgtttcctagggaaaaaaaatgggcttacctgatatcgcagataaccaggaaattccacttcctctttcagatgtgtgcgtgatatgtccctattcattggttcaccttcccccttcaaaactaaaaatgaatgtgaacataccttattaagtaggatttttaaaggcacggcatcataaaacttgcaacttctgtaggaagagcctaggacatgtgttggaatcacaccagtgatttgtgttgtgtgttggtcagcttctcagccgctggtaggtaggtcagtactcacagtgtgactcttgtcccacaaggctaatggtgaccatggttctggcttctgaggccagcagagaagtaacaatgtgcatgaactgccgtggcaccagctgctcctatgtagacctttgaagcatgaaaaatacatgtctctcatcattcttagtatatttacttatttgctcattttccctgtatgtacctggtttcctgaccctgccaactatcttcttcactccagctgcctccttggccttggcatcactggcctccttggtctcctcagctctgaccaccaccttggtccagccttgcaggcctctttgtttctgaccctgtagttcctgtacatctcctcagccccagctgcttctttggctctagccttgctggtcttctcatttgtggctgcctcaaggggaaggaagggaagaaaaggaaaggaaaatgtataatttctaaacttgtaaatatatgtatttaagtctaaggaaatgttactcagtattccctttgcttaaatttatcatggatgtatctctgtctttcaggagtgaaattatcaaaggatcagctgtgaagttattagatactatgttttgagtagaatgaggcttctgcagatataaggacatctcattgtctcctctgtcactcctctgctggtttggaaacatctataggaaagcatcttctatagtcatcatcaacctaagaggccaacatcttgccatcctattttccttttttgctacttatgctttcatttttacattttgtaggtttccacataagtaagtgttctctttgtatacaaagcagcttttcttatggtgaaattcatttattttggtcaaagtgattgtcctgtactggtaagctcaaactgattgtgcttcagtaacaaacaatttcaaagtctcagtggcttgaccaagcaaaagtttatttcttactcactctttatatctaacataagtcagcaaaagagtttgttcatctaagacacttatggagctgggctcagagggctccatctcaacacgtttgtccacaatcatggcaggaggaaggtaatgttgttaattgctctctggctcttaacatctgccagagtgactggcatcacccctatgctcattcgattggccaaagccagtcagatggatgtgatgaacttcagtgagggtgaggtagtacagtcttaatatgtgtgaggatagctggaatatttggaagcagcctaatgacaactgtactttcccatgttgagtggctatgagtctcatcccatcaaatcttggtgataccaatgagaaccaatttactttctcatatacaaataygaagttgacattttttccaaacatctgggacaatgaatattgctcttgatcaaatttcaagttattttcatttaagaattagacagacatactgtgatctctttttatgttacacatttctctcatactggcattttatctgcacatgatctggtgaaagcttacttggtaatgatggcttgtcactttcttccctgtcttgcagagttcatggtctcttttcaggagccagtcattctaatatcctagttcaagaaaacatctycttctgtttattagttgttcaatttctgtagtcctttttcaaagtacttagcttcaggtggaagaaagtttcctaataatttctaaattagaaattgtatgctattttctacctactgtgccatttgtttccaggagagtcagctgaggcgagtaactgtggatggatctagtgcctttttgcaggttattgccaaatattaatagtaatgacaacaaaaataatgacctattgtatgtgtatagacactaacagtttaaccatatgagatctcatttgatcatcattcatgtggcaggtttcagacgaaaatatgacaggccaccactctatattcagggtagagacgctccatagttttttagaaaatgtttgaggaagatggtttcttgttttgtctttagaaaggattagaatgggagagaccacaaagattaacacccttagtccattaggacttctctaatattgggaaacccttattctgtcaagggccactgatggaacagtaaaaaagaccagagaccacctacataggaaagcaatataatttagtcttttaatgagaagttataaaatgttccaagaagaagcaatataaaagtctacttaattaacacaagaaatagcaagatacatgcttcatttctctattttagcctaaaaagggaagggggacagagaggatgaagatcacaagggaaagagtcatatgaataaagaaaacaggaaagagaatctgataaaggggggaaggttgcttatggaaaagcacataaacacaaatgcagagaaaccacaaacaaacacacctgtgtgcattcacttcccaactggcttccggagaactacataagcacatttgtaatcatggagtgctgtgaaatagcagcatcttgatttattctttcagggtattgccagttatagtgtaaacaccttgagaataggaacatctctagatgtttgtgaaagtgaaagatttttatcttcttaatgctgcactgcattttggaaagttcaggtatagtgtaggtgtattgtccttcaataggaagttcggagaagggccacatttggcacatgattcagagctccctcactttcagtcaccccaggtcactcttcctgttctgctccagtacctaccttccaaaagcaaactccggacaacagcctatgtaatctagtagggccattttacatgccagatagcatagtttcatacttgcttaaactgttgacgtaatctgttcactgactactttttcatcattttgggaaataaataacataagtagagatagatttttattcctttatcaacaaatgtttgagaaccagctatttaagcactgtgctaggtactgtgtattagaagtcagtaaggccagcataatccttattattatttaattttgtgggaagacaacaataaaataataactaaagtgttctaatagaaatatgcttatttcacaggtaagcactaatttttcttttgcctctctttcacccctttttattcccttatgtatttttcctgtaattcaattaatagaagaaatctaggataagagcttattccctttcatgtaaaaataccaggccaggccagccctaggcaagcatgaccatgtttctcatagtccttcttgcagctctgcattgaccacgattccttcttaactctctaggttcctttttaaatggcttgaaattgtttcctcttttcacattttgcaagaatgaagttttagggaagttctggaaaattaatgggaaagtaattccctcaagagagtgagacacaaaaatgtggctcatccagggagcagcttcagattcttcccttgctaataagatgagagcaagatgatgtgtattgagaacctgccatattcaagacactctattaggttccaagggggctataaagataaagagggcacagtccctgccctccagaagcagtatatggtaactataattagaaaggaacacaaagtaattaaagaagtgtgccgasatgggaggtatggatgcctctgactgttatgtttttggagagttttgtgaaagaggtggcatccaggctgatactgaaagagatgtggggattgcagaatcggactgggtaggatgctgatgcagcatcttcattctggtactctgcatgctgccagtggacaggcaatgatggtgcagggcaggtatctcaagtcaacggggagaggatagtgtcacaaccataccatttgggggactgttgatgtttcttgatgaattgaaatacgggggctttcatttgttgggcaatggaaaaatacgctagatttcgatgcaatgaaatattcacaaatgccacaatcaaaatggcaatttgggaagtttgttatggtatgtatgagcaggttgattagaggggagagggataccagttagaaggtagtgcaatggtacagacatgggatgataagaatccaaactacaaaggtagagggtagaatggaaagaagagagtgatgggctctgtcttgtaatgtgtatgaccctggagttatttacagaagcttagcatatgccagcgtgtaaaatgcaggtgagggtgactacagtggagtgaggcaaaggttttgatcagcggagtaaaatgtactatggaacagaccttgaaggctcttgctactttggaaatctgagaaagggaagccataaacatgaggagcactgttactctccataaaacagcattatgctgttgattttcaaatattcacaaatgcttcttggaatgtacttttccatggattagtgtgttttatgttgaaagtgcattttttttcatcagcgagtttgcttttaaaatcaggtaaagatattttccctttaaatgtaaaatgctaatttaatttagtctttgcagcatgggaatgggatactaatgtggctgaaaacagcagtttattttttgtgggtttgaccatttcagaagtttaacatttttaaaaaatattattactaggaaaataaatttgaaaccacattccagcttcaatgaggattattcaagtgtttttcaattatattgcttaaatgctccaaagagtctttgcctcagagcacggactttttattatgacttcactgcaaagggaaacagaggactctgttctgggttctgaagtggttttcctcatccatctctggattgctcttcttggaaaccaacttttggtttagcctagtggagctttctatttgttagagaaattgaccagtaatgtgtagttatatgattgtgcatagccagctacagccacaactacttttagcccctcactcaaacagtgggaaaatattctagggtatgaaagtctcagaaagattaattatacacgtacatgataaagatttccagttatctcagaccagcatatttattctttatgattaattatcctgagatagtcttcattcaaggtaatgaaatattcttaaaatacttattgctttttagcttgatagctgaaaaccaatgctctgcattcttctgtatttataaacctttatgcagtttggtgatatgaggctacgtggagaaactcgctgcataaagaatgagggagatgatggtccagctctcccttgcagtcatcagctgacgtccagaactgcattcaggcctgggaaccacccttcaagaagggcatacacagactaaagtgtatttggaagaataaacaggtgaaggagactggaaatttgatcatgttggaacttggaaggttgctctggagagaagactcaaatagttgtggtatttcactgctgcagtgggcagatggcagcagccatagttttggctacctagcatctgggccccttttccatctcagggaaatctgctgtgtgtatgttggtgatggagaaggtcttgcattctatggtagaagctgaagggtcagatttgtctcttttgagtcacttgacatctgcatgtggacaagggtactaggcttcttctggtgtccgggcacttgtttatggctggggctttgagtctaacaggcataggtcagttgataaagtgtctagattccaatgtcatatccagactgctcttgtggaatgattttggcagtgttcttcactggctgcttcccttagcttctaaccacttcccacctggtttcacgttctaatagagaatggaaatatataatcctaaaagattttgtgagcttctcaatatcttcaaaacaagtttcttttttgcttaaggtagttggtgtaggtttctgttgtttacaaacaagaatgctgactgatataattactaaaaacataatgatttcttatttctaactggaattattttattttttactatttagtgaattttttctttaatttttagttaacatatgacaattgtgcatatttatagggtacagagtgatatttcaatataggtatacaaatgtgtaatgatcaagtcaagataattaggctatacatgacctcaaacatttagcatgtctttgtgttgggaacattcagaatcctcttttctagttgcttgggttttttttttgtttttttttgagatggagtttcattcttgttgcccaggctggagtgcaatggcatgatcttggctccctgcaacctctgcttcccgggttcaagcaattctcatgcctcggcctcctgagtagctgggattacaggcatgccccacgacgcccggctaattttgtatttttagtagagacaggtttctccatgttggtcaggctggtctcgaactcccgacctcaggtgatccacccaaagtgctgggattacaggcatgagccactgtgctggacctcttctagtttttttgaacatgtataataaattcttgttaactgtagtcactctacagtgctataggacactagaacttattcctcctatctagctacaattttgtaatcattctcttcctacttgccttcccccactacccttcctggcctctagtaactataattctattctttacttccatgagctcagttatttttagctcctgcagatgggtaggatcatgtggtttttaatctctctgtgcctgatttatctcacataacataatgccttctaggtttatccatatttctgctaatgacaggatttcattcttttttattgttcaatagtactctattatgtgtacatgccacattttctttattcattcatctgttggtgaacatttaggttgatcctatatcttggctattgtgaatagtgctgcaataaacatggggtacagatagccctttgatatactgattttctttcttttggataaatacccagtaatgagattgatgaatcatatggtagttctatttttagtttttttagaaacctctatactgttttccataatggctgtactaatttacattcgcaccaacagtgtagaagagttcccttttctctgcatcctcaccatcacttgttatttttttgtctttttgatagtagccattctaactgggtgagacgatacctcatggtggttttgatttgcatttccctgatgattagtgatgttaagcattttttcatattcctgttggccatttatatgtcttcttttgagaaatctctattcagaccctttgcctattttttaattggattttttgttgttgttgttgttgagttgtttgagttctttgtatattctggatattagttccttgttagatgaatagtttgcaggtattctctcccattctgcaagttgtctcttcactctattgataggtttcctttgctgtgtagaatctttttagtttcatgttgtcctatttgtctatttttgttgttgtcactggtgatttttgttgtcttacgcataagttctttgcctataccagtgtcctgaagcatttcccctgtgttctcttctagtagttttatagttttgggttttacatttaagtctttaatccatcttaagttgatttttttatatggtgagagacaggagtctatttgtcttcttctgcatataaatatccagttttctcagcaccatttattgacaagcgtatcctttcctcaatctaactggaatttttaaccaggattcaacaatagctttatggaatctgtgtgtatgttgtgttatatgcagtattttggttatttgttcattcacatgggggagagagtccattgttttatttacttctcaaaaggttctgtaatccctaaagggccaagaaccacttatctgcaggatacaatttaaacatcttagcatgacatacaaagtcctcattatctggctggcctcagcccattgctttgattttctctyctgttacattctctgttgcttctatttctttatcctcttttcatgctccagtagtcaaagtactttgtttctctaaaagcacctaatggtttataatctcgacgtctttgctcttaacgttctttctgcccaacccttttctttgcttcttatcccaccatttcattggtttgctgaacacctactcatctatttagacttcactggtttaattcctatgtggatgtaatgattactgtgctatatcctcttggatatatccgtattgtactttatattctgatttcagcattgctggcagcccatgttaagctagcagcttgtatgagtgcctcttctttgtagccattgtgcgttctccaaagtcactaaggcagatgtgttacccaggcacatctttgtggagaagttaacccttctagggggaaacactcaaacaatgagaatgtgaatgggtcaatgccccaggcttcccattgcctgtgggccaatggtaggcacattcgacatgactcttcagagagatccctgagagattgggccgggggctgtccacacagttaatctgctcattaagccccctttattggcttgctttctttcctgaatcacttttcttcctctttcactcctgctttctagattactgctccctgcatccaagtctttatctcaagctctactctcaggtgcatctagatccagacaccctcttgactgtgtgcatctattttagctgtgagatgctgctttagcatctcttgccctttgttgatctcatttaatgatttctttctagtagactattacttgtggggcgtaaacagcttatcttattgtgatgtgagtgggcaccatccaactggctgccagtatgggtagaacaaagcaggtagaagaagggagataggttttgctgagtcttcttgctctctttctcttcctgtgtcagatgcttgtttcctctcctcaggaaggacatcagattctatgttcttcagccttggaatctgggacttaaaccagcagccttctgggggccctagggcctttggcttcagactgagggctgcactgttggcttctctggttttgaggttctcagacttggactgagtcatactactgtcctctctccctccccagcttagagacagcctatcaaggagacttctccttgtgattatwtcagccaattctccctcttttgtatacctatatatcctgttgtttgtgtctcactggagaaccctgattagtacacttattcattattggtccctaagcaggtacatagtggaccctcaacaatgtgtaaaaggcacagtgcatgagagctgtcttcagatatctgaagggttaccttgtgtttacatatgtctggggaacagaaccaagaccaaagagtagaagttacaggaagacagattataattcaatacattgtttatcagtgcacctatgggaggtgatatttgatagcaacagtaacagtggctcattatggcatgatgacccactcagggaagatatttgcccactcttctgctgagaagtcctattatagaaagttttatagaacaaggaccacaagcacatacctgcaaggaccaggctggcatataaactagtgaggcaggctaagtgtcacatagttgggaatggtgagaactgtgtggaataaagtgtgtgtaccctgactcaaaggggtaggtactccttagctccagccaacagttgctagacagtaatgcagatccagcactgtcagaccttccagttttccaaaagtaagtagaaatccagattcttaggtaaatcttccaatataaagacatttgagtcaagaaggcatcaccgtggctggctatggcacatgggttgtttgtaatctttgtgtagtggatgtagctgaggatgctaaagcctcagatgtgaggatagctttctagagagccagattctggtcagcttgctctcttcaggcccatgaacacactctgcctgttcccaccttgggcctttggccatcctctcttcacagaagggacactgtgtggctcaggcccctctcctgtgacatctcccactactggtccttccccagcaagccctgtcttcttggtgcaccttcagcatttccagcactcagatgtctgctgcaattgctcactgtctagtagtgtcatagtttgtcttatctgtgtaactaagttataagttcccttaatgcagaggttctacttcatgtggctttcctgtcatttggagcacagtattgggtgcatagcaggtgctcaataagaactgttggttaacttttgctagatgactatcatactcagtgcttatggcatccctcttagtagaagatgaggtaataaagaagaggccaccagctcttgcatggagaacttaaaattaaatcagtgaagctctttcagatgactcagtgcttttggcattgctcttagcagaagatgaggtaataaagaagaggccactagcccttgcatgcataggttaaatttaaatcagtgggactctttcagagatgaaatagacatgtcctctatctactgttgacctgctgtcctcagagcttaaagtggcgctcagtgtgcctcacctgtcaaaggctttccctcaccatttcccaccagagatccaataaaataaccarttatgtgtgccctgatttagawtccttgattagagatgggttctgatcataaactatgtaaccatcttttaaaggaaaaygttaataggcaactctttgttacaaagattgcctaaaagaaaaactaattttaactgtttacaattatccatttttatattctttctcttttatttgaaacagattttgttttagaaatctcttttctctcacatctgtaaagcaaaatacaatataaacaattctcagtcatctgtgataatgaatattagggtatactttgggcactgaagtttactaattgtttccaaactttattttagcaaactttccccactttttggtgaggatgctagtgagtataaattgttaaaatagtatgtctcctttatattccatattgtacttgtctcactactgtttatttagcctagtttcagtgcagttttgttacaaggagaaggatttgaattatgcattcaacaaacatttattgaacccctactaagtgccagatcctattttagctgctagagatagttatgaagaaactagacaaggcccttgctttcttggagctgagcttccattggtgggagacaaccacaaaccaatgaacaaatgaacacacaggaaaatattggatggtgataggtgttgggagcataaaatagaatggagaaaatatgtatgtgtgtgggctactccagattggagttgagtctcttcaaagctgtgacatctgagtgttgaaccacaagaaggaaccagccatgtgaagatcttggggaagagcatttcaggacaacaaaacagctactgccaagggcctgtcacaggagccacatggtgtgctggaagcacagctcggaggctgggcagaaggaatttagccaatataatttattatacaagccaaaattattagcaacaaaatgaaatatttattttgcagtttaagtatatatagccatgaacatttagatttcagaatttgtgccatgatttcatgactagattcagtaattatttaagattcacattggagaaaatcagtgttctgaagactatgmcgtatatcccgctttgaagttttggatttttcttgaataggataggccattaacaatattggaggaaaatatcatctagtgttatattcttaaattgaatttgccttggaagtaatcatgcatgcaatgaacatagtaagaaacagcttctttcatcctttaatgtaataattgctcccaaggattacaagagcttatagacagctggaacatccagctataatgttagctgracagggaagaaagttgttatggataaagcttcagattttcttggattttttggtatctgtataacagagacctgatgagttgccagcacataacaagccagaaccctggatccagagagcatttgtgacattcagccaacacagaactgctttcccacccaaagggtggtctccaaatctgttgtagcttttggcaagatttttatatcacaattgaaaacagatgccctttctgccctttcccttgytgtctgagttactaccgttcaagagattgcaagccatggcaatctctcatgcaccttcagaatgcccagcaagagtcctcgttagacattcctattcagaagtcctgctgtgacacacttcctctgcaagaagagaacagattcaggaaggtgccaggattgtgaggttctggtagtctgcagggtgtactgtgaatgctttttgtcaaaatcaaagcaccagtcctgggtttaatagaaaacatctctctggatagtttctattttaaaatatttaatcctaaaataaaatatttaatcctaaagaaatatgtaatcctaaaggaaaaccaaagtgtactctccctgatggactatattgagttttattacaggatatggccctaaaatgtgcttggatgggatattgaaaatccagagtatcaaaaatcactaaactactaaattcttgattgactaaaagagacttattagacataacaactgaatataatgtgtggaatttgtttggatcttggtgtaaaccagttgaaatgtaaactggtggacaattgggaaaatttaaatatggactgaatatcaggcaatattaaggaaccactggtaattttgttaggtgtgataatgatatagtggttatctacgaaagtaagagttataaggacagtgctgtggaggggaaaaatgaaacctgaaactttaataagatttattggttcaaacaccacatgttctcactcgtagctgggaattgaacaatgagaacacatggacacagggaggggaacatcacacatgggggcctgtagtggggtgggggtagggggcagggatagcattaggagatatacctaatgtaaatgacgagttaatgggtacagcacaccaacatggcacatgtatacatatgtaacaaacctgcacgttgtgcacatgtaccctagagctcaaagtataatacaaataaatamataaataaacaagaaaaatcaagggcaaaaaaaaaattattggttcattagtagaaatgtaaaagtgcttcagaaaaagtaatcatagtttaggggagaggaacctaggggcagacccaggaggagagaaagtcatgtagaaaaggagattttgaaggatgttcagtgtccttcagtggaaagacactgccagctctaaatggctctgcaagggaggagccggggaataaatcctctgacatcactctcttccctcccatctattgctgatcttttcctgctctcaaatctagatggcaagggactcactggtgtagtctatacaggtcagcctttggggctgatagtagggtggaaaagggcagagagtaggactggggtgtaaacaaaagctaccagtaacagcatcttctttacaaagtataacaatatggggggaatgttgaaggatagatacttttggaagaagcccttcatagaattataaaatgttagggctgggagtatcctgagaagtgattctcaacctcattttagaggtgaggaaataaagggagcattatacaggtagcaatttgtgtacagctagttgtcacagatctgttaagaaattacagactttttgatatgaacagacacttctcagaagaagacatttatgcggccaaaaaacgtgaaaaaaagtgcatcatcactggtcattagagaaatgcaaatcaaaaccacaatgagataccayctcacaccagttagaaaggcggttattaaaaagtcaggaagcaatagatgctggagaggatgtggagaaataggaatgcttttacactgttgttgggaatgtaaattagttcaaccattgtggaagacagtgtggcgattcctcaaggatcttgaactagaaagaccatttgacccagcaatcccattactgggtatatacccaaaggactataaatcattctactataaagacacatgcacacatatgtttattgcagcactattcacaatagcaaagacttggaaccaacccaaatgcccatcaatgatagattggataaagaaaatgtggcacatatacaccatggaataatatgcagccataaaaaaggatgagttcgtgtcctttacagggacatggatgaagctggaaactatcattctcagcaaactaacacaggagcagaaaaccaaacaccacatgttctcactcataagtgggagttgaacaatggacacatggacacagggaaaggggaacaacacatactggggcctgtcagtgggttgggagctaggggagggatagcattaggagaaatacctaatagagatgacgggttgatgggtgcagcaaaccaccatggcatggtatatctatgtaacaaacctgcacattctgcacatgtatcccagaatttaaagtaaaattaaaaaaaaaaattatagactttttgattttcagccctgtctctttcccctaggcctgggaattttcataaattttccaaaattttcccagacccaccacaccagctcagcaactgttcagcatgggtgaaaatggtaaggaagtctcagttgttattcacaggaatgtgtaagcattatagacatagccattgcaatataccatgtttctgtagctgaaattacagtgtcactgtgggtaatctggaaaatacatatatgtgtcaaaaggaaaataaaatcacccataatggaccacagagataactaatattaacattttcgtgctttcctatcagttttttaaattaaaatatacataaatatgtgtatgcaaaattagtatcagttgtacatatagttttgtaggttgttttttcacttaataatgaataatttcctatatatcaaattgccttagaatctgagttttgatagcagtaatatttcaaaaatgaatatagcataatttttaaaagtcctctgttattagatatttgtttcttattttcttctatgataaataatgctgcaatatatatatataggtacatatataaacattatatatcccatataaataattgtgtttatctgggacatataatatttttatttaaaaaattgccaccataagaatttccagtggtcctttctgttggggcagagtggaaagaacatggctctagggccaggcatccctgatctgtttggcttccgccacattctggatgtgtgtccttaagcatgtcacttcactctattgagcctccttctcttttctgttaacagggatcatactgcacatccctcagtgctgtgatgagaactttatgaggtagtacttttctttctttcttttttttttttttgagacggagtcgtgctctatcgcccaggctggagtgcaacggcgtgatctcagctcactgcaacctctgcctcccaggttcaagcaattctcccacttcagtctctcaaatagctgggattacatgcacccaccatcatcatgcccaggtaatttttgtacttttagtagagatgggttttcaccatgttggtcaggctggtcttgaactcctgacctcagatgatccacctgcctcggcctcccaaagtgctgggattacggatgtgagctaccgcgcctggcctacacaaagtagtattttaaagtgtttggcatgtagggtgtactcattacatgttaggtctgtcttcatttgggatggattagattgcacacaagtatatgcacatgtgtgttgagtgaagtgaaggaaatatagttacaagattttattcagtatcaagaaaaaagtaaacctgacttgccgatagacacatttcaattgaaagaatcctttcagcaagagagacctattgaagtttaagatactgataatgaaaacagaaatgaaagtctttaaaagtgtatttttctttatactgggttgtccagtaactattcctaacctccttccccatcctcttccttcctcagtgctcatcttcaaactctatcagcgggcaaagcatgtgtacagcgaggctgcgcgagtgctccagtttaagaagatatgtgaagaagcacctgaaaacatggtccagctgctgggagagttgatgaaccagagccacatgagctgccgggacatgtatgagtgcagctgccccgagctggatcagctggtggacatctgtcggtgaggcagcctggtgggggccaagggatgccatcaaataatattgtttaaattaatggaaaaaaatgcaacatttcataatctacgggaatgaagatcattccccacttcctatatgaggagtctctgatgatacagagctacacttgttcccttctaaatacctgtaggatgaaagatttgctacctggctccatgattttatgaggctctgggtttggagtcagtttggagtcagctctttacatcatgagaaagacctttccgtctttggatgattaggcctttcaggatggtaactttgctcagagctgggccctgttaactttcttatgatatgttttattatactgctgctctgccagaaactcctgtccagtgtcctaattaagtttagtagttctactcagaagaagggagaaaactgacagaggatctcaagcttgatgggagcatgtggggagatttgctgaaggaatcacccagaaagccagcatttcctgccttctaggtttagtttaggcagtttgaggaaataaaggctgaagaaagcccaggtgatacatggttaatagaggcagaaatgtaaagaggacaactctttcacaaagcctaaaatcagctttcctaaaattgtgaaagaatggagataacagagttagtcctcttacccaggaaggagctcagtgaccctgggagaactgaaactgggaaagttctcaaacgctagatgttacttcactgtgagaacacaatgctacactacaattagtaatggaaatgtaattaaccacttggcacttgtggcttgcctcagtcattgccacactcccagcctgaaaagtttaaaccaagtractccagtgatcacaaatggcctgggtaatccagcttgtcaaaagacttgaacacagcattgatgaagatcactctgctgacatgtttgctcactcatttccaaaagccttccccagcttgtttcattttaagtacccttttctgaaaatatcaagggcctagtatatggaagggacaaatattgttcagttctggaaataagaggaagtggaattatttctgcagagatcaggaagaaatgtctttgcctggaaggaagtgggatggttggaatcccacctgaaaagctgcggaagggcatttgccagcttcctggaattctctaataaactttctcttcctagagtggtcaacctgtacttgttttcatggagcttacattctcgtggggaaagagagaaatgacaattaaaaataatttgaatggtagtgataagtgctatggaaaaaaatgagaaggamtagagactacaggtttgggtgggtactctttctgtggagtggttgaagaaggtcactctgacgaagagatctttgagcagaggcctgaaggaggtgaataaatgagaacagcaaatgcataggccctgaggtggatacttggctgtcaggtgtgaggctcagcaggatcagcatggcagagggccaggaaggaaggagaggtagtagatgaagtaaggaaggaagtggggagccacaccatataggccgtgtaggccatcggaaggcttctggctttgagaagagaaagggggcaatggaaatgctaggcaattctatgccaaatatgcctgcaaggaagacttagataattgctgtgtgggtataagagagaaatcaagacgactcctgggtttttgtcctgagaaactttccttgtgcctctaaaagccacatttttgaaaagcacacttcaccactgtaggtaagagttatcttagagtaccataaaatattagatcaggaaggggtcttagagatccaggaaggcactaagagatgaaataatttgagtaagtttcacatatgagttcattggaaagcctggctcccaatccaatgattttgccacacgtgcctctccccttgggttatactaagatgtgattacacttaaatgtgggtcatacatacgtgtgtgtacgtgtgtgtttgtaacctattttcatctcctagctttgaagctttatgatggaggcctttgttgtcatagtttccagyatttgaacattaagcaaagtcatgttgagcaggaacgtaatgtgtagagtaggatgaaaagtgggctggaagtgaggaagcttggattccgactctcttttcattctgagctctgtgagctggaactgttgcttcgctttgtgttctccattggctttttctgttctagcagtctacagacctatacatttaaaaaatatggttctagtgaaaaagcttatggctatgtcttaaatgggtttggaagagtaccttttatttatcttttcattttgtttgtttttggaaaatcctttcttaatggcagctaaagtgtttcattttcatttgctgtatttattttctgagaaaaattcagttctgtgaaaaattcaggagctccatcactttttcatgattgttttgtttggaaagccaattgctaagtatcaaagttattttctacttattcgataaccatatagggtccaagttttccatattgaaagattatcttctggcttgttggccagaatagttgtctggtccttaaagcttcttatataattaattttttctttgctgtcactgtgaccagcagataatattcttcaaatgtttcagttggctgcaagttactgaaaggtcctaagtggcagagcaacctcagaggaggatagccccaggggaattaagttgatgcaggcattatgtccttccctccttcaatcaatacatattttcacatgggtatctttgtaccgtgtgaaattgcagtctattctctactttcaaaagctgtgactttctcttgccgggcccaattgctcacacctgtaatcccagcactttgggaggccaaggcgggcagatcatgaggtcaggagatcgagatcatcctggctaacacggtgaaaccccatctctattaaaaatacaaaaaattagccgagcgtggcggcatgcgcctgtagtcccarctactcgggaggctgaggcgggagaatggcgtgaacccgggaggcagagcttgcagtgagccgagatcgcaacactgccctccagcctgtgggacagagcaagactccrtctcaggtaaaaaaaaaaaaaaaagaaaaaaaaaaaaagatgtctggaaagtaatgaggcaagaaggaggggttcagaagaatgcagaaattagtgggaataagataaaggatggataaaggatggggaagacagacggtacaagagtagcaggtagtaacatggggaaaggttcraatgaacagtggagctacttgtaagccctagttccttctgaagccttgtgactgtctcactgggtcaggcagagaaggtgttggacataytggaaggggtcctggcaaggcctggtgtgagccactggtgccacagacacaacctctagcaaagtattgctttgtttaaaaaccaccaccacctccacaattaccctgccaccattaaaaatgttaacatcagtagggaaggtgtgactaagactgggcagcctgagcaggttgcttgttttccccaaaagagggaggaggagggaagctgaaatgggttcaaggaggagcactgccaaaaataatctttacatcaccctccctggtccacttatggcacttcaaaattcctttagtgtttctgaagggcttcttggaaactatttgtatgaaaagacaactaattgagtgagtaaattaacggcttgaatacctagaatacctaagttgctatacacmagcagaaaatcttacagtgatctgagctagactgaattaaaaaggcatctcctacttagcatataggacaatgtatagaacaactttgtgacccaagtggagagaaggggggttgggaaagagcaccactgctagctgtctttttcagttgaaccttttcctgctcttcaagagaaaatcagtttagaatctaaagaaaggagcagggaggatgaaggaaactatacttacagagtgaggcttttttaaaaaattaaattaatgttagaacttaaattatatgaaacaaagtaaataatgaaggaaaaagataatgtttgctgaattataaagtatcttttgtagccaaacaaaatgtaaacagaaagaaatgactaaattttaagtagaatttactggagaacacaaaacaattttgaaaccaagtcagttatatgtgagacagctcattcactattggttccctcgttttacttaagacaaaatggttaatgccttttgtttttgttttgacacttgttgaagttagagaggattaattgctgcattatcgcccaagctattaagggagatgaatgacaaattttagtggatcaactatgattacaaaagttaatttactttgtcttcctcagaagtctttctgcaatgtattccatggtgaggctgctcagcctctcgcatccattcttcaacaaggtcataatggggaagaatgaagtgcaaatccattgttgcatgctctttccccatgaccttaagtgctaacatgcataccctgtcaaaaaaaaaaaaaaaaaaaaaaaagagggagggagccatttcacctccccttaggggttcacttctctttgggcctctttgacttatgaatatacatgccatttgcaggacccaaacccactgctcttcaatggcctttaagtggcttacatttctaaagtagacatgtgggcatattttcttatcctttctcatttgaacactgaaggctgtggtttcttgactgtaaagcaatttgaaggcacggtgtctaacctggctgtaaaaatcatagaaactgctagaagttcccttacctgtgactcttgccatttcccagagagcagaagctagaagtcttctcaagtaaaaaaatacactgctgactgcttatattatatataatttttaaaatattttaagggaaatatcgtagtccagcagccatttattagaacctagaatttctagaattgtgctgggctggggtcagagagatggatgtgacctgttcctaaattctagatttcctgaaataatttatttcatatccatttgtataatatatatttacttatttagaaagaaatgacacagaatttaaatacaaggcataatttcttaccttccctctttttcaagtgtgtagtgcagttgggtctcctggatctcctccccaccctctccattgctctgtatcttgcaacttagtaagtgctttatggtcgaattagttcacttaaaagtaggaaatttgactttggctatattgggtgcctggatagttaattctgtgaatacacaaggatcaaagagtaacattcctcataatctccatccctcatctgccctagcctttgccatcgtgctttataaagtagaggctgcctttgttgctttaacaaacccttctacattattcccaatctagtcatcacaatcatcaaagtgggatccgagggattttagggttttggtttttgtaattcttgtattgcctctctgatgtgcaayagctcaggagatatatttttaatgttttattgttcttccagaaaaaggcgcaaacatgaaaagttcactaaacacccttggttcacttacttttctttcttaatttaaagggtatatcggtctcctaactttcggtcttctcagaatttctatggcatatgccaaagggcctattaagtaccagcagggaacactgcagacagacctttctgcctttataagtgtatacagctgcgcaggctgctgaccagctgctggggcagccctgacttgtgatcagatgtgccactgacttgggggcagaaggctatttctaatagcacttatcattctttatttgggaaatttgagccctgatttcagaccatgtgattgatgcaattcagtccattttcatctgtagcaggcagggtggtgacagagcagctctggagactcagtagcaaatatctttacctacaaagacttccagcttctgctccctggaaactagtaaaagtctcaggaaaatagacctctggcccagttcctataggttttacagccagattaaaaataatactctgtttgctttaggttcaattttgaaaaaccacagctttcaaaaactgttcaaatgagaaagtataataaaatatgccttttagaagttggattgaggacccttaaagacttgataacttgagtccagcaaaacggcatattttagatcttagaaaatcaagtaagaaggcacagtattcttctctagaccatgtcatggctggctttaatgcccatattttagggtcttccagagacacttcagtgacacctcagttttccccagcatcttccacagtaagagtttgatacgactgcatatgacaaccatttttttttttttttttttttttgagatggagtctcactgtgtcacgcaggctggagtgcagcggtgcaatctcggctcactgcaacctccacctcctgggttcaagcagttctctgcttcagcctcctgagtagctgggattacaggtgtgcacccggctaatttttgtatttttagtagagacggggtttcaccatgttggtcaggctggtctcaaactcctgacttcatgatctgcctgccttggcctcccaaagtgctgggattacaggcgtgagccactgcacccggcatgacaaccattttttaaatccaacaaactgcaaacaggccctttgccaacctagaaatttagaataatccaaggatcccaaggtcagagaaattttttagcctggatgatgggatttcaggcttagtcactgggccataaattgaatgttaaagggataggaggagatcagtgatgtttatttgtttgtaagcattttttttctttcttaaatacctatgttcatttgaaaagcgtattttaatatatataataaagcagatgataaaaagaaatcaactgagaagaatcactgacaggaaaatcaattactgacatgcagtaattctgatgttctagagtagaggtagtattctattgatatgtccaggaagtaaaatatctcatttagattgaaaaaaagagacaaaattgtgctaaattaatcatagagcctttaatccactagtaatttggagtgaattttattaagaagaattaattgtaagtacatgttaactttcgtgtcaggataaattgcatcttttaaagctaagtgatctgtgtacattgtgatagggcctttcactttggttgaaatcttaggtttgaaactgtgcctggtttacagtaactaaaattaactctagctgtgtggtcctttatatagttgttatcatcccaatcagatatatctcatctgatgtcaacttctgagtccaataatcagactagctccagaaggcacagggaaggtggtgtggacctctagggactgccctctgctttgtggaaaggcttggttaattttccattagagattcaaccaaccaccgacccaacctggagtttaataacaagctttttgttgataagtttattcagtgaactaggctatctgttctaggggactgattcttctttgaaacagcccggccttaagaatgcagctgaaatagccattggggaaaacttgtataagactgtacattttaaattttgatttgtcctcatttggagtgaccttctgattcagggttgcctacatttcttttaccattgcctgttttatcttaacgcctccttcctgatttacgtgtaagcttgctatacaactcttcaagtggctactttatggaatcaatattacagtgggttattgccagtcatgaaatgggaggagtactgttgacttaccacttggagtcaaaaccagggactagatttagatacaatgaaaaaattccaaatcactctctgaaacagtataaatgtcttaatgtcctaaaatgtttgatgacacctaaaaaccccgcatgtattttcttcttagaacttagataggctatgtgttctacaaacaccaagcaaatcccttgtattttcatttataggttctaatatttttttcctcactgttttaggaagtttggggctcaagggtcacgacttactggagcaggatggggaggctgyacagtatcaatggtacctgcggacaagctgcccagctttctagcaaatgtgcacaaagcttattaccagaggagtgatggaagcttagcaccggagaagcaaagtttgtttgctaccaaacctggaggyggggctttggttttgcttgaggcctgaaaaaatgtaaaaagtctgagagaaactacttagggcacttaggaattggcaggactttctgtgccacagtaaattaatcttccttctgttttgtattatgatgaacggttgctattatatcaagatatattttcaaagaaatggttgaaagctctctatgcttcataatgattctttttccatcttaaaatatggttttactattaagagccaagatcatgcttggacagatcttttaagaataacttactgagatttattgatttgaagattttaaagatgaatggtaaaacacactcttaatactgattacatggattggacttgaattaaatatattgttacaattaaactgataccactgaattgtatgcattattcttgaatagagttcatttctggtttctcttagtattcttcttcctcaaagttgtagttgtctgttgatgatggtgatgatgatgatgatgacgatagtgatgccacacattctctctcaatttcagcttcggaacgctatgaaaataatacatgattaaagtttcacagatcttcttggacattgtataattgaatttgaatgtgagatttctccagttatcaagagactaaggattttttttttttttgacaaaaggaggatacaggaagaaaattcagactcatttgaatatttgtaaaccatgtaatatataaataaccactttcaattcttttggccctgagctatctccattacttaatagaaaaacttagataaaaaacactttaagactcttctattcacattgaaataaagaattatctagatgataattcagataattcagtttgttcatagaattactttcttatcactctttttctactactttttctcaaatacctctctaatccaagaggcacttccaagaaattccacacattccttatatcccttttttgcttgtctagcaaagcttgtttgtatatatgcaccccattgtaaagcaggtatgcaggtatgtgggtgaaagtgactatgaaaagacttaatgaattctgggatttgtaatggtattgatgggtatctctgtatgtatatcaagagtgggcagaaatgtttggctggtgatggcaaatgactggctttctcttgtggatggactataggaagcactttctgaattatgtaatgatttggaccaaaaagtattttgctgaaatactcaggtaattgagatagcaatggttttatggcatgaattatccaaaaaaatatcagaattacttattattctgtgatttcattagctcattaatgtttaactcacagattgggcatcaccatctagaatttcagtttaagggaggcctgcgcaaagctagttttatttcttaaaggataacagtcatacatagaatactaggaaagccaatattctatttaaaaataaacttctgatgcattttcattcttagcagaaaggtaaatgcttgagaaagcttgagtcaaatttgttaaaagaattttgagttctataaatccaaaaatctgaaacctgaatttatttaaatttataatcctttattttttaataccgtgccattttccacaaaggatttgtggttggtatataattctttaaagatacctggatcagtgtaaaaaaaaaaaaaaaaaggcacctgtcattgttttgctgttccatttacaattttcaccaggtgatttcttcttcacaaaaggtgagtaaaaatttccaatgtgcactcttctttgggggacacacatggtcattctaagcgagggatctattctatatttgttttgatttctctcgataaaaagaactatgtttcagtcttactatcactgtgtggtatctagatattatgagagatgctaaacttacctggaagggatagggccggggccattagaaaaaagatcatgcagtaaatggactttgagcatggccctaaaagatgaggagagtttaaaagctgtggagtgcacactgcagatgagcaaagcctatgggtataggcaaacatggtgtgtgtaggaggctcagtgagagtgaaggctttgctttggtatgtagtgaagaataagattgactacactggctggagctagcttttgaagagtcaaatccaggcagcatttagatcaggggttatagcccagcagcccatgggccacatctggtctgcagatgtatatagtttggcccacagaatgactaaaaacttgggctccaaatcaggagattgtacaagcagtatcagatattctggattactcagaatctggattactgagtggtggaatatctgatactacttgtccaacatttctacagggcatcaatgaactagggctgagatagtagctgccttgttagatgaggcatggctatccagtgcgctacagtttccacaactgcttgtataatagtttccctgacactcaaatcatttaccacttaccagctgaggtcacttgccctttatcaggacacttgcactgttgttttcctattctaattaggtatttctctgtgcccatgtccctatcaatagtagggaagatagaccaaaaaaaaaaaaaaagagagaaagaatgaatatttttgtgtgtggatgtaaaaaatagtccttagctgggagtggtggcatgtgcctgctgtcccagctactcaggaggctgaggcaggaggatcacttgagctgaggacttcaaagctacagtgagccatgactgcagcactgcactccagcctgggagacaggtgacagagtgagaccctgtttcaacaacaacaacaaaaatgaatagtcctgtttgcttattatactgtcctgtttgtatattatacaacacccaggtgtttcactctttctatcacttttctgccccatgtaggaatttgatttgatccatttttgacattatactagcagccaatgggattgctctagatttttgaatggaagccttgacatgctgaaagtaaaaggctctcctctatccctgacctccaattgtccagcattcagacatattgtacactagtctctacatgttcttgtctgttgggagagaagaagcccttcagacttaacaagaatgcccataagtaaagagaagcaaaagagaagatgacaaggaaaatcagaaagatggaacaggctcctttcttttctttctttctcatacttgagtcctgtttagaaccttatcatattctgccttgataattgagggcagggaccattcatctaacacagctgttggtacccaatatgattttgttgaattattaatgaaaaacttacaattttaaacatcagtgattattagtttgtaattctaactgcatttggagcttttcagttacataaactgttcctggtcagaagctggaaatggggaatgtgaacatgagttgtcactaaatatgtaaaacagattttcttacatgtgcatgtagatgattaagtaacaagaatgtatcctctcctgccactgtaatttgggtgtgccaccatacattgcttatgaaatattgtccagtctatataaaagaagctagagagagaattctcaattattttcagaaagaaaacctaccagtttatgtaggaacttctcaaagtcctgtttcacttcatgaggtttcttggtagcctttgcttggagtctaatcatggaataaagaaaatcagtaaccaaactaattgtccttatattgacaccatctaaatagccaacatttattaagaatttaatatgctgggcattcgtcaagcactttacatatattaattcaattacccttaaaacttctgaagtaggtactcctattatcctattttataaatgaggaaacaggctgagataggttcagacacccacccccgctgcatgtgcacacgtgccacacacacacacacacacacacacacacatccacaacagtcatacacttagcaaggagacagtctgaacccaagcactgtgactcaagccttcagttccacccactgtgtggttctcatcccagcagtggcacatcctcttcagttagatggtttacacagtattgctttaactgattccactcataaggctctagcccagactttaaggagtgacagtggggagagaagagtaaaagagactggcaaggtagagacacaggaaagaaagagagggagatggaaaaggccagtgggtgacagcgcttactagactgtaagctcattgtgagcagggatccaggaatctcatgatatctgtcaccaagtattcattcaagaaatatttatgaaggacttgaatggttgaaatcaggaagcagcaggaacctttccagagatctaagaatgaggggagaagcaatggtagctaggcaaggaaggatagaaacttgagagaaggagaaacattagtaaaagtaacacagatgaggaagagaaacggaataaaggatatataagactattaatttcactggcaattttcaagtgaaatatttaaaaactatttttccatgaaattggcaggaagtaaaattttctgcaaatcccaaatacatgttgctgaagcagcaagtttagatgagctatttaaccccttgccaggcctagccaaggtttcttcagcagttagactagtgcacccctgaaggcagagtgggattacttagtcggaggttctcttgcatttgtgctctgtgactggtacatgccccctcactcattctctctctgcttgttttgtcttctcaagctgagtttcctccttgctgattgctctttaggcttcacatttttccttccatgccagtctcaaatctggctcttagtttctcagtaacaccttcttagaatctccttgaactgcacagtatccttagaatctgtctcatctcactaagttaaaatcactccctcttccaagtcactcttttagtttacaatctcccctctttaaaaaaaattaagttttattgagatatgttacataccataaaattgacccattaaagtgtacagttcagtggttttagtacattcatgaagttttataacattactaatcctccctctttctgattgcctttcctctcatgagtatctcttttgaagattacaaatggaagctcatacattgtgcctataactttaacaagcacgtgagatttatatatccaaatacgtatgtttcaacaatgtgccattgcattaatcatatttgaatacttcttgtgagttactctgagaattgtcctacattcttctgcatattctcagtggtgaaaattcttgtcctatgtggatttgatttttggaaacttgtaagagtcacccggaatggaaccttgtaacaggtgttgtgaagcagaaagctgggtgataaagtttttggtgaaaagtgagataagatcctaaagtagtgggttgaaattttctgatgtgactggaaaactagctttataagttctaaaatagtatttagaagtgtgaagtgtgactggcacaaagttatagtctccctagggggcttgtctgaagggctggacttgtctgatacttcttattctgcacgtgcttacgggtgtgttggaagaagtaggttaatctcaatactttatagttgttcttcctatagtttaatttataaaataaatgagcccaatttttcttgcttcattgaggaaaaatgtttatatgcatagaggaagaagggaaataaaaaactagcccaatagagaccagctaaatctgttgtttttctagtttacaacttccataggatggggaaggcttataggtttattttgaaaaggacttgagcttaagtcctatggctggagagtaaaaatagatgatgataatgtttagcaattaattagcagagtagatgattttgtgattaaagaaagttaaaatgttactccagattaactgttaactagaaaacttttgcagttttgtggttttatgtaacatctcttcaattaaagatgatcttaagcactaccaagctgaataagagacaaacctatcaagctccttgtcaattctttcctgctgctgttttagaagttttatttcttcattaattctgagcttttccctataaagttaaagtttgaagttaaattttaaaataatgcaggcattactaattgggaaagaataaatcaacaatttactgatatacacgtgttagtaaaagccctctacaaaccaattcattccctccctatgcactatttagtgtaaagaacccctcagcacattccctgttacaaacatatgccaaaggtatcacccacaacacctgagtacagctggactccaccttctgctaccacaggggccctctagaaaggtgtccatccgtttttccc

SEQ ID NO: 94124 - DNA, 62984 bp, Homo sapiens
aatcccaaaactttgggaggctgaagtgggcagatcaccttagatcaggagtttgagactagcctggccaacatggcgaaaccccatctctactaaaaatacaaaaattagccgagcacgttggcgggtgcctgtaatcccacctactaggaggcagaggcaggagaatcacttgaaccccggaggcggaggttgcagtgaaccaagatcgcaccattgcactctagcctgggcaacaagagtgagactccatctcaaaaaaaaaaaaaaaaattctagtgttctatatcactgggggataactatgattaacaataatattttcaaatagctagaagaaggatattgaatgtttgtgctggagacaaataaattatatatttgtgaggccaggcacggtggctcacgcctgtaatcccagcactttgggaggttaaggtgggcagattatttgaggtcggtagttcaagacaagcctgactgacatggtgaaaccttgtctttactaaaaagtacgcaaattggccaggagtggtggcaggtgcctgtagttccagctacttaggaggctgagacatgagaatcacttgaaaccgggaggtggaggttgtagtgagccaacgtcgtgccactgcactccagcttggatgacagagcgagacaccatctcaaaataaataaataaataaatgatacattttttagatgacagatatactaattatcctgatctgatcactaaacattttatgtattgaaacatcactatgtgccccataaatatgtacaattatgtgccaattaaaaattaaaataaaataaaacaacaacaaaaagagaacacagctttagagccagccagacctgaatttgagtgtgaactttaaggtcttttagctgtatgactttggacaagttgctttacttctctgaatctcagttttctcatctgcaaagtgggactgataataatacctatcttttaaggtcgtagaagattaagagatataattattggccaggtgccatggctcacgcctataatcccagtactttgggaggccgaggcgggtagatcacaaggtcagtagttcgagaccagcgtggccagtatggtgaaaccccatctctactgaaaatataaaaattacccaggcatggtggcgggtgcctgtagtcccagctagtcgagaggctgaggcaggagaatagcttgaacccaggagacggaggttgcagtgagccaagatagcaccactgcactccagcccgggcgacagagccacattctgtctcaaaaaaaaaaaaaaaaaaaaaaaaagacagagagagataattcttgtcaactgcttagcacagtgtttagtaagtgcatagtaaatgtgtagtaggtggtaactactacatggcattcagtattcagatccttcataatttagcctctccctgtccttctagtcacacctcctgcgacatcactactccagcatctctcccctaacacccaattctctgtcatgcctctatgcctttctttctccttagaatccctttcctttcttttctaattttatgggagagtggagtcttcctgaacacccattcctctctttccaggcacaattcatataactatggagatgatgtcttctgtagtctctggaatagttccaatctcaaatattgtctgttgtaaagactgttctcattttttattctgaaaatatggttatcaaaccatagcacttacacaaactttatgatggcacctattacattgtattctaatgattcacatgtctgttcccctcattagtctgtgatctttttgagggcaggggcttaatcttttcctttttttaattaaaaaaaattgttttggagacatggttttgctctgtcgcccaggctggagagtagtggtgcaattttagcttactgcagccttgacctcctgggctcaagtgatccacccatctcagtttccttagtagctgtgactacaggtgcgcaccaccacgctcagcgaatttttgtattttttgtagagataggatttttgccatgttgcccaggctagtcttgaacccctgggctcaagcaatctgcctgcctcagctcccaaagtgttgggattacaggagtgagccatcctgcctgatgatgggcttaatggtcatctgtgtattccaggaactctaatagtgcctgggacgtagcttgggctaaataatgttaattgagtgaattaattaatgaatgattaattgaataaatagcccatcctcttattgtagaatcctttccttgctcttgccagtccccatcacttcattctaatcttagaaacttttctggccgggcgcagtagctcatacctgtaatcccagcacttagggaggccgaggcaggcagatcacgaggtcaagagatcgagaccatcctggctaacacagtgaaaccctgtctctactaaagatacaaaaaattagccggacgtggtggtttgtgcctgtaatcccagctacttgggaggctgatgcaggagaatcgcttgaacccgggaggcggaagttgcagcgagccaagatcgcgccactgcactctagcctgggcgacagagggagactctgtctcaaaaaaaaaacaataataaaataaataaataaataaaataaagaaactgttctaagatatgaatgacactttaataaaggtgtgggtgtgtactcacatgtactgaagtctgtacctgtggccctactttgaggtcatcagattgtaccccctttcccaaagtatgtattggtgaactcccttttctgtttccttggggcactaagccaacatgtcctgctctgcccctgtttccacaccctgccacgtcaccacagttctactatgccaggaatgttaccggggaggagtggttccatgactcagaggacaccccaggtactgagtgggagtgggggcgccccagggactgagtgggagttggtgaaattaaaaataaaaatagtacttgatgaaaataaaaattaaaaatataaaaaattagctgggcgtggtggtgcatgcctgtagtcccagctactcgggaggctgaggcaggagaatcgcttgaacccgggaggtggaggttgcagtaagccaagcgccactgcactccagcctgggtgacagagccagactctgtctcaaaaataaaataaaatggaattcacagattagctcacagggagaagattcctctgtttgactgcgttggtcattctgggatttattagtctgtttccaattttaaaatcagaaacagctttacatcaacaccagccgattttttttttttttttttttttttttttgagacggagtctcgctctgtcgcccaggctgcagtgcagtggcacgatctcggctcagtgcaagctccgcctcccaggttcatgccattctcctgcctcagcctcccgagtagctggggctactacaggcgccggccaactcacccggctaattttttgtatttttagtaaagacggggtttcactgtgttagccaggatggtctcgatctcctgacctcgtgatccgcccgcctcggcctcccaaagtgctgggattacaggcgtgagccaccgcgtccggctacactatccgatttctaaagtaactcaggaaatggtagcaatcctatgccttttcggaaaacaaggataatttattcaacaaatatttatttattgaatacctatgagccaaatcctgtgctcagtgtgcccctcactagttcctgtcctgtttagttgagtggagggtataggtacagggaattataaaatacttcaacacaacaaaattccactgctgtggaattacaaacaagattttgtctactttcggtgcccaaaggaagacgaataatccagcaggtggcagcagggaaacaattatcttagatcttcataagggaggagtagaaggctgcagtaaatgcatggggatttttttttttttttttttttgagttggagtttcgctcttgttgcccaggctggagtgcaaaggcgccatctcggctcaccgaaacgtctgcctcccaggttcaatcaattctcctgcctcagcctccggcgtagcgagtagctgggattacaggaatgctccactacgcctgggtaattttgtatttttagtagagacggcgtttctccatgttggtcaggctggtcttgaactcccgacctcaggtgatccgcccgcctcggcctcccaaagtgctgggcttacaggcgtgagccactgcgcccggcctttttttttttttttttgagactgagtttcgctctcgttgcccaggctggagtgcaatggcgcgatcttggctcactgcaacctctgcctcctgggttcaagcgattctcctgcctcagcctcccgagtagcagggattacaggcacccgccaccacgcccagctaattttttgtatttttagtagagacgcggtttcactatgttggccaggcttgtctcgtactcctgagctcagatgatccacctacctcggcctcccaaagtgctggaatttcaggcgtgagccacggcgcccggcctgcatggggatattctatggatgttcgggtcctaggttactttatgaggacccacaagacatctggaaagaggataaccaggtcattctgggggttacaaaacctgttttttttktttgtttgttttgttttgttttgagacagtttcgctctgtcgtccaggctagagtgcagtggcgcgatctccgctcactgcaagctccgcctcccaggttcatgccattctcctgccccaggctcccgagtagcctgggactacaggcgcccgccaccacgcccggctaattttttgtatttttagtagagacggggtttcaccgtgttagccaggatggtctcgatctcctggcctcgtgatccacccgcctcggcctcccagagtgctgggattacaggcgtgagccaccgcgcccggccacaaaacctgttttaatggagttatttcatgggccatgagtttgagaggatctatctgaccgactcttaccccgaatgttttaccattcctctttatttattcattccacagataattatggagcccctactatgtacgaagtcactggaggagctggagatacaagagtgaaccaaacacagtccttgctccccagaagttttacagtctgctcagagagactggtcttcccaccagggttcatagcctacggggtactttgttaaaaacgagcagttactacgaagactacaatgggagaaatttttctgtgtatctccatgccctttggagcacagataattgacagttggaggctaaaggggttgggtcgcgggaaggttgtgataagtccctgatagcctcccgtgcccttttttgacaggtcttcactgattcatgcatcaaatatttactgaactccgtcactgtgcagtgcctaactttgtgcttgaggcaaacaaaacacagatctatttcgaatgccattccgaggaaggtaagacatgcacgcacgtttaatcaaatagtaaacaagagtagtaaaacaggaaaaagactaagaagagttcttggtggtattaaatgttttgtgatattcgacaccttaacgtctctgacttgacaccagtactcccgcagagagttctttcctgggttaggaatttcagaggacttggcggaccgactcttgtcccgagttcagatcactcgacccagtcctagcaaagaactgaacctaagaggacctgccgagccaccgtagggactgtcggccaacccgcgcgcgcacatcttccacccgtggactcgtcagggcgtgaggacccacctcacgtgaccattagcagcctcccgattggttttgctccttttttctccccaatgagtgggctgatgccccgagaaggtcgggcgcatgcgcagtgctcggattttttgcttggctacccggagtgaagcggccgggttgggcgattaacaggccgtggttaggaaggacggagaaggggcgttcgctcctttgggacttttcatgcctcgtttttttttcagatgtggcttggtctgggcgcaaggtcccagcagccagcttaagcttactcttctgtgaaaggggaaagtatcccctgtggaaagcggttaaacttgtggagggggtgcgggacgtgagttcttccccatgccaggcgaatggtgtggccttgagctggtccaggagccggctcgacgtgtctgagggaggccccggagggggcggggaggtggcccacagaacgcgggttctgtaaagagacgttgggaagattcgattccgagaagaggaagaaccggattgaaagagagccaggccgctgagggggagggggctgctaagatggcgtcggcctcctccgggccgtcgtcttcggtcggtttttcatcctttgatcccgcggtcccttcctgtaccttgtcctcaggtaagcccggcagggcgtgggtagggagctggtgaggaatatgcgatgggaggaagagcgagacctaagagggtacctgtagctgggaatgtcctacgtgttaccggtaagtgggcgcgagctgggctttcaaatagggatttatgagcgggcaggagtttgaggaaaggataagtttgattaagaagttgtcgaaaactttggttgtctttgaggaggacggatggagattgaaggtgggggtagggtggcccggcgcggtggctcacgcctgtaatctcagcactttgggaggccttggcgggcggatcatttgaggtcagaagttcgagacgagcctggccaacatagwgaaatctcgtccctactaaaaatacaaaaattatccggacagtagtggcgtgcatctgtaatcccagctacttgggaggctgaggcaggataatcccttgagcctgggaggcagagcttgcggtgagccgagattgggccactgctctccagtctgggcgagagagtgagaccctgtctcaaaaaaaaaaaaaaagaagttgcggtaggaaacaagagaaacggaagggagtagagaaactaagaaagtaaatggaggcctaagaagtagagagaactacttagtgtgagaggcaggtggaatctaagttgattgtgggctaattggatgaaaatgttgaagagaagccatgggacttaaaagatatcgaaaagttattggacgctttcgatttctggagaggtagggaatcgtgaattttgttgggtgggcgggagttgttgaagccatcttttccctcagatactcccccctaatgtgtcaccccttctcacttcgcacccccacccttagggccgcacaggcacacagacacacatacatactttctcagactaattcctttggtgattcccaactctaaactgcccaactttgggaaggaatggaaattttgaagagagtctaaggaatgtaggaaattaaggtcaaagaccttaaaaacagatgggaaagatggaatggagtcttgaattgcagtagagactgcgagaagtgatgttttggaaattaggcctgagaagaagaaagatgggtgggggggtgactgtaagtgttgtgggggagtattgcataatagaaaaatggactggaagaatgcttacgctgtatcaggagattggaatttggagaatggagccaggttaatgtagagagctcagcgtattaatagttaaaaacgaatgaagattgagggagggctgaggaggctcacaagaaaagcagtagattgtgtgtaggggagaaagtgtgtgtatgtgtgtcgggtgggggggcgggaggtgagtcagaaactgagcgcttccatcagaagtgtctggtgtttcacagtaactgctgcttctacactggaatagacgctgccagatgttggatgctttgcttgagattttggtatttcctcaggcctggtgttgcgtttttgctgtttagaatttgctgaatagggttccttccacctttcacattccagctcagatgctgaaatatctagtcacacatatcttcttaataagctgcagttttatttatttttaataaatctctatttttagtttgttgagaggggattttttacctttcctataaaagtattaggggaccagaacaactcatgctgcattataagcatgaaataggataaagtaaaagtgacagggwatttatttatttatttatttatttatttatttttgagacggagtctcgctctgtcgcccaggctggagtgcagtggggccatctcggctcactgcaagctctgcctcccgggttcacgccattcttttgcctcagcctcccgagtagctgggactacaggcgcccaccaccacgcctggctaattttgttttttgtatttttagtagagacggggtttcaccgtgttagccaggatggtctcgatctcctgaccctgtgatccgcccgccttggcttcccaaagtgctgggattataggcgtgagccaccgtgccccacctgggtttttatttttaatagagtagctccttaatttgaaacctgcttcccctctaatccccaacccagaaagaagaagggttgtgtatggtccataaacaaacttctcaactattaagtcaggtgtttgctttgtactctttggtatttttgtaggtctttatgttttctgtcagatcctctcactaacagttaataatacagattgtataaatgtttttgtggttttttttttgagacagagtatcattctgtcacccaggctggagtgcagtggtgccatcttggcttactgcaacctctgcctcccagcttcgaatgagtctcctgactcagtctcccaagtagctgggaatacaggcatgtgccatcatgcctggctattttatttttttgtgtttttagtagtgatggggtttcatcatgtcagccagactagtcttgaactcctgacctcaagtaatccgcccacttcggcctccaaaaatgctgggattacaggcatatcgcaaggtcaggagttcgagaccagcctggccaacatggtgaaaccccatctctactaaaaaatacaaaaaaattagccaggcatgttggcgcaggcctgtaatcccagctacttaggaggctgagtcaggagaattgcttgaacccgggaggcagaggttgcagtgagccgagatcacaccactgcactccagtctgggtgacagagcaagactctgtctcaaaacaaaaaaaagggggcaaaaagtggctaaatttcaagctcttgatggactatggaaagattataatggcctccaccaaatccaaacatggtaattgctccaatagcaaaagtagttaaacatctcttagagcttatggtttgctttactctgtgtatttcacttgtcaacagtgtaaaagctgacagcttaatggtgaaactatctttaatattggcagggaacaaactctcctaaataacctctccttcccaatttaaatgccagaagattgggagtgcctagaagttgtgagtggcttatcaaaaactgtcaatatgtccttggctatgacatttttgttttatatccattttcagcattgtcagagaacattgtcctttaggatttcagagtttcaccaaaacttaagtggagttcagctaaacagctragaacagtaaatggttttagggtggttgacacgcacacttcttgaatttctacagggccagccttctagcctttaacaattcaggaaatcataaaccatcacttgttcctgccaacttcctaattcctctggtaccatgcagacaaagaaacactctcttccaatcgcaaataaaatcttttttctctttttttaggtggactcttgctcttgtcacccaggctggagtgcagtggggtgatcttggctcattgcagcctcagcctcccgggttcaagcgagttgcctgctcagcctcccaagtaacagattacaggcacctgccaccacatctgactaatttttgtattttagtagagacagggtttcaccatgttggccaggctggtctcaaactcctgacctcaggtgatccacccatctcgggctcccatagtgctgggattacaggcgtgagccaccatgccctgccagtaaagtctttttttttttttgagagggagtctctctctgtcgcccaggctggagtgcggtggagcaatcttggctcactgcagcctcagcctctagagttcaagcgattctcctgcttcagcttcccaagtaactgagattacaggcacctgccacgtctggctaatttttgtattttagtagagatcagatttcaccatgttagtcaggctggtctcaaactcctgacctcaggtgatcctctcgcctcagccttgcaaagtgctgaggtacatacaggctttagccgccgccgctggccttactttatgccctttttaccaccatgaggagagtaaagaatttctgtcttggaggcttgatttgaagttagtggttgggttagaagggataggatactaaggtgtacactgctcctatgaaataagagttgtggagtaaaatcatgtgtgacttcctcaaggaaaagcacttgaggctgggtacaatggctcacacctatattctcagcactttgggaggccaaggcaggcggatcacctgaggtcaggagtttgagaccagcctggccaacatggtgaaaccctgtctctgctaaaaatacaaaaattagccgggtgtggtggcaggcacctgtaatcccagctactcaggaggctgaggcaggagaattgcttgaacccgggggacagaggttgcaatgagtcaagatcacaccattgcattccagcctgggggacaagagtgaaactccatctcaaaaaaaaaaaaaaggccaggagcagtagctcacgcctgtaatcccagcactttgggaggccgaggtgggcggatcacaagctcaagagatggagaccatcctaaccaacgtggtgaaaccccgtctctactaaaaatacaaaaattagctagtcatggtggcacactcctgtagtcccagctactcggaaggctgaggcaggagaattgctggaacccaggaggcgcgggttgcagtgagctgagatcacgccactgtactccatcctggagacagagtgagactctgtctcaaaaaaaaaaaaaagaaaaaagaaaagcacttaaaccctagataatcatgagctgtgtagttccttttgcttcagastagaacatttttaaaatggtcatcgctcacctatatgattttatcatgtgcacaaatgatttagacataactttacagctgcttacctgactttttctcccccttaacggctcagggagatccagaggatacagtattggagcatttttgcttgggacttttatagtagggacagcttcatcagtctgtgattctgattgctttgttcttcccagcagagccctacctgtaacctgcagtaatctgttaactccagtagtagggattattgttgatatatatatatatttttttgagatggagtttcgctcttgttgccctggttggagtgcaatggcgcgatctcggctcactgtaacctctgcctctggggtttgagtgattctcctgcctctgcctcctgagtaggtgggattacaggcacccgccaacacgcccggctaatttttgtatttttagtagagacggggtttcgccatgttggccaggctagtctcaaactcctgatctcaggtgatctgcccacttcagcctcccaaagtgctggtattacaggcgtgagccgccacgcccggcctgtggatgtttttttgatctgtgttctgttgtgtacagtgtaagccatttgtaggctgatttctttcctagttcttcctcttagtgaaaagtaaagcagtttagatcatgttgaatgataaactgaaatttagaaatgcaaacatagaatacaatgtcagaatatcaccaggtgccattttggttgatattttataaatagggagatatttttctgtttactctccatagggattttgacactttccacccacccctttttccttttgtcaccttggtatattctgccagaaaactgacatcagaatgtcattgcttctgatcgatttatttctgccatgacactcaagcccattgtcagttataattaactagtctaataggtatccagtttctgatattaattgataatgtgtacttacacgttagygttgaatatcaaaatagtacgttttgcttattaatgtctgtgggcttttttaggttaatttaaaactcttctgattaatacctttgctcaaatatgtgctacctaatagctattaaatattttattagcctgtttttcttggataataaagtggaaactatagcctgtgaagtgaacaacagagataataccaggccagctagcaaactggggagagggaaggtggtaattttatcctttaaattgttctctcctagaatgttatttattatttttttgagacagagtcttgctctgtcgcccaggctacagaccagtgtagtgcagtggtgcgatcttggctcactgcagcccttgcctcccaggttcaagcgattctcctgcctcagcctcctaggtcactaggatcacaggcgtgcgccaccacgcccagataatttttgtatttttagtagaggcggggtttccccatgttggccaggctggccttgaactcctggcctcaagcgatcctcctgccttggcttcccaaagttctgagattacaggcgtgagctactgcccggcctctctcctagaattttggagcattcttacttgacgtaaagaagggaacaagagccgggcatggtgactcacgcctgtaatgccagcactttgggaggccaaggcaggtggatcacctgaggtcaggagttccagaccagcctggcgaaaccctgtctctacaaaaaatacaaaaattagtcagacgtggtggcgtgctcgtgtaatcccagctgctagggaggctgagtcaagagaatcacttgaacccaggaggcggaggttgcagtgagcttagagtgcactactgcactccagccagggcaacagagcaagactccgtctcaaaaaaaagaaaagggaacaagaaaacttatcagtttatttttctttcttctttttactgggtttccttgatcaaggacaaaagtgtacttcaagaatatactctttcctgatggccaggtagagagggaatctttgtttttctgtgctccatacccagcccagagagactgaatgaaacaccgatggtgtttcctagaggaaaccctaagaagcccrtttcccctattgcacctcacttctctgccctttcccatctaaacagagaatttaatttcgacatatgtttatcctgttttgttcatatctcctacaagcttttattcttttactgttttctatttgaagtgaacttttttccctcaacccctccatctttttaaactgtctccatttttctttattctcctgtgaaatttcagtctgtttatttgtaatggttgtattcagtatgtattaatttacaaatatctaattcctggaaaatctctcttgttggaatctgaggaagacattggcaaaaagagaggaaggtaggtctgttgtagggagttcagcatattcttattatttaccttgtatacttaactgagcaatatggaagtaatccagaataagctgtccaaaaagattagagatattggttgggggtgggcaaaggggaggtgagcaaaggaagttggcgagagggaatgagaagagggttttttgttcttgtttgtttgtttttaggatatttaattagagtatattaatactttttttgttttgttttgttttgttttttgaggcggagtttcactcttttgcccaggctggagtgcagtggtgggatctcagctctctgcaacctccacctcccgggttgaagcgattcaccagcctcagcctcccaagaagctgggactacaggcacgtgccaccacatccggctaatttttgtactttcagtagagacagggtttcaccatgctggccaggctggtctctaacccctgacctcaggtgatctgcccacctcagcctcccaaagtgctgggattataggcgtgagccaccttcccggctatttttgtatttttagtagagacggggtttcgccatgttcgccaggctggtctcgaacttctgacctcaggcgaccctcactgcaaccttcgcctgctgggttcaagcgattctcctgtcttagcctccctagtagctgggattacaggtacacaccaacatgcctagctaatttttgtatttttagtagagatgaggtttcaccatgttggccaggctgatcttgaactcctgacctcaagtgatctgcccgccttggcctcccaaagtgctgggattacaggcgtgagccaccgcgcctggtctgaaatatgttcattttaatccagcagaattcattgctgtttcaagatagaaccagatttggaaataaaattggaaggtggctatctgccaaaaatttcaagtgcctcttggccatgggtagcttattcaggaaacccaagtcttttaaggaaggacttggatttttttcttaatttcaaagaacgtttttgtgccaagggatacatatttgaggtctgagaaccatgaaacttgtttgtaggattagaagcaaaagttgactagagggaaatgtagagttattttaatttaactccytcattttccaaattaggaaactgaggtaaagatgttgcataaaggctgtatgttaccaagattaatctttttttttttttttgagatggagtctcgctctgtccctcaggctggagtgcagtggcgtgatctcggctcactgtgacctctgtcttccaggttcaagtgattctgcttcctcagcctcccaagtagctgggattacaggcgcacgccaccacgcctggctaatttttgtatttttagcagagtcagggtttcaccatgctggccaggctggtcttgaactcctgacctcgtgatctgcctgcatcggcctcccaaagtgctgggatgattacgggcatgaggcaccacacctggccatcaagattaatcttaataaatatgttgctccttcttttttttttttttgagacagagtttcgctcttgctgcccagtctggagtgcagtggtgcgatcttggctcactgcatcctcctcctcctgagttcaagtgattcccctgcttccctagtagctgggattacaggcacatgccaccacgcctggctaatttttgtatttttagtagaaatggggtttctccatgttgggtcaggctgttctcgaactcctaacttcagctgatccacctgccttggcctcccaaagtgctgggattacaggtgtgagccaccgggcccagctggctcattctttgatatactgcttttaattggctattagctgaggtgaccccaggactggtagatcaaattgctttcaagcttttgtttctagggacatccttgcacttctgactgtttcctagaagagcgttaggaaaaatttacaccagctaagaaacaaaatttagcttttctctgaaatgtggcttggttttcttttcttttttttttttttttggagatggagtctcactctgtcgcctaggctggagtgcagtggtgcaatcttgggtcactgcaagctccacttcccgctttcaagcgattcccctgcctcagcctcctgagtatctgggattacaggcgcacaccaccacgcccagctaatttttgtatttttagtagagacggggtttcaccatgttggtcaggctggtctcgaactcctgactttggcatccacctgcctcagcctcccaaagtgctgggattacaagtgtgagccactgcgtccggccgtggcttggttttcttaatttgcttgatccagtcattattaaggatgttgtaatggtacgcttttttttttttttttttttttttttttttggagacggagtcttgctctgttgcccaggctggggtgcactggtgcaatctcggctgactgcaagctccgcctcctgggttcacgccattctcttgcctcagcctcccgagtagctgggactacaggcgcctgctaccacgcccggctaactttttgtattttttttggtgggggtgtttcaccgtgttagccaggatggtctcgatcttctgacctggtgatctgcctgcctcggcctcccaaggtgytgggattacaggcgtgagccactgcgcctggccgctttttttttttttgaacacacttccttagagctatgtgttcagcagtacttctcaggaggcaggttgacatttcaagagtattttcagttgaagaacaatttgtgtctcccacctgcaggcgtatagagtgtctttcagtattccaagttaactaggaccagagagattgcctcagataatccagcaaataactgggtagattttgtttttgttctattatattgtaagggatcttgctttttttctttccccygcccaagacagagtcttgctctgtcgcccaggctggagtgcagtggcacgatgccatctcactgcaacctccgcctcctgggttcaagcaattctgccttagcctctctagtagctgggattacaggcgcgtgccaccatgcctggctaatttttttttttttttttttgagatggagttttgctcttgtcgcccaggctggagtgcaatggcatgatctctgctcaccgcaacctctgcctcccaggttcaagcaattctcctgtctcagcctcctgagtagctgggattacaggtatgcgccaccatacctggctaattttgtatttttggtagagatggggtttctccatgttggtcaggctggtcttgaactcctgacctcaggtgatccgcccacctcagcctcccaaagtgctgggattacaggtgtgagccaccgtgccccgcctgtattgttagtagagacggggtttcaccatgttggccaggctggtcttgaactcctaatcctaacctcgtgatctgcccacctcagccttccaaaatgctggagttacaggcgtgagtcaccacgactagcctgcatttttttttctttcttttttctgagatggagtcttgctctgttgcccaggctgattgatgtgcagtggtgcaatcttagctcactgcaatctctgcctcctgggttcaagagattcttgtgcctctgcctctcgagtagctgggattataggtgcccgccaccgtgtctggctaatttttgtattttcagtagagacggggttttgccatgttagccaggttggtctcgaactcctgacctcaggtgatctgcctgcttccgcctcccaaagtgctgggattacaggtgtgagccactgcgcccgccctccccggcccccccacttttttttttcctcgagactggatctcactctgtcatccagggtggtgtgcaatggcatgatgatagctcactgtagcctcaaactcctgggctgaagtgatcctcccacctcagcctactcaggattacaggcatgggccaccacactgctgtttttttttttttcttaagtagagacagtctcatcatattgctcagtcgatctcaaactcctggcctaaagcgatcctcctgtctcagcctctcaaagtgctggaattacaggcatgagccaccctgcttggtgtggcgctccatctttatcaaccaaaagtccactgagagttagcattttaattccaaaaaagctgcttatctctttgtgctctatgtaggaactattgacatacatatatattttttgagatggagtctcgctctgttgcccaggctggagtgtagtggcatgatctgggctcactgcagcctcccgtctcctgggttcaagtgattctcctgcctcagcctcccgagtagtcgggattacaggtgtgcgccaccatgcccggctaatttttttgtatttttagtagagacgggttttgccatgttgaccaggctggttttgatctcctgacctcaggtgatctacctgcctcagcctcccaaagtgctgggattacagtcatgagccattgtgcccgggcttattgacatatttatgtagtagtgttggtaggcaattaaattggacctcagggattgtttccctatgacctgtttgggcaaaactccagttgtctgaggaatgcatatctggctagcctttagtgtccccaaattatatgtttatttcaaacattagagtcagtcacacactgcttcttggtttctcatcagtagatgatgtcattgcatctctgacagaaatgcttctgctctgaaagtgcagggagaggctgtgctattaaggccaactctgttttgttccacacactagagtgaggagaactcatttcagaattatttgggcacagtggtttccacctgtagtcccagcactttggggggctgaggcaggcagattgcttgagctcaggagtttgaaaccagcctgggtaacatagtgaaaccctgtctctacaaaaaatataaaaattagctgggcatggcgatgtgtgcctgtagtcccagctactctggagtctgaggggagaatcacttgaacctgagaggttgaggctgcagtaagctgtgttcctgccactgccctccagcctgggtgacagagtgagaccttgtctcaagaccaaaaaacttaaaagatattttgttggccaggcgtggtggctcatgcctgtaatcccagcactttgggaggctgaggcgggcagatcacaaggtcaggagatcgagaccatcctggctaacatggtgaaaccccgtctctactaaaaatacaaaaaattagccgggcgttgtggcgggcgcgtgtagtcccagctactcccagctgctcgggaggctgaggcgggagaatggcatgaacccgggaggcggagcttgcagtgagccaagatcgtgccactgcactccagcctgggcgacagagcaagagtctgtctcaaaaaagaaaaaaaaaggccgggtgcggtggctcacgcctgtaattccagcactttgggagaacgaggcgggcggatcacgaggtcaggagatcgagaccatcctggctaacgtggtgaaaccccgtctctactaaaaacaaaaaataaaaaaaaaattagctgggtgtggtggcaggtgcctgtagtcctagctattcgggaggctgaggtaggagaatggcgtgaatccgcaaggcagagcttgcagtgagccaagatcacgacgctgcactccatcctgggtgacagtgtgagactccgtctcaaaaaaaaaaaaagattttgtttacattatctcttcaagttatctcttaaacatctttgtggctggtgcggtagcttaacgcctgtaatcccagcacttcgggaggccaaagtgggtggatcagttgaagccaggagttcaaaaccatcttaaagttcagctcatttctcattctgaagtttccttttttcacacttctcagattatactgatggattttcacttcctttacattttctccttcctctcaatagtgaatattagtctccagtggctgggtagtagcaagtaaatttatgaagaatcatagttgtgtttgccaagtgactggaaatcagcttccccagtacctcttcaccacaaacacaattaaaggtggggccgaggatcaaaatggaatgcttccttaggactggtacagagttactcagaaaaattttctgtgacatggtgtgatgattygactttgcctttttttttttgagacggagtctcgctctgtcgccaggctggagtacagtggcatgatctctgcttactgcaatctctgcctcccaggttcaagccattctcctgcctcagcttctcgagtagctgggactacaggcgcacgccaccacgcctagccaatttctgtatttttagtagagacggggttttaccatgttggccaggatggtcttgatctcttgacctcgtgatctgcctgcctcggcctcacaaagtgctgggattatacgcgtgagccaccgtgcctggctgactttgccttttttttttttttttttcttttttttgagacagagtctcgctctgtcgcccaggctggagtgcagtggcgtgatctcggctcactgcaaagttcgcctcctgggttcatgccattctcctgcctcagcctctggagtagctgggactacaggcgcccgccaccacgcccggctattttattttttatttttagtagagacggggtttcactgtgttagccaggatggtctcgatctgaccttgtgattcccccgccttggcctcccaaagtgctgggattacaggtgtgagcaaccgcgcccggcctgcctttttttaaaaaataaaatttgtatttttttggggtactgctccttgtggagcagggctaccttataggcagtgtgtccagagtaggcttgacattgtatttagcaaaaattgactgggttgttttcactttggcatttgacttgactggttctgctgttctggaattattttagtaacattaatgatttcctagcttattttcataatttagaagctagttctttaatatttttgaagtcttggcatccaggaattatgctgaaattgggtatccctgttttataggagagtgttgatttctgaggggtatggttccctttttaagagagaatctcttatatgtgctgatacaggtatgtttcaggttttatagtcatctgaaagtaatatgtagttgagaaagagggtatgagaacrtaagacttatacttatttttagcttaggatcatcagcagcatttctggcattttcttttcatattttttcttgttccttatctttgcaatagcataacgtggttgtaatgagcttgagttaatgtgtgtgtggggagtgtggtggtttgtatgtgtgggactgttgagtagtggtttactgggaaaaatgggttattaagcaaagaaaatgacagtaaagccattcctttaattgttaaattatgtaacatacacattaaaatatttgtatagtttatataggtaaggaaaaatagaaatttaaagttacaaaataagcctactcccactatcaggaaatggtcatcttttaacattttggtatataatcttgtgcaccttttctatgtgtataagttcatgtgaatttatagataaagtttttataaaaaattgtattatataattttttgacctttttccactcaatatattgacatccataaatatacataaaaataatggttatatagtgtttgattttatgactgcgccatgatgtatattatcagttccctattgttcacttagattctttccaataatgggatctatgcaattatagttatatatacactgctgtaatccttgtatatccttgtaatgtataaccttgtatatacatctttgtttgcttcactaagataacttagtacttcttggtcagattgtacataatgatttttaaggctttttgctttgtttttttctgtttttttgtttttgtttttgtttttgtttttgttttgagatagagtttcgctctgttgcccaggctggatttcagtgaccccatctcggctcactgctgcctctgccacccattatcaagcgattctcgtgcctcagcatccctagtagctgggattacaggtgatcgccaccatgtccagctaatttttgtgtttttagtagagatggggttttgccatgttggtcaggctggtctcgaactcctgacctcaagtgatccgcttgcctcagcctcccaaagggctgggattacaggcgtgagccacagcacctggccggctttttgcaagttagtaccaaattgccctcaaggagcggaagagcctcaaacaaaatctaccttgtgactgtcgcccaggttggagcgcaatggtgtgatcttggctcactgcaacctctgcctcttgggctcaggtcatcctcccacctcagccttytgagtagctgggactacaggcttgcgccaccacacctggctaaatttttgtatttttagtggagaccagttttcaccatgttgcccaggctggtctcgaactcctggcctcaagtgatccacctgatttagcctcccaaagtgctgggattacaggcatgagccaccatgcccagcctgtgcattctttttttttttttttttttttgagatggagttttgctctcgttgcccaggctggagtgcaatggcgcgatctcagctcactgtatcctccgcctcccgggttcaagcgattctcctgcctcagcctcccgagtagctgggattacaggcaggtgccaccatgccatgctaattggttttttttgtatttttagtaaagacggggtttctccatgttggtcatgttggtctcgagctctcgacctcaggtgatcctcccgccttggcctcccaaagtgttgggattacaggcgtgagccaccgcacccggccttttttttttttttgaaaaggagtctcattgtgtcatccagcctggagtgcaaaggcaatcttggctcacttccagctctgcctcctgggttcaagcgattctcctgcctcagcctcctgagaagctgggattacaggtgcctgccactgcgccggctaatttttgtatttttagtagagacgggttttcaccatgttggccaggaggctggtcttgtgaactcttgacctcaggtgatcacgcctcccaaagtgctgggattacaagtttgagcctctgcgcccggcattcttttttaaaagataaaaaagtctggctgcagaggaaccttatacctgaaatgttttgctgtctgaattcactccagagtgaaatgacttgaagtacaagttttgtgactgctccgagaatttttgtgtcagaggcttctccttctgccattttttgaacatttacctagaattacaaaaaaatcattccacatttcacagtatggtgctaggaatctgaccaggtccagttcataattttaaactttagagttttaaaaacatgtatgcttatcatgctgtaagcaaatgggaccccaggagtaaggggtaactttctgtttttcctcattaggtttcaactttctgtgctgtggggtcagtggtaagagaggtagatctgatgtgtatctgtgctaaagaagcatgagctccttacagtaactagcagccaattcctcttccccataacagttgcagacttctaatcccagcaccttgggaggccgaggcgggcggatcacgaggtcaggagatcgagaccatcctggctaacacagtgaaaccccgtctctactaaaaatacaaaaaaattagctgggcatggtggcgggtgcctgtagtcccagctactcgggaggctgagacaggagaatggcgtgaacccgggaggcagagcttgcagtgagccgagatcgtgccactgcactccagcctgggcaacagagcaagactccgtctcaaaaaaaaaaaaaaaaaacagttgcagacttcttggagtggtagttcatggtcttcttctaagaaggctgtggatgccttaaaagcattatttgacgctggctcccatatctcactgccctctccaaaaaatgtgttaccctaacatagaagtatsttttctcagaattcttcagtatattatgaatcagtgactaccttttctctcccttgaaattttcctgtaacttaatgttcatttccttttgtttcagtaaaccagtctcaactcttttccttttctctttctgttgtacctctcatttccccgacccttcctgtcctgtagatggcatttcataattcacattgataataattgctagaatttataggcatttattgtagattaagtagagcatttattatagattaagcctatacgtaacttgttgaattctcataacaaccttaggaagtacatgttgttacttccacattttatagataaggtagccagtctgctctagagaaattttaaccaacctacccaaggttacctacttagtaaatgttttttttttttttttttttttttttttttgagacggagtctcgctytgtcrcccaggctagagtgcagtgctgtgatctcagcttactgcaacctctgcctcctgggttcaagcaattctcgtgccttagcctccagagtagctgtgactacaggtgcgtgccactacacccagctaatttttgtatttttagtagagacagggtttttccacgttggccaggctggtcttgaactcttggcctcaagtgacccacccactaggcctcccaaagtgctgggattacaggcttgagccattgtgcctagctgtaaatgttaaatctagtattcaaacctagcaaacctaggtgttctgatttctttttctgtttttggttttgttttccctgggatatagattttcaggtgttctgatttcagaacctgcattcctacccactgctgctgctcccctcactaatttgaaattctgtgtgtgaactaactttacttaaaaccgggttaaatgtttgttactgtctgaaccaagagtccttggggtgaaggagagagtagtacagaaggaaacttctccttctgactttagccttcctaaatcaacaaaattctgagctcctttatgtacagtaggtggaattgttcattttttcagaagcattttaattttattaatgtattaatttatttatgtattttgagacagggtcttgttctgtcacccaagctggagtgcagtggcatgatcatagctcactgcagcactgacctcccaggcccaggccatcttcccacctcagcctcacaagtagctgggactacagacaccaccatgtctggctaattgttttttctttctctttttcttttcattttttttttaaattttttatttttgagatggagtcttgctctgttgcccaggctggagtgcagtgttacgatcttagctcactgcaacctccacctcctgggttcaagcgattctcctgcctcagactcgcaagtagctggattacaggcacatgccaccatgtccggctaatttttgtatttatagagatgaggtttcaccatgttggccaggctggtcttgaattcctggcctcaggtgatccactgcccaccttggcctcccccaagtggtgggattgcaggcgtgagccactgtgcctggcagtgttaaaattgttaatgtcttgttacaaagacaaaaaggtattttctatgctagtgaggaccttaacgtctgtaaaactgtgaaactgcgctttcaagtatcagacttgaaagtttctgctcctctagaatactggcattgcctaattcagaacaaaggtaatctccctaaaagaaaggtactttcatattctttttgcaaatgatgttgatgaatgttgctagaggaacagtgttgttaatttccttgagaggacctgaaggaggacaactgtactcttaatcctatcagtgaaaatgaaacatttccttgtctcaaggaaaaagggggtaccttgagggaagaatatatgtcttcatattgtccattagcaaatctgagatttatttagtttgttagagcattctagttccattggtgctttcttgttccagctgctttctaggtggccaggaaattaaaaaccaaagatgaggccgggctcagtggctcacgcctgtaatcccagcactttgggaggccaaggcagtggatcacaagatcaagagatcgagaccatcctggccaacatggtgaaaccccgtcttgactgaaaatacaaaaattagctgggtgtggtggcgtgcacctgtagtcccagctgcttgaaggctgaggcaggagaatcgcttgaacctgggagatggaggttgcagtgagctgagatcacactactgcactccagcctggcaacagagtgagactctgtctcaaaaaaaaaaaaaaaaaaaaaggccagagattattcagaagaaagtattgaattagggatcatgaattgaatgtgggctctagttttgcctgtcactgcctatgctttgattttgagcccattccttaacctcttcttctgtgttcttataataaaagggattagactaaaaattagactaaaaatctctttctgaatgattttgttctaatataagtggtttattgatttgtaataagtggttttagcttgaaaattggaaagtaggctgggcacaatggctcacgcctataatcccagcactttggaaggatgaggtgggcagatcacttgaggtcaggagttccagaccaggctggccaacatggcgaaaccctgtctgtactaaaaatacaaaaattagccaggtgtggtggtgcacacccgtaatcctggctactcgggaggctgagacaggagaatcagttgagcccaggaggcagaggttgcagtgagccgacatcgtgccactgcactccagcctgggcaacagagcaagactctcgtctcaaaaaaaaaaaaaaaaaagaagagggctggcccggtggctcatgcctataatcccagcactttgggaggctgaggcgggcgggtcatctgcagtcaggagttcgagaccagcctgaccaacatggtgaaaccccatctctacaaaaaatttaaaaaaaaaaaattagctgggtgttgtggtgcgtgcctgtaatcccagctactcgggaggctgaggcaggagaatctcttgaacccgggaggtggaggttgcggtgatccgagattgyaccattgccctccagtctgggcgacaagagtgaaactccatctaaaaaaaaagaaacaaaactggaaagtaggccttgtgcggtggctcatgcttctaatccccgtactttgggaggctgaggtggaaggatcgcttgagcccaggcattcaagaccagcttggggaacatggctaaaccctgtccttacatattctttccttttttttttttttttttttgccgagatggggtctccctatgttgctcragctggtctcgaactcctgggctcaattaatcttcccatcttggcctcccaaagtactgggattatagatgtgagccactgtgctcaatgcctgtctctgtttctatttatttatttatttttgagacagagtgttgctctgttgcccaggctggagtgcagtggcgcgatctcagctcactgcaatctctgtctcccaggttcaagagattctcctgcctcagtctcccgagtagctgggattacaggtggtgtcatcatgcttggctacttttttgtatttttagtagagacggggtttcaccttgctagccaggatgatctcgatctcctgaccctgtgatatgcccaccttggcctccccaagtgctgggattacaggcatgagccaccgcacccggcttgcctgtctctattttaaaaaagccaactcagatcaagaattttgattatccagacttgctttattttcttctgtggtatttttttcctttacttacattataaaattcctcagatgcatgtgaagtagagagaatagtataatgaacctccatatacttaccacctagcttttttttttttaagacaggatttcactctttcgcccaggcaggagtgcgatggtgcgatctcagcttactgcaacctctgctccccgggttcaaccgattctcctgcctcagcctccaagtatttgggattacaggcgcccaccaccttgcccagctaatttttgtgtttttagtagagatggggtttcgccatgttggcaaggctggtctcgaactcctgacctcasgtgatccacctgccttggccttccaaagtgctgggattacaggcgtgagccactttacctggcctatcacctagctttgataacagcattttgccaatcttgcatctatacttctccatttttctacctctacctccctggaatattttaaagcaagcccagtcctcatgggatttcactcctaaatacttaagaacgtattaatacactcagggaatcttttagaggtgaggatgggagagtataatataactacagtggtattgtcacatctataaaattaataattgtttaactttgcttctcaaggctcttttctcagaaatgtctttttatggtttctttttttctaatcaacacccaaacaggtttcacatattccatttggttatttctctcttaaatccttaattaaaatagtttccaaaccctgtagtattttttgagggccaaatgagatatatttgtaggcttccaaagtgtttatacaaacataagttgtttggtcataggagagaaataacctttctaaaaatatatcagcattgcagtttagtgttaataacattaaagagaaatgagagaatgtagagatgcctgagtgatggagaaaaaagcaggaataatttggcattaaactaaggctgagatgtattaaaattgagccagtgtggagaagctggcctaggaccttctctgtagcatttatagccaagcarttaacctatatacccacccttgggtaataggttctcctctcttatagtacgtgccacacttccaagtgtagactgatgataatgaagacattggaataatgccctttgagagttttgccttagattgggaaatgcaggtctcaagattctcagacaaaatattttcttctagggaagagtacattttaatgttgtttccctgcccaaaaagataatgatatatataaatcatgggtatggattacaaaacgataatgtattcctacagtatttttcacaaagacactagaaaacattttctgttgaacagtattctggttttatccatagggatgaatctcattctctttaaaaattgtctggctaacagccaggtgcagtggtgcagtctgatagtcccagtgactcaggaggctgaggtgggaggatcacttgaatccaggagtttgagaccagcctgggcaacatagtgagacctcatatctacaaaaaagaataatagcaaaaaaagcaaaatcagctgggcatggtggtacacacctgtagtcccaactactcaggtggctgaggtgggagcatcatttgagcctgggaggaaggggctgcagtgagcagagattgcaccactgcactccagccagggtgacattgtgagaccatgtctcaaagggaaaaaaaattacatatattttttcctttttttgatatagatacgatatttttctcttctgttcattggtaggttggatctctgatgtgtgccataggggcaaaactttaggcaaggaagagagaaggttttgtgtcctgattctgctcctctctttgtcacttggtctgagtgttattacttagaccctaatagcatcatcaccctgcgtgctcttggaattagtcccagttttgcagtcacagatagctaagcagttggcaccaaaattccatggagcgacatcgtctcatctttattctaggtattttgcaagagtgtagcagccctagagctacatgtttgtgtgataaaactaggaaaggtagcaaggtagaactttttagggagtagaaagtttcagagccactctgcattgaaattacttacctgctttttttctcttgtttaactttattcagtgactttttgcatacagaggagcttactttctaggtggtaactaccagactagaagcagatgctggcttttggttctgcctggtctcttctaaaccgtttcctctgggtaaaagaggagaggataggccaggcactgaccaaagagtctagaatcagcatttttattttcaactgaaagcatacagagtacctcattgagaatcagattccatagttgctagtgttgcacaagcatgtgggtatgttgggggatggggcagctgagggttttgacaggaaccgtgttctttgagatggtaattwgaatttcatgaaggtctaggtaaattgaaaattaaaccttgctgtgagcctaactttgctcttgcgtcacacgtaatggccaggcatggtggctcatgcctgtaatcccatcactttgggaggccaaggcaggtggatcacgaggtcaggagttaagaccagcccagccaagatggtgaaaccctctctcttctaaaaaaaatacaaaaattagccaggcgcagtggctcacccctgtgatcccagcactttgggaggccgcggtgggtggatcacctgaggtcaggaattcaagaccaccctggccgacatgatgaaaccccatctctgctaaaaatacaaaaatcagccaggcatggtggcgggcacctgtaatcccagctactcgggaggttgaggcaggagaatctcttgaactgggagaaggacgttgcagggagccaagatggcgctgttgcactccagcctcggtgaccagcaaaactccgtctcaaaaaaaaaaaaaaaggccgggtgtggtggctcacgcctgtaatcccagcactttgggaggccgaggcaggcggatcatgaggtcaggagattgagaccatcctggctaacacggtgaaaccctgtctctactaaaaatacaaaaaattagccaggcgtgatggcacacacctgtaatcccagctactcgggaggctgaggcaggagaattgcttgaacccaggaggtggaggttgcagtgagccgagatcgtgccattgcactccaacctgggcaacagagcgagactctgtctcaaaaaaaaaaaaaaagcgacagagcgagactccatctaaaaaataaaaattaaaaaaaaagggacaggtgcggtggctcttgcttgtaatcctagcactttgggaggcttgaggtggatggatcatttgaggtcaggagttcaagaccagcccagccatcatggtgaaatcccgcctccactaaaaacacaaaaattagctgaatgtggtaggaggcgcctgtaatccctgctactcaggaggctgagcaggagaatcacttgcagtgagctgaggtcatgccactgcactccagcctgggcgatagagtgagactccatctcaaaaaaaaagaaaaagttatatttcccagagaaaatatggatatttgaataagaaaggggtctagaataaaaatggaatatgcacgaggcctatgtgagtatggagaaggagagagggacatacacagttgctatccaaaaggatctggtattactgagcaagaggcaggagtttatacttatgtttagtttgactcaaactctgatggtttcagtatgcttgacagagatgtgagtgtgtgatacactcttatgattgtttttttttcccccctagcagcatctggaatcaagagacccatggcatctgaggtgagtttcatactgatacaatggttactaaaaccttaattctgggatagaaggaacctgtttatgacatttttattttttctctacttaggtcttggaagctagacaggattcttacatctcattggtaggctagaaattatgcaactcatcttttattgtagtttattttaaatattaacaatatctcacatttattgagcatttttaatgtaccaaatgcaatatataccaaaaagtaaatactgtacctaagtgccctttaagatattcttatttaatccttcaaacaactacagtgaggcaaatactgttatctgttttacagatgaagaaagtgaggattgcatagttactaagtgggattagtaaagctgggattcaaattcaaacccaggcagtctgacactaaagctcactttctttgttttgctgttatggcctcctgattgcataccttcgatgaatatgaagaacttttagccatgcagaagctgttagtttcacaagtttctcttttttgtccagaatatcgccattttgctcaactttcttcccatggtgtatttcctaaccctcttctcacttcttgcctctcccctgggttttgtgaaaggggcctcagaatgcaggcccttttgacctgggacttcaaactttctctcagaacatcttccagcatctgtcaggtgatatactgagagttttctggtactaagggccttggctaaaagaatagaacttgaatatcaggtcttaagattgggacatccagccagtcacggttgctcatgcttgtaatcctaacactttgggaggccaaggtgagaggattgcttgaggccaggagatcgagacaggcctgtgcaacatagtgagaccctggttctacaaaaaaataaaacattagccaggtgcacaccatagtcccagctactcgggattgcttgagcccaggaggttgaggctgcagtgagccattatcacaccactgccctctagcctgggtgacagagacaccctgtctcaaaaaaaaactgtgataccctgtttccactagtctctcagccttctggcttataaacttaatgagtattgatgttatgaagagtaacttcatgtctgttgctctggcattttggctcttggggataactttctagactgctatactggtttactcctcccttcttgccttttttttttttgagatgaagtcttgctctgttgcccagtatggagtacagtggctcgatcttggctcactatgtcctctgcctcccaggttcaggcagttctcctgcctcagcctcccaagcagctgggattacaggtgcacgccaccatgcccgcctaatttttgtatttttagtagaggcagggtttcaccctgttgaccagactggttttgaactcctgacctcaggtgatccacccgccttggcctcccaatgtgctgggattacaggtgtgagccactgcgcctggcctcttttcttttttctttttttttttgagacagagtcacgctctgtcgcccaggctggagtgcagtggcatgatcttggctcactgcaacctctgcctcctggattcaagtgattctcccgcctcagcctcctgagtagctgggattagagatgcacgccaccacgccaggcaaattttttgtatttttagttggagatggagatttgccatgttgcccagtctggtctcaaactcctaggctcaagtgatcttccccacttggccttctgagtagctgagattacaggtgcatgccacaccacccagctatgtttcttttctttttttttttttttgagacagagtcttgctctgtcacccaggctggagtgcagtggtgcgatctcggctcactgcaacctccacctcccagtttcaagcaattctctgcctcagcctcccgagtagctgggattacaggtgcctactaccacgcctgggtaatttttgtgtttttagtagagacagggtttcaacatcttggccaggctggtcttgaactcctgacctcgtgatccacttgcctccacctcccaaagtgctagtattacaggtgtgagccaccgcacccggccatcgccgagctgtgtttctactactgtttaaaaatactcacctttggttgggtgcagtgcctcacacctataatcccagcactttgggaggccaaggcgagtggatcacctgaggtcaggagttcgagactagcctggtcaacatgttgaaaccccatctctactaataatacaaaaaattagctgggtgtggtggtgcattcctgtaatctcagctactcgggaggctgaggctggagaatcgcttgaacccgggaggtggaggttgcagtgagccgagatcgtggcattgcactccagcccaggcgacacaagcgaaactctgtctcaaaaaaaaaaaaaaaagtactcttattttctggccgggcatggtggctcacacctgtaatcccagcactttgggaggctgaggcaggtggatcacttgaggtcagcaatttgagatcagcctggccaacatggtgaaacctcatctctactaaaaatacaaaaattagtcaggtgtggtggtgtgcacctataatcccagctgctcgggaggctgaggcgagagaattgcttgaaccgaggaggtggaggttgcagtgagctgagattgtgccaccgcactccagcctgggcaacaagagcgagactctgtttcaaaaaaataargagtaaaaatactcacttttattttctgtgtcttctttctgaggaccaaagggaaaatatgtgtcccttggagttttcttctgtgatcttttagccacttaattcattgggaaccaacattatagctgtatatttgcatgggatagatctgaagattttgtaaaatgtttttaatctagaaagaatatgttgtttcagtttattttgttttgatgtaccattgtggtagctatttggtgtcttacatgggaattgtattataatcttgactcttcttctaggtgccttatgcctctggcatgcccatcaagaaaataggccatagaagtgttgattcctcaggagagacaacatataaaaaggtgtgtctggatgaaaccgtctcatcttactccaggagctcagcagcttactctgggaactcagtctccttgaaattactctccatgtactgtcctgtttcttgatctcctaagcttttgcacataatacagcttagactttagatttatttctcaaagggtaaattgtctcctttttgtatatgaatgtttaaatgagattttttttggctgggcacagtgccccaggcctgtaatcccagcactttgggaagccgaggcaggcagatcattttaggccaggagttcaagaccaacctggccaacatgatgaaactctgtctctactaaaaatacaaaaattagctgggtggcacacgcttgtggtcccagctactcgggatgttgaggcacgagaatcgcttgaacctgagaggtggaggttgcagtgaggtcaaattgtgccacttggtggcactagccttggtgacagaacaagactccatctcaaaagaaaaaaaaattagtgaacaaatctggcattggttgctattttactgagctgaagaaactgggtttccctgttaggtataaatatgtaacaaggccatgaaagccattcttatcttaccacagggaaccatgtctctcgcagtctttctgtctttttgtccattgctgggtatatatcaatagagggccaggtcccagcccagcctgttgatacaaatatacacaataggtcagacttttttttctcttccattttttttttagagccagggtgtcaatctgtcacccaggctggattgcagtggcatgatcattggccggtagcaggaggctattgtaacctccgactcctgggctcaagtgatcttcctgcctcaacctcctgagtagctgggactacaggtgcacaccaccacacatggataataataaattagttttatgacatgatctcgctgtgtcgcacaggctggtctcaaactcctgccctcaagcattcctcctacctaaaccttccaaagtgctggagttacaggggtgattgaccgtgtctcacccccttttcctccacaaagacagtcatttagctggcgaatagtacctaggacatctgcttttttgagctctgaatatcaaatggactggaaaggagcagtaatagtgaaaaagtggaaattgggctggtgaagggaaaacagaagcatcctggatccttgagggatccaaattcttgagttctggactggttttcagatggtttaggcttcctgagggacagtgttcagtctcccatttagcatctgtggtttgtctaatatgggatgtgaagatttcttggagttctaggtttctggcctatgtaaattttgtgttcattctctatttcattgtcccaagtagcagaggtggactgactcattctcagtcaaggacctgacagtccccagaatggactctgtggctcatgtcaattacttttactgagctcttcatttttaaattttttttttttaagaaatgggatcttgcatttgggaagctgaggcgggtggatcacctgaggtcaggagtcggagaccaacctgaccaacatggcaaagccccatctctactaaaaatacaaaaattagctgggcgcggtggtgggcatctgtaatcccagctactcaggaggctgagacatgagaatagcttgaacctgggaggcgaaggttgcagtgagccgaggtcgcgccattgcactccagcctgggcaacagagcgagaccccgtctcaaaaaaaaaaaaaaaaaaaaaaaaaacaggaaagaaagaaataggatcttgctctgttgcccagactggaatgcagtgggtgcgttgatggcacactgcagccttgaactcctgggctcaagccatcctcctacctcagcctccaaagtaactgggactacaggcctcagccaccacacctggcttatttagctttttttttttttttttcctgagggagttttactcttgttgcccaggctggagtgcaatggcgtgatctccactcaccaaaacctctgccttgcgggttcaagcgattctcctgcctcagtctcccaagtagctgggattacaggcatgcaccaccatgcctggataattttgtatttttagtagagatagggtttctccatgttggtcaggctggtcttgaactcctgacctcaggtaatctgcctgtctcggcctcccaaagtgctgggattacaggcatgagccacagcacccggccatttagctctttttatatgttgaacattaagataaaaagatgagtttctattataactggggaggcaggtacttaaaaaaaaaaagaaactaataatttattttcctttgacctatttgtacatgaaaaaaactagttgtaggctgggcatggtggctcatgcctgtaatcccagcactttgggaggccgaggcaggtggataacgaggtcaggagatcgagatcatcctggctaacacggtgaaaccccatctctactaaaaaaaaaatacaaaaaattagtcgggtgtggtggcttgcgcctgtagtcccagctactcaggaggctgaggcaggagaatggtgtcaaccagggaggcggagcttgcagtgagccaagatcacgccactgcactccagcctgggcgacagagcgagactccgtctcaagaaaaaaaaaacaaaaaactagttgtaatttattgcccattgaggaccaagtagaaatataagtaatgcctggccgaggttggggatgaggcaaatggagcaaagctatctaatcaaagtttctgcagtgattgaaatgtgctgtatctgtgctatccaatatggtagctagtagccacacttgaactgtaagtagtaagactgagaaaatgaagttttaaatttgagttaacttaaatttaaatagccatgtgtacctagtggctactgttatcagacagcaaagatctagatgatgcgatactttcccacgggcttggaatcctggattgtaagagtggggctcttgtatttgtgttttgaccaagtttgataattctaagtctgaatactgctctcagaaataatttgagtctttcatgctttcttcttcagttaggagctcttttaccacactgttgcccttttttttgagacagtctggctgtgttacccaggctggaatgcagtggtgtgatcttggctcactgcagcctccgcctcccagcttcaagcaattctcctgtctcagccttctgagtagctgggactacaggtgcacaccacctcatccagctaatttttgtgtttttagtagagacggtttcaccacattggccaggctggtctcgaactcttggcctaaagtggtctgcccacctcagtctcccaaagtgcttggattagaggcgtgagcctccgcccgcgyccaccccaccctgttggccttgagacacactagtcaggcccttccttagaggactgaagtttctgccgccaggcagtcagatcagaatattggttaattttagggctgggcatggtggctcatgcccgtaatcccagagctttgggagttctgaggttaggagcttgagaccagcctgaccaacatagtgaaaccccatctgtactaaaaatataaagaataagcaaggtgtcgtggtgcatgcctgtaatctcagctactcgggaggctgaggcatgagaatcgcttgaaccggggaggcaaagtttgcagtgagccgagatcatgctgctgtactccattccagcctgggtgacagagtgagacttagtctcaaaaaaaaaaaaaaaaaaaggaatattggttaattttagttacattcgatatcagatgaaggaaatgtttagagggctccagatacactctgggggcagaaaccttaggagtgagaactaagaacgttgtgtcaatacaatgtatcttccaaatacaaatatggaactcttgtttaggcaggccaacaggagggagcaccttgcctagctgaggctggctcagagagtcccagctttgctactctgtatcctcactgtccttccaatctttactaagcttaattgcagagtacagcatagggatggggaaactggattgtcccagttttatctgaactattgctcagactaaaggatgtttgttttaaagtgttccttctagcttcccctttctgaatttttattgttatgatcctacttatactaggaattttcttctcatttctcttgtttctcagacaacctcatcagccttgaaaggtgccatccagttaggcattacccacactgtggggagcctgagtaccaaaccagagcgtgatgtcctcatgcaagatttctacgtggttgagagtatcttctttcccaggtacagagtttaatgttcaggagcatgtcctggaaatgtggccttttcaaatcagcccagggcagttttaggggttcaggtcggacaatttagacatgtgtccatttcttaacctggttacaatcagggcgatgtgggactagagagttcggagagcagatactgtcctctagatgcttccattagcctctgtcctatggattgacccgtaaaaaacaacctaatgcattggataggaggcagtgtgatttcttcttcttcttatgtcttgctgtccatgctgtgccattgtctcactaactcatctaagaagggctgtgattatcttaggaggaatgtattcccccactccccscaccatgaggtgactctgagtgtcttcgcaaggtagattctctggatgatagggactggcaagttatggctacctctgtttaaccccacagtgaagggagcaacctgacccctgctcatcactacaatgactttcgtttcaagacctatgcacctgttgccttccgctacttccgggagctatttggtatccggcccgatgattacttggtaagcatctggatatcaggacactgtgactccagtatcagagggatattcccaaaggaaggccccttttctccacagtctcgctctggtttttatttagaaaagaattgcatctgtagttgatttttgtgttgggcaaggccctgatgtgtctaaatctcttagttcttctctgtttgccccagtattccctctgcagtgagccgctgattgaactctgtagctctggagctagtggttccctattctatgtgtccagcgacgatgagttcattattaagacagtccaacataaagaggcggaatttctgcagaagctgcttccaggatactacatggtaagggagagagaagcactgtccacctgtgctgctcacttctgggcaaggctggggaggctgtcttcagcagggtaaaacagtgtcagcacttctatcttaagagtgtagttcaggccaggcacggtggctcatgcctgtaatcccaggactttgggaggccgaggcaagaggatcacaagatcaggagatcaagaccatcctggccaacatggtgaaacctcgtctttactaaaaatacaaaaaattagccaggcgtggtagcgggcgcctgtagtcccagctactcaggaggctgagacaggagaatggcgtgaatctgggaggcgaagtttgcagtgagccgagatcctgccactgcactccagcctgggtaacagagcaagactccgtctcaaaaaaaaaaaaaaaaaaatgttgttcagttttgtgcttttcaccccatttcttttgcctctctatggtaaaaggggttttgtttatctgttctgttttaagtgttgttgatctcccaggctcaagtgatcctcccacctcagcctctcacgtagttgggactaaaggcacgcaccaccacacctggctaatttttataaacttattttcttttattttttcgtgacggagtctcgctttgttgtccaagctggagtacagttgcacaatctcggctcactgcaacctccgcctcccaggttcaagcaattctcctgcctcagcctcctgagtagctgggattacaggcatgcgccaccatgccaagctaattttttattttttagtagagatggrgtttcaccatgttggtcaggctggtcttgaactcctgacctcatgatccgcctgccttggcctcccaaagtgctgggattacaggcgtgagccaccgtgcccggcctaatttttataaatttttagtagagatgaggtcttgctatgttacccaggctggtctcaaattcctgagctcaagtgatcctcctgtttggcctcccaaagtgctggggttacaggcatgagccactgcacctggctattttcgtcttctgttcttagttcagcttctagtttggggaatgaggtaggttatttcccttggtaatactctctgcagccttactctgattgctattggaggttctggagaagttaggtaactctccttacctgccttaccatccccaagaatatactatacccagggcagagagtgtcgtcttctcttaaatctctctgaagaaatatatccatcttatattggtatcctggctgatttctgtattggagagtctgtggcacagcttgatggtgaacttaccattgaaatagatgcatagggaaatgtaaagcatatatgatgtaggtttatggacacattgtgtctaaatctcatataggagataaagggaggatgggtggtaacttttactggtgagtttcactgaaaatcagctaagttgttctcctacttctgtttccttttgtgttctcagaacctcaaccagaaccctcggactttgctgcctaaattctatggactgtactgtgtgcaggcaggtggcaagaacattcggattgtggtgatgaacaatcttttaccaagatcggtaaaaatgcatatcaaatatgacctcaaaggctcaacctacaaacggcgggcttcccagaaagagcgagagaagcctcttccyacatttaaagacctagacttcttacaagacatccctgatggtctttttttggatgctgacatgtacaacgctctctgtaagaccctgcagcgtgactgtttggtgagtttgttacttagacatcaaaaatctcagttactaaaacagcttgattgttcttaggcattaagtttgtgggagatggaactctgttccwtagcactgtatgtcctgggctgtatttaaaataagtcttaattagttcattgccattcctttacatttttactttctccccgtttatcctcccacaatgggatttatttccttctctagctagcctgggcctcacagtcaaatgttctgcttattttcataccaacatcatccttcctcagattttggtcctggctgccaaatccaaatttatattttggaagctgagtgctgctgaagaatattacacaaccgtgtatactggcatytacagaattatgatatccaaccccacttgggctttcaatatcgatcttcagtccatttgctgttgctctcaatagggatttcagatgtttggcattctaatcaaaccattttctgactctcatctccctagctttgtttctcaacaagctaccttaactttttatcctatttcatcctctcatgctgcccctgtcaccaatggataaatgtatctacattttactttattttttattttttgagatggagtttcactcttgtcacccaggctggagtgcaatggcacgatctcggctcactgcaatttccacctcccagattcaagcgattctcctgcctcagcctcccaagtagctgggattacaggcgcccatcaccaygcctgggtcgtttttgtatttttagtagtgacagggtttcaccacgttggtcccgctggtttcaaactcctgacctcaaatgatctgcctgccttggcctcccaaagtgctaggattacaggtgtgagccaccgcacccggcctagatatcactcttgacctctgtactcttctgtcatgtgaacacttcccactgttgcacatattaaactgtattgtgtttattttacatttgtatccctttctaaatgtataatgtccttgaagacagaaactctctctttaatatctttatatctctgtaaggaggcacagtgcctacatggtggagattcagtaaatgtttaactgaattgaagctagtcatacaaggtcctaccacagatctgttctgtcacaaagtgtactttaccagaacctcattgtggaatcttcacagcacaaatatgtattccttgttcttttgagaaggtagtgttctcttcatggagacatacatggaaagaacaaagatggtcttgtgggctaggcagtgggacttggaaaaattatattaactcaaatgagagaaagctaagggtatgtaaataaagactaaccaggccgggcgtggtggctcacgcctgtaatcccagcactttgggaggctgaggcaggcagatcaccaggtcaggcgttcgagaccagcctggccaacatggtgaaaccccaactctactaaaaatacaaaaattagctgggtgtggtggcacgtgcctgtaatcccagctacttgggaggctgaggcaggaaaatcgcttgaaccagggagttggaggttgcagtgagccaagatcgcgccactgtactccagcctggcgacaaagcaagactccgtctcaaaaaaaaaaaaaaaaaaatttagccttacaggttcactgtaaggctaaattaaataattacatcatgaaagctgtcaagccaggcgtggtggctcataccaatagtcccagcactttggaagactgagataggcagatcccttgagcccagaaattagagaccagctgggcagcatggtgaaaccgtctctatgaaaaataaaaaattaggcaggtgtagtggtgtgtgcctgtagtcccagctacttsggaggctgaagtaggtggatattttgagcctgggaggttgcagctacagtgagccgagatcacaccactgcactctagcctgggttacagattgataccctttctcaaaaaaacaaaaaaattgtgagatcctgaaaaatatttttatttcttccaaggctcagatcatgtttttttccttccattaggtgctgcagagcttcaagataatggattayagcctcttgatgtcaatccataatatagatcatgcacaacgagagcccttaagcagtgaaacacagtactcagttgatactcgaagaccggccccccaaaaggctctgtattccacagccatggaatccatccagggagaggctcgacggggtggtaccatggagactgatgaccagtaagtgggctcagggccactaggggggagaacataggcccacagcacttttcttttcttttttttttttttttttttttagtttcactcttgttgcccaggctgatgtgctgatgtgcaatggcacgatctcagcctactactacctccacctcctgggttcaagcgattctcctgcttcagcctcctgagtagctgtgactacaggcacctgccaccacacccagctaattttttgtatttttagtagagaaggggtttcatcatgttgggcaaactagtctacgaactcctgacctcaggtgatccacccgccttggcctcccgtagtgcagggattacaggcgtgagccaccgtgcccggccacagcactttttctttaggaagggacccagcttctggaaaggagtagccttgactcagcagttggatcagtaacattattgttgacagaagtatagaatgagcttgaacgagctttcttaatacaaaatgaaaagaagattaatttcgggtttatagtatatgtgggaaggagagctgttcaagagttaaagacttaaaaaattatagtcttaaatgcatgtctgcaaattatattagaactttattagggctgggcacagtggctcatgccagtaatcccaacactttggaaggctgaggcaggcggatcacttgagtccaggagtttgagatcagcctgagcatcatgatgagacctcatcactacaaaaactcaaaaattacctgagtgtgatggtgagcacctgtggtcccagctactcaggaggctgatgaggcagaattgcttgagcccaggaggtcaaggctgcagtgagccactgtacatgccactgcactccagcttgggcaaaaagaatgggaccctgtgtcaaaaaaaaaaaaattgttatagacttctttgtggaaggcatccttcttcatcatgcctagtaagtgtaattactgaagtgtcacaaatatcttagattgtttcatttttttaaggtatcctgtaatatgactctcaagaagagtgtcttagtgggcataaattaagatagcaaaagtactgaagaagttgagttaattaggagagcattcccaaaattgctgagtagtggcaattttagattctctttggtggaatcagagtggaagaggtaggcaagaagatttggagaaaactagattataatacatactgtagagagttcctggggttagaggaaggatctcattttctcctgtttttttaatgtatttttttctctttttgttttcttgatcacttattatctgaccttctggtttatggaggatgaggcagttatgtgtaggtttcacttccccatcctgatctgactaaactagccaacagattttctcaccctttcctttttgccttttccagtatgggtggcatccctgcccggaatagtaaaggggaaaggcttctgctttatattggcatcattgacattctacagtcttacaggtgaggagcatatggatcccaaattaagagagggtggatacagataaccagtcacgtttctcttttagataggtttgttaccaagttcttccggaagcaagaacagtgagttgcagtctggctacttacttcattagttttcagatggtttatttccttgattttgcctctttccccggcctttataacccttcctcccccatctccccagacataatgtataccttctgtggaaagctgagtcagtccttggaagcaccagggtagaatatgccatctgtctggctctttgcaaaaacctatgagatgagtcatgttccacatggggatacaactggaaacgttacccttttccaaggaggaaaaacaggagggtcactgtgttctgtaaaatgtattagactgtggaactaagaggcaatggagtgatcatcagggaggagctggaattgttagaccccagttttgttcctgtaaggttttaaatactaatgaggactggacggtacttgatttgttggttcagtattatcatccagttttaactaccctttccagtcttgcccatctgttccttcagctctccttttataataaatattcatgttcctgatttgtcagggacataaattgcccttttcccatggggggaataattgacttacctagaaacaacattggtctctgtgatgaaccagcactgccatgcctgttcttgggaaaaccagtgtaccagtagatgtgctttctcagcttctgtcttttcaagattttctattacccctttaaccccctaaaatataaagttattaaggtcatttatttaaaaatgacgtgagtaggtgatgtacatttttcttgcaggtttgttaagaagttggagcactcttggaaagccctggtacatgacggagtaagtagtaatactagaggctctcttaccgtacacttctgcctccatcacttctgattggcctcagtttcttgcaattttttcttttttcttttttcttttttttttttttgagacagggtctcactctgtcacccaggctggagtgcagtggcgtgatctcggctcgctgcaacctccgtctcgcagtttcaagtgattctcctgcctcagcttcccgagtaggtgggaccacaggcgcgtgccaccacgcccagctaatttttgtatttttagtagagatgggtttcaccatgttggccaggctggtctcaaactcctgacctcaaagtgatccgcctaccttggcctcccaaagtgctgagttgagatggagtctcgctctgtcactcaggctggagtacagtggcacaatctcagctcacttcaacctccatctcccaggttcaagcaattctcatgcctcagcctcccatgtagctgggattacaggtgcccaccaccatgcatggctaagttttgtatttttagtagagatgaggttttgccatgttgaacaggctggtgtcgaactcctgacctcaggtgatccgcccacctcagcttcccaaaatgctaggattacaggtgtgagccactacgtctggccccttccgtttatttcatctgtaggttttacccttctgctaggggctcagtctgggggaagatggcccttggactagagttcctcttgccgggcctcctaactctatagcatttcttctgctctgcaggacactgtctcagtgcatcgcccaggcttctacgctgaacggttccagcgcttcatgtgcaacacagtatttaagaagattccctgtaagtggtttctaccaattgactgcctactcctgcccagtggctcccttaccccaagagaacagagggcaggacacctctggtagggagctgccaatgccagaggcctctccttccacctacatcccatgagagccatttcttgtcctttgtgttagtctgtcatagtcatttccaagttgctgtttcccccttggctcttcctgcatatgtcaatgaggtgaggaccatttctggggaattgggatttgcaaaaaaataaataaataaataatgtgtagttgtggatgtaggatccatgccacagagataggcagagcctatgtacagagatacgcagtgaggttaatggtgttctgttttgtcttctagactatctcaggtggttacagaagcatttactgatttctgcttagcacatgtttttagtctcttttctcaactttcttgtttaggaagtgccaatatttttttgcaaatcttccatgctgctgccatagcaaattctagcttctctttcccttcttctcatattaggcatcattattcccatagcgagggagaggggacctaggcatgccagtcttaagggatatggaaaaaccaggctgggtgcagtatctcacacctataatcccagcactttgggagaccaaggcaggaggatcggttaagcccgatagtttggaaccagcctgggcaacatcatgagaccttgtctctacaacaaattttaaaaagataaaaaaatctttacaaagtgataaaaattacaagtatcaattatttagtgctgggcacatacatgctaagaaaatgtagagtgaaagagttatctttcttggcccggcacggtggctcacacctgtaatcccagcactttgggaggccraagcaggtggatcacctgaggtcaggagttcgagaccagtctaaccaacgtgttgaaaccctgtctctactaaaaatactaaaattagccgggtggtggtgagcacctgtaatctcagctactcaggaggctgaggcaggagaatcacttgaacacggtaggcagaggttgcagtgaactgagatagtgccattgcactccagcctgggtgacaagagaggaaacttcatctcaaaaaaagttatctttctcaggttttactataggatactattaaagaaaaaggggggccaagcgcagtgtctcacaccagtaatcccagcattttaggaggccgaggagggcagatcacaaggtccggagattgagaccatcctggctaacacggtgaaaccccgtctctactaaaaatacaaaaaaaaattagccgggcatggtggtgggctcctgtagtcccagctacttgggaggctgaggcaggagaatggcatgaacccgggaggcggagcttgcagtgagccaagatggcaccactgcactccagcctgggcgacagagcaagactctcgtcaaagaaaaagaaaaagggggcagggcagtggctcatacgtataatcccagcactttgggaggcctaggtgggcggaccacctgaggtcaagagttcgagaccagcctgaccaacatggtgaaaccccgtctctactaaaaatataaaattagctgggtgtagtggcgcatgcctgtaatcctagctacccaggaggctgaggcatgggaatcacttgaactctggaggtggaggttgcagtgagccaagatcgcgccattgcacttcagcctgggcaacaagagcgaaactccatctcaaaaaaaaaaaaaaaaaggaattatgcaatagggtacatttcatctgatggaagtaaagcagtcatcaaggctccatgttggggggttaggtgtggatatgtttcctttcttctaggttttcatgcctcttggaaagtgaagtgagctaacaccttgttctctgaatagtaattcataggcctgtctttgttgacattagccttttcacttttcagaccaactttgggtgtgtgttggggatactagcaattatttgtatctatgtcttggtaatagttgctaaggtagttgctaartaggctctctctttcccttttgaagtgaagccttctccttccaaaaagtttcggtctggctcatctttctctcggcgagcaggctccagtggcaactcctgcattacttaccagccatcggtctctggggaacacaaggcacaagtgacaacaaaggcagaagtggagccaggtcagcgctagggctggggtccccatgtgattgggtactccctcccttccttctgagcctttatcttgtctggccaggacctctgctcccatttctatccaggaagcctagctgctacatatttttccttgtatttactgtaccccatcttctctatcttttttccaggcgttcaccttggtcgtcctgatgttttacctcagactccacctttggaggaaatcagtgagggctcgcctattcctgaccccagtttctcacctctrgttggagagactttgcaaatgctaactacaaggttggtttattggcccctttctccatataatcttatctctcttttcaagtccttggaaacctctataatttgattgcatcataataaattaccccaaagattagtggcttaaaataacaaacatatatcatactttctgtgggtcaggaatccaggcccagcttagctgggtcctctggctcaagatttctcatgaggtggcatttaagctgttggccagggctggggtctcatctgaaggctcaaacaggaagatctgcttttaagcttatttatgtggttactggtaggattctgttccttgtgggttgctgaactgagggccttagttccttgctggctgttgtctgggggcttccctcagttctttgctacatggacttctccataggacagctcagaacatggcacctgggctatctgacaagtgaacaagagagcatgtgcctatgcagaaaccatggcctcttataacttaatctcagaattgacattctacttgtgctacattctgttcactaaatgcagcccacactcaagaggaaggaattacccatgggtgtgaataccaggaggtgcagggatcattgtgagccatcttagaaactgcctgtcatagtctgctctctggtctccagtaatttacatacctccatgtcgaaaatacactgaccccctcccagggtctcatcccattgtagcgttagctcagagtccagagttttattacctaaattaggtccggttggatgagccccccaggtatagttccttaagcacagctcctcaagtacagttcttctcaatctgtgaacttgtggaaccaaagagacaagttatcctttccccatgtacctagcatacaatggtgagacaggcattagataaccaatatacacatttctgtacataaaaggggagaatgggaggcacaaaaaggagtcattgattttatttgctgttccaaaatccaggaaatgttggagtttcttttatcaggcctcwaagcagaagaataattctccgtggttcttggctctaccctctagactcttggttttgtcttctgagtcttcctttttcatcaaagctagagtgtgtttttacctgagttcttttctcaggctgcttctttccagtagaattttaggggaactagtggtctctattttgtactgtttctgtcctttttgatccaagatggcagtgtttctactgatacagaagattttgtgggcctcctgtgattctccttgggatttactccattagacaaaagccacactcataaatatcttctttatgagacctaagcttcttacagactctgtttttcggttgaaaggatctgtgaaacataatcttctgaacagccttttgtatgactgaatagcacaatcagccctccgtatccacaggttccacatcccagattcaaccaactgtggactgaaaatacttgagagcctggtgtggtggctcatgcctgtaatcccaccactttgggaggctgaggtgggaggattgcttgaggcagtttgagaccagcctggtcaatataacgagaccccatccctttgaaaaaaaaaaagaaagaaacgaaaaaatactgaaaaaaaaaaaaaaarwcgtgaaaatgttatgttgttgctgatatgtactgtacagttaggcctgtacttaacatgtacagacttttcttgtcattattccctgaacaatatagtataacaactatttacatagcatttacattgtattagttatcataaataatctaggaatgatttaaagtatatggagggccaggcgtgatggctcacgcctgtaatcccaacacttgtgagaggtagaggcggccagattacttgagcctaggagtttaagatcagcctgagcaacatggcgaaaccccatctctaccaaaaatacaaaaaaattagccaggcgtggtggtatgttcctgtagtccaagttactcaggaggctgaggcaggaggatcgctcgaaccccggaggcagtggttgcagtgagccgaaatcgcgccactggactctagcctgggtgacagagcgagaccctgtctcaaaagaaaaataaataaaaataaagtatatggaggatgtgtgtgagttatatgcaaataccatagcattgtatataagggacttgtgcattgtggattttgatattcaaggaggggtcctggaaccagtcccccacagatattgagggatgactatactctgaaccaataccttttgtttttctgaggtcttaataaratgtttcacagtcatatgtttgccttcatctttagaccacattttcttggcagtgctctggagcttatccttgctcaaaagcctttttttttttttttttggtagagatgtctcattgtgttaaccaggctggtcttaaacaatcctcctccctctgcctcctgaagtgagccaccgtatgtggcctgccatttcttaattttagcatcgtttgctctctggagaggcttagaattttcaaaacttatcaagttctggcatttttgtttaatagtccttcccataatttctttatcttctcctatattttattataagcatcaagagaaaaccaggtggcaccttcaggactttgcttggaaatctccgtagctagattgtccaattcattaggcacatattctacttytcacataatcacaaatcacattgttgctaaactttgtgctgctgccttactaggatctcctttccttcaagttccaataaaatttttctcactttaagccctcactggtaaccccctttaagtccaaaattctataaacagcatattcaggacactaccttttcactaaaatgctcctccaagccacccccaatgttttgttttgttttgattttgtttttcgagatggagtctcactctgttgcccaggctggagtacagtggcacgatcttggttcactgcagtctctgccaacagggtctccctctgtcacccaggctagaatgtagtggcactatcttggttcattgcaacttccgcctcccaggttcaagcgattctcctacctcagcctcccgaggagctgggattacaagcgtgcaccatcaygcctggctaatttttgtatttttggtagagacgtggttttgccatgttgctgaggctggtcttgaactcctggcttcagatgatctgcctgcctcaggctcccaaagtgctgggattataggcatgagccactgcaccaggccaccacccccaaattttagatttttgttatagcagcacctcaattccaggtacaaaagtctgtattatctattattgtgtaacaaattacccccaaacttagctgttgaaaacaaacatttgttatctcagtctgggtgtggtggctcacacctataatcctggcactttgggaggccgaggagggcggatcacctgaggccagaagttcgagaccagcctggccaacatgatgaaaccccatctgtactaaaaatagaaaaattagccaggtgtggtgatttgtgcctataatcccaggtactcaggaggccgaggcgagagaattgcttgaacccgggaggcagaggttgcagtgagccaagatagtgccactgcacttcagcctgggcgacagagcgagatctgtctcaaaaagaaaacaaaaatttgttatcccagtttctgtaccttagctggatgcctttggctcgggttctctcgagattacagtcaagctattagtccaaaagcttatctgagggaagatcagcttctcagctcacttatatggttgttggcagtattcggttccttgtcacatcgccctatccatagccagctcatagcataggagctggctttcctcagagcaggcaagcaggggctagagcatgagtccaagaagaagatacagtatttttgtaatctaatctcagaatggacattccatctcctgtgctgcattctgttcatgagaagagaatcactaaatgcagcccacacttgagagagaattacacaatggcatggatctcaggaggcagggattattgggggcaatcttagagggtacctacgacacctggagattgaaacagaagagggcagggtactgggaaatattttatagtattcaagaagctaaatatgrttaattaaaacagtgtgcttctaaatctagtagcttctcagcctcttctttccaaattctaaattgattccaaagtgaaaattagagaagcagtatgagatttaaaaggagagtcctttgttgttgtcttctaattctttttctctctgcttccattttttttctcctgttagtacaaccttggaaaagcttgaagttgcagagtcagagttcacccatgtgagtatctgggatgtgtgggaggtgaacgttttgcaaggtataaagaggatcactgatggcctggagcaggaagttaattgtcaagattagaggatctgggtacctcctaaatcttgttttttattttttattatttttttattttgtacttatttatttatttatttatttatttttgagatggcgtctcactctgttgcccaggctggagtgcagtggtgcaatctcagctcacctgcaacctctgcctcctgggttcaagcagttctcctgtctcagcctctggagtagctgggactacaggtgcgtgccaccacgcccggctaattttttattttttagtaggcgcagggtttcatcatattggacaggctggtcttgaactcctgacgtcgtgatctgcccaccttggcctctcaaagtgctgggattacagccgtgagccattgcacccagccatcgtgtttgtgtttttgagacggagtcttgctctgtcacccaggctggagtgcagtggcgcgatctcggctcactgcaagctacgcctcccaggttcacgccattctgctgcctcagccccttgagtagttgggactacaggcgcccaccaccatgcccggctaattttttgtatttttagtagagcagggtttcaccgtgttagccaggatggcctcgatctcctgacctcgtgatccacctgcctgggcctcccaaagtgctgggattacaggtgtgagccaccatgcgcggccgccatcttgttttttaaaaaatatttttggtacctcatacttggaggctgaggctgaaatagaaatttcttaacgcttgaattccatttctgcttaatctcatactccacatccttaactttacactctcccttttcagtaagcgcaaagcctcagaagacctggaacaagattctgccatctctgtgatcccaagatgtcagcccttgccccagcaatgctgaattttcttctacttggtcatcaaaaaaggagtgtaatagaagtgaggggagctgctcctccatcttcttcctgaagaagaaccttctctccttcctcttcctcatgaatgggccttagtgcctcagagagttgaggaccgcagcatcccctccactccagagttgggtggtayggattttcaactggccaaccctttgcctccactattgaatttttttcagacccccattcttcatgctggaaatgggattgctggacttggcagctttctttcccctcgtctttgactaggaaccggactcttaatttcctcaggacagactagctggcacattatccctaccttagttctttctctctgactcctggaagaatactcctgtaatctctgtaaaggtttttgggggataagggtgtttaaccacctcccagctttcttcttctttttttttttctgaaaaaaggaaaaagcacacagcacacaatttcaagccattttcagatcagaactccagaagtgttgacaagatgcctattcgtagagttccctcagaagagccatggtgtttatgaagagaagagtagtgattgctctgccagaagcagctcctctttaaactcctcctctcttgatgaatttcttaaggctgaaggaatgaagagagtgggacatggggtaatctttatcccttttgttaaaacaggaggcagccatgggctgggagatcatagcccttcctaggcagaatcctgttcactgccaggctatagtaattattactattttgcaatttgaaatatattctggttgtttttctaaatgtgaagacttaccaaatgaattttagatcattctccagaggagattttttttgctcttctcatcttttccaacagtgttctcctgtttgtggagctaaggtaaagaggggacacttctgtctgtttaacagacagtccatatctgtgaggccagcaaatattttcttaaactcatggggagacagcagattcttgccttggtgaggtcattgctgtgccatatgtcctacccccctgtcttcatgcagggaagttggaaatgsgggctacatatgccctctcctccccgtctacaagagttgtggttttccatctgatccttccactcttgtcaggggaagaagggggcctggtatctcaggcagattgttgaattcctgttctatcccttctctatcccaccctgccttgataatatgttagcccataccccaaataactgtctatattagacacccccagccagtttctggctgcctgtctttgctgccatgttttttacaagaaggaaagaattcttgctatttttttttcataatttactatttatgatgtatttaagtgttttattaaggacagagttctgttaggggtgggagggaatatttgagggagggctgggtcttagggaaaggaatggggaagcaacatttttattaagtgttactatttgcctctactttgtattgttcagaaatggcaaatacaatataaaagtgatatatggttttaatgtaataaactttaatgagttatttagacctcttattttttctgattctttttcatataccatctgctcaccctcctactccaccacccaggctcagttttgttcatgttgccctaaacaaaggctgcatactttccagcttgcaacactccagcttcactcttaaggctttatgtccttatatcctcttcctcagcaaccccattatcttcacgaggaaaagcagtgaatgaatatgaggggagttactgtaggtctcttgcctaggttgcaacccaatttaacagggatttgaggttcaaaactcactttactcagttaagtgaggaaaggagagggacagtgggaaaagtaagtttgaggttagctggccctagtgattccctccctttcgttctcttgacctggccctagggcgtcactcttagaagatcatagagattgctttctttagctgttttcttttgtgaggttgagctaaggctcctttgataggaaactagacaaaaaagtaggggcgggccaggcgcggtggctcacacctgtaatcccagcactttgggaggtggaggcaggtggatcacctgaggtcaggagttcgagaccagcccagccaacatggcaaaaccccgtttattgaaaattagcaggggatggtggcatgcgcctgtagtcccagctactttggaggtcaaggctggagaattgcttgaacctgggaagcagaggttgcagtgagcgaagattgcgccagtgcactccagcctaggcgactgagactgtctaaaaaaaaaaaaaaaaaaaaggagcggtgaggttcattctgaggcatgaagatagggaacctttggagagaagcagttaagcaaacagctgcttttcataccactattccctatcttgttaagggcactccaaatatttatatagcagctaatgagcaatgcatggagtagatggagatcaaagaaataattgtccttcaaaagtttctagtttccaggaggaacacaaatcacaaaaacaatatgttatatgtgagacagctacttaagctctctgaaggtggcacagaacataaaagggggaaaaattagcagttacgtgcgaaagaagtgttaagagaatgtttcacttcagcacaaggacctagatgcatgagaatggtctgtttttgagaacaaggaagagatcatgatgagaatattggaataagtatagttagaggcaatattgggaaccctgaaatattttttgccccaataggatgtgatacaaaataattgagagactaacaaagttccatcagaattaaacagaggattggccaagtccagtggctcacacctgtaatcccagcactttgggaggccaagatgggtggatcacttgaggccaggagttcaagagcagcctggccaacaatgcgaaacaccatctctactaaaaatacaaaaattaggccaggcgcggtggctcacgctcgtaatcccggcactttgggatgacgaggcgagcagatcatctgaggttgggagttcgaccaacagggagaaccagcatgaccaacatggagaaaacccatctttactaaaaatacaaaaaattagctgggcgtggtgggcgcacgcctgtaatcccagctacttgggatgctgaggcaagacaatcgcttgaacctgagaggcagaggttgcggtgagccaagatcgagcccttgcactccagcctgggcagcaagagtgaaactccttctcaaaaaaaaaaaaaaaaaaaaaaaattaaccgggcatggtggcgggcgcctgtaatcccagctactcgggaggctgagacaggagaatcgcttgaacccaggaggcagaggttgcagtgagctgagattgcaccattcattgcactccaccctggcaacagagtgacactccatctcaaaaaaaaaaaaaaaaaaaaaaagaagaaagaaaaagcaagtacttggattggaagaggaatgggggattctcaaagtttcttttcatttttcttttctttttctttctttctttcttttttttttttttttttttgagacagatttcaccatgttggccaggctggtctcaaactcctagcctcaagtgatccgctcacctcggcctcccaaagtgctgggattacaggcgtgagccactgcattcggcccagattctcaaagttttgaatttgattttcccacagccccagccagtcctccttttgtctggataaggagaaaacttttttccctaataggaattggaggttaacatgttttaggcataaatgttctgcatccctgaccttgtcactcagagtgtactcaaaactactgaatgggtggtgtagataatcctcttatgatcagagggtccctctagcggtgagcagcgactagtgcttattctctagctatatgctctaatttatattcagatacaagtagggtctattagtgtaaaacttctaactaaaagagaaattaaaatcataggataataaagttggaaatcgtcatctggtctgatattttacccttaagcatgtcaatctcagctattctgagatgtattcagagatgaagtctcattctttattagttttgtttttctttttttgagacggagtttcactcttgtcgcgcaggttggagtacaatagcacgatctcggctcactgcaaccttttcctcccggattcaagtgattctcctgcctcagcctccagagtagctgggactataggcacccaccacaatgcccggctaatttttgtatctttagtaggatgggatttcaccatgttggccaagatgttctcgatctcctgaacttatgatccgtccgcctcggcctcccaaagtgctgagatttcccagccttggttttcttttttagtcttgctctgttacccagagcaatctcagctcactctagccttgactttctgggctcaggcgactttcctacctcagtctctcaagtagctgggactacaggctggcaccatcacaatcagctaatttttgtatttttttgtagcgacgggggtatccaggctggtctcggactcccaacctcaagtgatctgcccacctcggcctctcagtgctgggattacaggcgtgagccaccgtgcccagctggccttctttttttcattatgggaatttccaaaccaaaagtagagtagtatggtgaaccactatgtacacataacccagcctcaataattatcaacataaataagaccagcgtggccgggtgcagtggctcaagcctgtaatcccagttttcggaggctgagatgggaggccaggagttagaggttgcagtgagctatgtatgattgcaccactgctgcactccagcccagtgagaccttgtctcttttgttttactttgagaccctgtctcaaaaaacaaaactatttgtttcttccagaggattaagttaaatcccaaacttcatatactttttttatctatgaatacaacatataacccttaataaagcctacttttataagggtgataactttaacactattatcatgcctaaaaaaattgcttaatatcaaatatccagctgatgtgatggctcacgcctgtaatcccaacactttgagactttttttttttcagagatggggtctggctatgttgcctacgctggtctcgaactcatgcgctcaagccatcctcccacatcaaaaaattaaaaacaaattagctgggcttggtggcatgcacctatagccccagctactcaggaggctgaggcaggaggatggcttgaacccgggaggtggagattgcagtgagccgagatcaggccactgcactccaatctgggcaacagagcgacaccctgtctcaaacaataaaactttgtagagacggagtctggctgtgttgtccaggctggtctcagactcctagcctgagttgatcctcctgcctgggcctcccaaaacgctgggattataaaacctaagccattgcatcaggccttgaatgtaatttttgattaaccaaaacggtttagtggtttgttctttggcagattagttaatataattgagttgtcaaatcttttccgggctctgtactgggcttagggaattgtaaagattaagacacgttgccggccaggtgtggtggctcacgcctgtaatcccagcactttgggaagctgaggtgggtggatcatctgaggtcaggaaatcgagaccagcctggccaacatggtgaaacctcgtctctactaaaaatacaaaattagccgggcatggtggaatgcccctgtagtcccagctacctgggaggctgaggcaggagaatccctggaacccaggaggtggaggttgcagtgagccgagatcgagccactgcactctagcctgggtgaaagagcgagactcctccgtctcaaaaaaaaaaaaaaaaaaaaaaaaaaaaaaaaaaaaaaaggcacgttgcccacccttagttaaacgagggaggagataaatatacaaataaattcaattgaagggtataagggcttgttgaattaaaattctacagggaactgagggctgtagaaagtcattagcgatcccgacacttttttttttctttttttgagacggagtctcactctgtcccccaggctggagtgcagtggcgcgatctcggctcactgcaatctctgcctcccgggttcaagtaattctcctgcctcagcctcccgagtagcggggattacaggcgtgcgccaccatgcccggctaattttttgtatttttagtagagacagggtttcaccatgctggccaggctggtctcgaactcctgacctcgtgatccgcccgccttggcctcccaaagtgctgggctaacaggcgtgagccaccgcgctcggccgatcccgacacttttttaaaatgccgaagccggaatcgacacagcactttcaaaggttcctccatagctcccctgagatccggccagcgggaaaccccaactgagaactgcaatggcagggaaagtggaggctagatcctgttttttgtgttaccgcgattcccttcaactaccctcaagacgcctacaaatttgtttggcggcacctacaactcccagaacgcaacgtgggggacggaggcggaagcagctggccaagccgaggtctgtgattggtgaagagcgacgggccaattggaggagttgttgttaggccgtcccggagacccggtcgggagggaggaaggtggcaagatggtgttggaaagcactatggtgtggtgaggagctacttcggggcaggaggggcagagctgggttccgggcgcgtgtagcgccaaggcagggagggcctggggtgggggccgggggctcatgggcgagaggcggccctggccccggaggtaaggagcccgctggactccctgagtcatcccggggccctggagtggcggatagtcccgggttaccactgttacccccagggggacggtcattgactggtcattcctgcttcctttctctgttctagcgccgtcttctctagagcagcccgggtctgtctttagctacagttctgcttttcggactcatcgtaatagttttctgccctcctttctttgcaaaataacgtctattaggaaaatagattattaatcccttcctctccccattccctcgtctctaacttcattacctttccctgtatcatcttcaaaggtaccatttacagattgctttttatgtatcagtcattttgtttatctcacttatacctcacaaccacaccttaaggtaaattatctctccattttacggttcaggataccgagtctcagcgattttaagtgatttgtccaaaatcatacagctagttaagtggtggagtcaagatttaaacccacggctgtctgacacaaaggctttatccggtgaggtagctctctttgtcagtttcaggcttgggctgagtacctattacgagtcacattagaagaggag

SEQ ID NO: 94125 - DNA, 42562 bp, Homo sapiens
tgtgccttaattattgcttattttaaattacattttttacagagctatgtagtacctgacgcagaaaagcaatcacataaggaagcatttatttgaggtttaacatgaaatgatacaaataaaatgtgtataaacaaatccacattgagtcataacacagatagcaaaggacaaagtaaaaacaaagaaaactaattggcagctatatacagttggacacaatggtgtcttgtacactagaaagtcttttacaaaataatcatcttagatcaacagaagaccaatcttcaatgtcgtcctgcaagatgggttactttaacatctcctcctaaaaamaaaaacaaaataccagttagatttgtgcaactctgacaagcttttaaaggtccactttcatgaattgttttaagtcctcactttattttcttcaataattaaagatcatatgcatatttattggtaaaatacagtttgggtagtcaataaactcaccctggagttcccaaatgacattaaattcaaatctattcaggaaagaatctgggaatacaaccttcccatattcagaggttcaactatgctagattaaggtctactagaagcatctctagtaacccaagtaaaatgctatcacaaacaccaatttctaataagtttattacaagaacataaattgatctgtgcatatgayctttaatttatatcccagatttaaaagttcttgttttggtttgtagatttcactattagctataaaaagaaaaagcaagcattaaatcttaaaagaatgaacacttaaaatgaggctccacaattgaaatacaacactaaacagaagaccaaaatgattaagctgtaaaaaggcatttatgtactttaactcctgtaaaaaaccatttaagttaagtttagacacttaatctccaaaaagattaaaaatgaagccaaagtctgaagttttccactttaatctttacgctggtacatgaagttggaagagaccataccacaggacagcgttttctggtgtatgccttgcgctctgcccgcaacgtgcgacccccagagatagacgtggtcagggtgacacacggcctgcaatgaagttcccgctggcgggtacaaacaaggtataatgtcagagttagaagacaacattcttgttttccttaagttgtacccatttcagtactttacctgttaatagttctaaaatgtttaattattcctctagaccacctggtacacaaaagcaaacagaaaaactcttaagtttttctgcaatactaaagaaagtgagataagactttaaagttaaagatctatagacactttaggcaaaacaggctcataaagcaattaaaaaatcaacaatttagtaaaaacaggctacatagtattttgtttttacgtttcatttgtctattgatctttaaattaaattagacatttctactgttttcctgtactcttatacacacctgttttctccaatgttctcctttagtatggctggtaattgttttggtgattgccaccccctcgagatgccttgccataagtgctctgttggcctattttgaaaacacagaattctcattaagatagttttctacaaaactttctttacaaacacaaactattaaatctacaaatctttgcatgctaaataaaaagtattaagatattttagcacccattagatgctactcataaatcatacatcctagttcatttataaccaccagtctatgttagtataatcatcctatgattgtaacatgcctcaaacacttaactccgaacactttaatggaaagcccatacacacaatttcagaacaggattgtatgttaacaatgaattttaataccactgctttataaaattaagttaaatattcttaccactgtagtctgcatatccctgtccatatccatagttcccatagttatacccagtataatcatatccgccatagccactatagttttgatcaccaccataggcactattgtaatttccatatccttgatcataatagttatwaaatccttggttccagttttggccctgacctgaaacaatgcacaatgattgttaggaaacaacttctgacccccaattctaacataaaatgatgcgttcttgtctctcactctgcaaatcttaaagggcagaatggacatatatattgctatctgcttgaaaaactatttttccagctgttataaaaaaggaggcagaaagtccaattgtgccagtatcaaacttcctaaacttaatggaaaatcattcaattttccattaaagccgaagacaggtacactgttctgtttaaaacaaggactcctgcccaagaaaacctatcacaccacggtgtatcatgtaatggtacacttttcctatcagtgatgacactaattgtcaaagtggccacacttttaacagttttttgaaaccagtgagctcacaacaaaaaaccaccacacacaacctccactaagctgaacagtcccccctccgctggaatggttttaagtttaaagttttgctttggtacaggactactcatattcagcagtatacagcttaaataaaccacggagtcatatttcaagaattaagtctcacctcggccacgacccctcgtaccacctcgtccaccagctgcagcacctcttccacctttttgttgttgctgttgctgcctatatacctctttgggttgtgcaactttgatttcacactataaacaaaaaacatgaaagtataatttttaccgaagttctaaaattaaatcattttatttttctccacatcaagaaattatttcaattatttaaattttcatttaaagtgcttaaatggctttaccttcccagaaccaatttgatggtatctgctttctaacaatttttttactggctcttcatcagtataygtgataaaacaaaatcctcttctttcatttgtttttgtatccatgggaagttcaatattttcaatctgaaatcgagatgcacactcaacgtcatcccataattgtaaaacgttacagtgtcagaatgccaaaggccttttcaggcttcaacttaaacatgttattcttatcgggtgacttctatacagacatcactgctttatgatcaacatcagcctacagtgatttgttgtatatttgaagcattgagagaaattaatattattttgtacccaaagatgccactagttaacaagtccaaacactgaccacatttaagtgcccatgttttagctaaattagatagttgggtttccatcagagcagcaatgaaatcaaggtacagtcactggaagcgacttgagcagtcatttaattctactcttacaggaaacatgaatctgccctgcataaatcggacaaggattgaacattttataaacacatcaagcttaacatgtgtaaacataatcacacacctctccaaaggctccaaaatattctttaatttgttcttcagaagtatccgggctcaatccacccacaaaaacctttttgggaggttctttcccttttaaagctttggcccttttgggatctatcaatttgccatccagtttgtgttctttcagttccaaaacctacaagacagatttatttaatctgacagcaccatataacccccagaaaaatttgcaaaacaccacaaaagcagcacaatgcaaaacatagttcctaccttatcaacactagcagcatctttgaaaagcacaaatccaaatcctcttgatctcccagtgactggatctgttttaattgtgcagtctacaacttccccaaatcgagacaagtactctgtcagatcttttttgcttgtatcccagctcaagcctccaataaacattttactagaaataaaagtgtttttaaaaaaaattaacaataactcaaatgatccttcagttctggaattaaatcgtgaaataaaaacagggacatttaccccctaagtgtaggcaatttaattcatgtttacatttaatctatgtcacacaaaaatcccaatatcccaacgaagttactcaaaccagcggacagctcactgtccgcactacataaagcaaagctcaaaagagaccaataaaatacagtaaaggttctgcccagattcctttaggtagaaggcacaacttcctagatgaatccctcacatcttatcttacttaggtccatcttcgttctcagctgtcaagccaacgttccacccagagaactcatcaatcataacacgttttgtgaatctgggtaccagtcgcctgcttgtgccccaactcagtcctctaaaactcttcccaggaaaaccgcgcagagtggtaacagagacacaatgaagaggcggcggcagctgcagcgtgcagcgctgggaggccggcccctcccccccgggtcccacgcggcgcctgcgcgctcgggacacagacgccgccgccctcctcctccaacccctccgcccttcccccactcttcccgggtctctccagtcaccccctcgatctcttactttcctcttccctccaatctagtggggcccagaaggcacgcggggaatcgactctgagaaagaatgggggcagcgcgcggctcacgaggaacgaagggcgcgtgcggcgcgctgggggagggggagcgggggaagaagcgtgcggtacccgtcatcctgctgattcttgctcgcgttgatcttggatccctctgcgaattcctctatattgctgtactcgttcatatcctccatagtgacggagctgtcggcaggggggtgctggcgcgcagtccgggtcgcggcagcagcggcggcggagcgttgtatggagctggatttaaaatggcggcggaagagatccgggcgccgcctgcgccctccctttatagccgccccgcccgccaatcgggagggctgctgggcggtgacgtggcgctgggcccggcgcgccccctgccgggcggagctgggagcgagcgaagggrggagcggggctagctgccgcggcggccgcggccgccaatgggaraggctgcgggaggctaaagtagcgggagcggaggggaacaatggcggcggcacatgggaaagcctgggcgggacctccatcgcggccctcccggcaaggagagaggccacgcgtgaggggacgcgggcttgggagaagagaagaatcagaagagaaaaacgaaggggcgtaaattcctggggtcagcagtcccgagcagagccgacgcagggccacagtccctcttgccttgggagcctttgtctctggcgtccggtccagcccactcctaccaaaaagccgtcaaccccgcctttttctgccctcggttcgccagtgcggagccgctgcggcggccgctgctaccgactagcaccgcggccagtctgctccggaaaaaggcggactgcgcccggcgctggcgactgaggcggcgagcgcgctcgcccgccgcgcgcacgcgtgttttgtcctcgagctggcaggaaccagccgaacaggaagcgggcgcgcgacggctcctccgggcagcgcagcgcgggcgcctcttccactgtgaccacgggcgcgcgggccaagggggcgcggcggggcctcccgggctgatcggccgaagcccgggccccgcgcggcctctggcgggctgacgccgggaggaggggcgggggctggccagatgactgtatctatgcaaaggcggaggcggtgggcggggagggggctggattcagtagagggcaaggggcactcacatccccggcgcgccactcgcggggctcctttctgcacgtgccccgggcctctcccgctcgctcaacctgtctgcggagggcgcgctctcgcgcaccctgctcccgcgttcgcttctttgttcccgcccacgcgaggcccattttgacggatccagttcgaggcctgacggcggccaatcggcgctggcgccttcaccctccccgccccgccgaacccgtcaagggccgccccttttcctgcccacgtggtctcgggctcctgccccgtcctgctcacgagttcagggctcctgggcggccgccttttccagttccaggtgtgcagargtgtcctctccccacgcgcggcgkgctgcacttggtcgctggctccgagatcgcgcggggccgccggaagcccaagacggtaccgggggccgcagccgcagccggcgccgccctccgccctccccaacagcaggccgagtcccgtagcatccggtagggaaatggtcgtgctttcggtccccgccgaagtcaccgtgatcctgttagatatcgaaggtaccacaaccccgattgctttcgtgaaggtgaggggcggaagggagcggggatgttacttttccttaaaaacagttattattttttctaagtatttcaggccttgcattggagacgagggttaggagaggcggtgtggctttgcctcttstgtggaatggggaggaaggagagaaagcctgcggtgggttgcggggatgcttttcctcgcgacactagcttctccctcccccgcccttgcgcttggttggatccagatgggtgggaagggatggaagttgacgctaaaaatcaccgaagggcaggtaagccggggcggggtgtgacggtgcgggcctcgccacccggcaggtgtgcacccggtcgcttccgcaggtgagcgcagcctttctgctccgtcgggcctggtgtggcagcggcagcgatttaatggtccttaaagcttccgatctcaaaatggaaagactgaagtgtcaagatgacttttcaggtggccctggtgtcgggcaatcaaggttcctcttcgccccttcccactcttgctgttagtggccaaactgcacagtgtattattttactctgttaggcgctgtggtccatagcgctgattttttgagctataggacacgtctagattccgttcactttcctcagaaaaccacagaagcttgaagctcttatccagagcattccttctaggatgtcactgtgaaccagcacttgtctgcacctcagcttgcaacttagcggattccttctttattctttgtctgttagaataagcaaatatgaaatgttactttaatttttgaaagaattcctcgggccttgtctttttatttggctccctgaggtttaagaattcattgcagatacaagtacttcttagaggtgcttgcatgcacaataatagtcgagatatacaaagtatattaccaagtaggaaaaatccatcttccaagaaactgagcagcttgggttttaaattctattttagtttccatttttaaaaaaaattatctgtgaataaggctttttttttttttctttgagagtctcactctgttcccaggctggagtggagtggagtggtgcaatcacagctcactgcagcctctacctccttgggcttarggcatcctcctgccccagcctctcgagtagttgggactgaagggagagccaccatgcctggctaatttttgtattttttgtagagacggggtttcgccatattgcccaggctagtctggaattcttggcctcccaaagtgctgagattacaggcatgagccaaggcgcctggcctgaatgagtttcttgatgtaggttataatataaaatccatgtacacttttaggacaccaaacataacaacctttaaaattcttttagaagaatcacagtaccttgacatcttagcataggttcagaagaaatcgagtttagcattttctccacggtttttgtttttgttttgaggcggagtctcgctctgttgcccaggctggagtgcagtggtgtgagctcagctcactgcaacctctgcctcccagcttcaagcgattcttctgtcgcagcctctccagtagctgggattacagacatgtgccaccacacccagctaatttttatatttttagtagaagagggtttcaccaggctggtctcaaactcctgacctcaagtgattcacccacctcagcctcccaaagtgctggaattacaggcgtgaaccatggcacccggcctcttccccacgttttgttttgttttgttttgttttgttttgttttgttttgttttgtttgagacagagtcttgttctgtctcccaggctggaatacagtggtgcaacctctgcttccggggttcaagcgattctggtgcctcagccttccgagtagctgagattacagacgcgcaccaccacgcccggctaatttttgtatttttagttgaccaggctggtctgacctcaggtaatcctcccgtgtcggcctcccaaagtgctgggattataggcgcgagccaccgcgcctgaccttcccccacgtttttaatcacaccagagacctctgcggaaaatttcaggacaaatactgatgattgattaatttccttttttttggattgtgacagagtaaccgctttcttggttttcagagaaaaaaggagtcctcatttttgtaatttatagttaacagctcactcgttccactctggctctctcttgctttctgcggtcatcaggagaccaaggataaggacaggagaggtagtgatgtggcattagatcattagatactaccgttttctgaaggtagatttggggagtaagaaacctcatacaaaatcaattttgcaacaaaacataatacccctcccccacctttttccccaagtgtgtcttctgctagatgacattatgagccacttcttggaatctttgtgtctgtggcagacttattctgaaatccaaaaataaaaatgtcttagttgcctaaataaatttttctgaatttgacgctaggcaatgtgcaatttcaatgcaggctgcaaaagaatgatttagggatcttgtttaaaggataatttcttgtgccctgtcctataataatatctattgttattaatattgttaatctattataatctaatctattattataatttgttagacatgaatttatcaaaaccatttttcctaaaagtatgtttaaaagaaagttaggtctgtgtggatgtttatggtaattatgtaaaaaaggattccattaaatgcacttttgggaaatgctagttagaatgagttcaaatagatttctttattgcaagacttctcagaaccttcggtatcatacatatatatacacacatacacactttgtgagatttcaagagagtgacatttcacaaatctacttgaacaaaaaacttttagtagagtatctcagtgactaatcttttaaacaccttttaaagagatgctgagttacattcttgaatctgagcacggaaaggttgagcatgggagttgaaagataatctgcttggagctttaaagtcagagtaggtgtgtgaacttgtagcccttccttctgtggaatgatggaaggaaacattgagtactgtatacgtgcagtactcaatccttgactcattctaaaagaccatgaggtgtatgtactgtctacactttacttaggatgaaacaaagcctctgaaaagttgaacaagatgcctgggatttgaactcagattgtcttattcataaaaactcttattttttccattactgcactcagccttggaaatgggatgctactgtttgtcctgtctcctttgcttggtggttgtgtatgttaaatgacacagttagtatgagagttctttaatcaatgtgaagtactgtgctataaaagtatatggtaacaagccaggtacggtggctcaggcatgtaatcccagcactttgggacgccgaagcaggtggatctcttgaggtcaggagttcgaggccagcctggccaacatggtgaaagccagtctctactaaaaatacaaaaagtaggccaggcatggtggctcataatcccagcactttggraggccgagacaggtggatcacctgaggtcaggagtttgagaccagcctggtcaacatggtgaaaccccgtctctactaaaaatacaaaaattagccgggcatggtggtgggcacctgtaatcccagctactcaggaagctgaggcagaagaatcacttgaacccaggaggtggaggttgcagtgagccgagattgtaccactgccttccagcctgggcaacagaggaagacgctgtctcaaaaaaaraaaagaaaagaaaaaaaggaataaataattcaaaaattagctgggcatggtggcacacacctgtaatcccagctactggggaggctgaggtgggagaatcgcttgtacctgggaggcggaggttgcagtgagccgagatcgtgccagtgcactccaacctgagtgacagagcgagactctgtctttaaaaaaaaaaaaaagtatatggtaacaaatttcagtttatagcatgtctttgtgtcttgcctgaggatcatcaaaatttgttgggagtagagctgcagcagagcccagttttccttagatgttcccaccgcatctaaatccaccgccaccatccctgcactttaccgcaggacacatacctctggtgtttgttcttttttgtctttgtttttctgaagcagggtcaggctgtgtcacccaggctggagtacagtggcacgatcacagctcaccgcaacctcgacctctcaggcttaagcaatcctcctacctcagtctcctgagtagctgggaccacgagtgtgcaccaccatgcctagctagcttatttttattttttataaagatggggtttcacagtgttgcccaggctgttctcaaactcctggactcaaacagtcctcccatcacggcttcccagagtgctgggattataggcatgtgccaccatgtccagctaatttttaaaattttttgcagagatggggtctcactgggttgtccaggctggtaaagcatttttagaaatagtgaattcattcttgattatttaacagtcctctttatgtcctcttataatgtattttagaagataataattggggagtgttgcagttaacatctttcttatgaaaactgctatattaaattatggtctttttaggaagagagctttaaagtctgatagttatctcccaactttggttaaacatccatttgataagtagtattacttctattattgccagcattgagaagtgtaggatgcgcactctgcctgcacaatgaaacagctagaagacagcctacaaggaatggcacactggaagcattcttctacctgtgctatttattattgacaccagtaactgtaatagggtctctttccctatcttcattcagtctacggatttaggctttttcatccgcagggatgggctactaggatatgctttgtttataaaggtggtgatgaaggttaaataagatggaatkcaaaagcctttgaaaattacgaagtcctatagaaacactgattataatgcaggaagtgtcagactggaggaaatagaaagtgcttatgaaggaaggattgataaggaaaagagggatcttacatttcctgaaacccaccatgctcccagttacgtctaccatggttactcccagtgacttctgctccttattgccctacccagaaatatgttaaaaataagaygcaggatattgttgatctctaagaatttgtggaagcactggaatggcagataagtagttgttgatgggttgataaacaactgcccccctctccccaaacttttctactgcttagggcagtgtttcccagctacattcatggtagtacgtgagaggatttttgttgactcagcttgaaacaaggtgaggagtctttggagaatcactgtcttgcgtatatcaagaggtggatggaggctagccttagccttggtggctcacacttgtaatcctagcactttggaaggccaaggtgagaggattgcttgaacctaggagttcaagaccagcctgcgcaatgtagcatgacctcgtctctactaaaaataaaaaaagttagccaggtgtagtggcatgtgcctgtgatcccagctactcaggaggctgaggtagaaggatcatttgagcccaggaggtcaaggctgcagtaagccatgatcgtgccactgcagtccagcctggatgacaaagcaagaccctgtctcaaaaaaaaaaaaaaaaaatggtggatagaaagcacctctggcctctgggaggaagctgtcccacctagctgggagggacctcacctaggattcaggagacctgggctgcctaccacatgagccttagacaatctgctcacccagccacctgttagttccctaaagctgggactgtcatgttcatcctgctctcacacagaatatgtcatcgtcgtcatcatcatcatcatcatcctatcgttgttggaacccaaagaatctgcattaagtaaataattcagtatgggcatggtggctcacccctgtaatccgaacactttgggaggcaaaggttggaggatcacttgaggctaggagtttcagaccagcctgggcaacatagcaagaccctgtcttaaaaaaaaattataaaaaaagaaagcacctctcactttgatttctggttccttatttttctagaaccttcagtattgtggcattagcataatctttccagcctaatcaatccttctttcctttccctcacatttaattgaatacctgtcatgttccaggatatggtagggatccagagtccttaagacccagctgtcaccctcaggttcctcagggaacctagaaaggaagacagttacataaataggtcgcctttgcataatcaaagtcctctgtagtctctcactggctgtgagatgagagttcaacaaattgggttttccaactttctatccctctctttacactttacatagctgaacatgcacattccaatcatgccctttcttgctgccaccattcttccagcttggaatgtcataccttttcgtctccaagtgtgggtcccatgcactcattaacttaaaaaaaaattacttattgtgctaagctgtgggaatatggaagtaagagctacctcttcttgtaaaggacctatttaagcaggaatttcaaagtcctttctcttcgtcctctgaactcattgtcagtaccatgtgtagtatttgctactggagccaatagctgacttgtgatgttggatgtgtgtcctctttttcaagctgtgtggaaggctcctcaagggcagagaccagagcctcacacagtgcttacacatcaggcatgctgtaacatgctgggtgatggtgatatgcattccggaatgggtgtgggagggactgggattcagtttcttccatactctgcaatccttgctatttcagatttcctcaaggtggtactctattatatttgaacaatttaactgaaagtgtttctagagtggcattagaattcattgactcaacatttccaaaacctacaagttatagaggatgaaaccagctgataatggaaattaaatgtcataaaagagaaaattttattaacaaaattaagataaaaagtgaaatatgttatttatagaaacttgcatctgttaatgtaagactagaggaaaggtttttctacccccccaaatattcttcctagaaaattagttcgccctgattataaaattgcagacaaagaagagtatgatatagagagtgaaagccctgatatgctcctgccatccagaggtgaccattaagagtttggtgaatattccttctgtttttttccctaggtacacagtaaagtcatacagatctttgaaagatatgtagtcagacttattgagtaaaaggggttgggcatggtggctcacacctgtaatcccagcactttggaaggccmtggcaaggagattacttgagtccaggagttcaagaccagcctgggcaacatagggagaccccatctctacaaaaaataaaaaattggctggacatggtgatgtgcacctgtaatcccagctactcaggaggctgaggtgggaggatcacttgagcccaggaggtagagactgtggtgaggtgtgattgtgccactgcactgcatgcagcctgggtgacagagctggaatgcagtggcgtgatcgaaaaaataacaatttttaaaaggggcactgattttaagctataacccctatattttaaatacataggctggattttatcttgctcatacagacttttaaaatgataccctgtgtttagccctgaaaagtgcttacttcttctttgtctgatgggtcttaaaattttctatccttgcagcttaccctgtgttaccactccactaaagaaaacaaagyattcttttttacaataaaaggttatttttatatgaaactttgaatttcacatttatcaactcatttgattttcaaaactggttttgttggaggtgcaggtcagaagaggagtggaaaccaacctgccctaatcctattgcacccattttcccatcagctcactaaagagtcgtgtggaaagttggtagctttatcctcagaggccctcctggatcctctctggacctttcccaggtgataccatttcaggaaaatgggtttcttttcaaagacagaatgtctttaggacagaaaggggttgtttgccttctaggtatgtgcatgaggggttcatttcttagcttgattttctttccagtgattcatgatgtgaccttctaacaagttccttttcttaagtctaaaaagtgtggacctggtacccctttactgagtaaagagaaactaaggcatgcggtttggaaactaatggtaatttcagcattgagaccttggtgggactttggagctcacaatcagaccagtgtttgacagttaagcttgtgtatacttactccagctctctctggactggtcttgtatgggtccaagtcgttgtaagttcaggaaggtaattagatccctttgatgggggtaaagagtgggatctttacccccgatctgatactggggagattccaggcatctgactctataaactcaaaaagaaagacctgattggtaaactataatctcagtttgttaatttgtacttaacctttatgtgcctctgaaaaatggaggaagtagtagcaccaatttcacagggttattatgaagattaaaatgacattatcagtaagttgagtaaattttgagtgcttggtggtggcagtggtgagaagtgattggatctgaatatattttgaaggtagagctgatgggatttgctgatggattggttggatgtggagtttgagagaaagaggagtcaaagatgactctaaggtttttggcctgagcatctggaaggatggttctgtcatttactgtgatgtggagatgtagggggaggaggaggattaagggatggaatcaagagtttggtttcagatgtgtttagtttgagatactgaatagacatgcaagtggggatattgggtaggcatttggaaaaggtccaagctaaaggtaaggatttggggatcattagtataaatggtatttaaagtcatggaattaggtaagatcacaaaggagtgattatagatagaaaagagaagtgtttgtcatagtaagtgctcagtaaatgttggcagttactcccattactataactacttgaattattattgctgatactttataggaaatgttacagaactactgggtgaaccataatctctcattttctttgtatgaaacctctttggggaatcaaagctatattagaaatttccatagagaatatgctgtcaagatccagggagttagatgatcctggtgagtagtgctccttgaagtcattcacccgtgagagctggatggcttcaggtgttgggatttgataggcctgggtttgagtcctggctttactctgcaccagcagcgaaacctctttgaacctcagtgtcttcctctatgaaagaaggcttactttgcagggatgttaggcagattcaaggagatgaatgtgaatgccttcctttcccctccactgttaaggactaggactctgggccagtcaagttccctttctggaactcattggagatactctgtttcttttgtgctgcttcttaaaaccttactccaattactagccctcttgtactgataacaatcccttgttcagtgtgattcattgcacttaattagataacagtgtatcttttgttaattataatttaatctccttaatggggctatcttttgtcttatcagcaccacattgattaattcattttgaatgcacatgtgaaatctgatgttcattcctaagctttcagttttcaacctacaccccttgtatgggtccagccctgtttactcccatgaagacgaggacagtaggattttaattcctgagaccatgtggccccatgtggcagccagaacacagaaacttcttgatagctcctactgtggtcttcaggaagcctttttgaagagcaattctrataccacaactgctgaaactatctggcagatggcatggaccactccaaaaagtagcaattctcgttgttagaagtatttaaacaaagcttggtgtattagtctgttctcatgctgctaataaagacatacctgagactgagtagttgataaaggaaagaggtataatggacttacagttccacatggctggggaggcctcacaatcatggtggaagaagaaggaagagcaaagggatattttatatggtggcaggcaagagggcatgttcaagggagctcccctttataaaaccatcaggttgtcaggtgtggtggctcatgcctgtaatcccagctgtttgggaggccaaggtgggcagatcacgaggtcaggagatcgagaccatcctgtttaacacggtgaaaccccgtttctgctaaaaatacaaaaaattggccgggtgtggtggcaggcgtggtggcgggtgcctgtagtcccagctactctggaggctgaggcaggagaatgacgtgaacccgggaggcagagcttgcagtgagctgagatggcgccactgcactccagcctgggcgacagagcgagactgcatctcaaartaaaataaaataaagtaaaaaccatcagatcttgtgacagttatttactcccagcactttgagaggttgagatgggaggatcacttaagcccaggagttcacgacccgcctgggcaacatagtgagactgtctctacaaaaacaacaacaacaacaacaaaaataaatttaaaaaaccaaaaaagcctaatgtattacattttcctaatactattatcacagacatctggcagtaaacatctgtgggaaaactacatgggaaggctaactttaacagagaaagatgctaggtgacaagatcatcaaagtaagtgactttgagccagggaagaaaagtggctcagcacaaatgtggtctttcttcagactgatcatagtatagctgattcactacctgtgccgataaagctctattctcttgaagtcacagtgtagtcattctgattggaatttggattttgctaaattcttcagtcattctgcctcagataactagctcttcttgtccattgcatgtaatttcccctaagtttattcactggatacagcctttaattatttgtctttgtagggggtgattttatttaaaacactgtcagcaggccagcttggtggtggctcctgtaatcccagcactttgggaggccaagatgcgggggatcatcagaggtcaggagttcgagaccagcctggccaacatggtgaaaccccatctctactaaaaatgcaaaaatcagttgggcgtggtggcacacacctgtaatcccagctactcaggaggcygaggcaggaaaattgcttgaactcaggaggtggaggttgcagtgagctgagatcgcaccattgtattccaccctgggtgacagagcgagactctgtctcaaaaaaacaaacaaaaaaaacactgtcggcaatctatgattttttttttaacacttagttttgctaacttttagcactattaaggttatacatttttattgcagaaaagagatatgcaaaaaagtttcttttaatgtcataacccagagagaacctttgtaaacatttaagttcatgttctctcatattttgttcagtgtgttaaatatccccccgataggattatgctgtacatactgtttgtaacctgttttattaattatttgtatgatgtgatttatatttaggaaccatcaagccagttaattttgtttgttgttgttgagacagagtcctgctctatcgcccaggctggcgtgcagtggcgtgatcttggcttaccgtgaccttttcctcctgggttcaagcaattctcatgtctgggattacaggcgcgagccaccacacctggctaagtttttgtttttagtagagagggggtttcaccatgttggccaggctgatctcaaactcgtgacctcaagtgatcactggccttggcctcccacagtgctgggactacaggcggagccaccgcgcccgggcgtatgtctctattaatgttagagaataaaaagcaacataaatttatgtggggccggtcatggtggctcatgcctgtaatgccagcactttgggaggccgcgatgggatgattgcctgagtccacgagcttgagaccagcctggctaacatggcgaaaccccatctctactaaaaattcaaaaaattagctgggtatggtggctcacgcctgtagtcccagctactcaggaggctgaggtgggaggatcacctgagcccaggagacgaagttgcagtgagccaagatcatgccactgcactccgtccaaaaaaaaaagaaagaaataatagcccaccaatgggggctgggcgcggtggctcacgcttgtaatcccagcactttgggaggccgaggctggcagatcacgaggtcaggagatcgaggccatcctggttaacatggtgaaaccccgtctctactaaaaacacaaaaaattggccgggcgtggtggcgggcgcctgaagtcccagctactcgggaggctgaggcaggaaaatggcatgaacccagcaggtggagcttgcagtgagctgagattgtgccactgccctccagcctgggacagagtgagactccagtctcaaaaaaaaaagggaaataatagcccacaatattgcttttgtgttgtttaatttgttttctaaaaaatactaagttctcaagtactataaatcatttgcattgtatagttcccttggagggcttttgttttatttattatttattatttttatttttttttgagacagagtctccctgtcacccagggagtacaggctggagtacagtggtgtgatctcagctcactacaacttctacttccgggttcaagcgattctcctgcctcagtctcccaagtagccgggattacaggctcgcgccaccacatccagataatttttgtatttttagtagaaacagggtttcgccatgttggccaggctggtctcgaactcctgacttcaagtgatccacctgcctcggcctcccaaagtgctgggattacaggcgtgggccacggcgcccggccagaaagcttttaaagtagtttctttatgtagctgtactctcagcactattcttttttttttttttgagacggagtctcactctctcacctaggctgcagtgcagtggcacaatctcggctcactacaacctccgcctcccgggttcaagcatttctcttgtctcagcctccggagtagctgggactataggcgtgtaccaccacgccccgactaatttttgtttttttagtagagacggggtttcactgtgttggcctggcctctcagcactatttttaggaggtaccttttattacccgttttcttcaaaggagatgaataaatayggtaacaacagtttgatttttattaattctatgaccttttcattaaaacaaccacgtgaccgtaaagcatatccatatttgaacttctaaacatttacaasgcaactttttaaattaggtcttcgaaatttcatggctctttcagtaagcgatcactgagctttgcagagtaatataaattgctgcttgcacagtatcctctgtaacatctaatggaatttaatcatattcccctacaaggcaaataactctagttctatagccttttgttgtatgtactgctaaatcataacaactccctaagtgcctggtggactgaaaatattcgcacatttatttgtagaatcctgagtttattgtagcatatttgtcatactatagtattctgaaattatctgtaagtggattataactgaagttaaaacatttattgtcaatgggtactgtggtttatgcctgtaatcccagcactttaggaggctgaggtgggatgattgcttaagctcaggagttcaagaccagcctgagcaacatagcgagatcttgtctttacaaaacattttttaaaaaattagcaaggctaattacaggtggtgcacacctgtaatcccatctactcaggaggatgaggtgggacgatctcttgagtccaggagttcaagacaggagtgagctgtaattgtcaccactgcattccagcctgagtgacagatcaagactctgtctcaaaaaagaaaaaaaaaattcttataatgtatgatagtacatgccaggccatttaataagcaacttgaaggcattgtatttgtcttacagatattctcaataagtatgttgaaagattggataaaattttcacaatttagttgattatttcatgtacatacttttatgcagtaacacttttgcactaaaatagtaccgtctgctaacatgttgactgtaaatcatttgtttttttgtttgttttttgagtaggagtcycgctttgttacccagggtggagtgcagtggtgcaatcacagctcactgcagcctcagcctcctggggtcaagtaattctcctatctcagcccctccaagtagctgggaccacagatgtgcatcaccatgcccagctagctttttaattttttgtggagacagggtcaggctggtcttgaactcctgggttcaagtgatcttactgccttggcctcccaaaatgctgggattacaggcatgagccaccatgcccagcagcaaataatatttatagtccagatgttatactaaattctagcctcattgtctagcttttgtgatgacttagtacagtggcgcattttatagatgaggagaggggcatattggatgatcaggaactctaaagtaatctccaacttctaaggctgttctcgaacattcaatattgtttgaaaccttgcaycttttatttccttgagttctctgagaagagtggcttcataactccagtgtcctgctctctgtaggctctcaggaaagttgaatgaataagttggttgtgcttgtgatttatcttctgggaacttctctgctattatttatcatgaaatttgggtaatccttgctcagtttaactgcatgtgctggagaatatgttaagaatatatcaccaggcacagtgactcacgcctgtaatcccagcactttgggaggctgaggccggtggatcatttgaggtcaggagttcaagaccagcctggccaacatggtgaaaccctgtgtctactaaaaatacaaaaattagccgggtgtggtggcaggtgcctgtaatcccagctacttgggaggctgaggcaggacaatctcttgaactcgggaggcggagggaggttgcagtgagccgagatctcaccactgcactccagcctgggcaataaagcaagactccatctcaaaaaaaaaaaagaacatattaagtggtaagatgccaggtgctttccattagacagtgcaatcctccgatgactttgccttgtgttagtcctgtgtagcaaatgagaaaactgtggctcaggagcataagttgtttgaacacagctagtaaaaagcggaggtagaagcctgactgggaaagaaattcctaatgcatggattactgacaggttatttattactgaattgttttgcacatcacttttttttttttttgtgtgacggaatcttttttttttttttttttttttttttttgagacgagtctcgctctgtcgcccaggccggactgcggactgcagtggcgcaatctcggctcactgcaagctccgcttcccgggttcacgccattctcctgcctcagcctcccgagtagctgggactacaggcgcccgccaccgcgcccggttaattttttgtatttttagtagagacggggtttcaccttgttagccaggatggtctcgatctcctgacctcatgatccacccgcctcggcctcccaaagtgctgggattacaggcgtgagccaccgcgcctggccaacggaatcttattctgtcccccaggctggaatacaatgatgggatctcagcttactgcaacctctgcctcccaggttcaagcgattctcctgcctcagcctcccgagtacctgagattacaggcacccgccaccacacctggctaatttttgtatttttagtagagacagggtttcaccatgttggccaggctggtctcaaactcctgacctcaggtgatctgcctgcctcggcctcccaaagtgctaggattacaagtgtgagccaccatgcccagctgcatatcactttcttataggatgctccaaaggtagtctagttaccaagaaagagtcatggtgatcaagtttgttttgtttttttttaaatacttgtcatgtatggacaccattcttttcagcagattatttgagtgatatgtacaataatgtggtatgcatgggggataaagctgtgarcaagacacatttaatccatatcctcaaggacctttggtctggccatctagttctgtagttgggagacttttcctgtaaaggaccagacagtgaatattttaggctttgcaggccctatggtcttggttgcaaatactgaattctgccattgtgatgcaaaagtagccacagacattatttaaataaatgagtgtggctatgttccaataaaacttcatttacagaaataggcagtggacttgatttggcctgcaggttgtagtttgccgactcttggtctagtttatttgtttcttggcctctgtctctctttcttgctcatattcacagcagcaattttcatagagttccattgatttattygtyacagttatgtaggtaagattgtggaagaactggatcttttacaactgataaaagctaactcttgtattttcttttactcttttatccaggacattttatttccttacatcgaagaaaatgttaaagagtatctgcagacacattgggaagaagaggagtgccagcaggatgtcagtcttttgaggaaacaggttgggacatttctgtcttaaattcccaagtgtcttagaaatgagggtacctggagatttaggacatgctctgagcattttgtaaaataagtgccctggtttgataggggatagaagttgcagtgacttagtgagttgcctgcttaggaattcacagtacataattaaaggctggatcatgtcagtttgttgtttctggagttgctctttggttgtttttttttgttttgttttgttttgttttttttgtttttttttgagatggagtctcacttcgttgcccaggctggagtgtggtggtgtgatcttagctcactgcaacctcgcttactgggttcaggcgattctcctgcctcagcctcccgagtagctgggactacaggcacctgccaccatgcccagctaattttttgtatttttagtggagattgggtttcaccgcattggacaggctggtctagaactcctgatttcaagtgatctaccctcctcggcctcccaaagtgctgggattacaggcatgagcttaccacccccagcccacccaaaaagggcttaagtttgcaaatatatgatattgttaggcaatttaaatagctctagaaaaaggcaactctaggctgggcacggtggctcacacctgtaatctcagcactttgggaggccgaggtgggtggatcactcgaggtcaggrgtttgagaccagcctggccaaaatggtgaaacgctgcctctactaaaaatacaaaaaattaggccgggcgcggtggctcacgcctgtaatcccagcactttgggaggccgaggcgggcggatcacgaggtcaggagatcgagaccatcycggctaaaacggtgaaaccccgtctctactaaaaatacaaaaaattagccgggcgtagtggccggcgcctgtagtcccagctacttgggaggctgaggcaggagaatggcgtgaacccgggaggcggagcttgcagtgagccgagatcccgccactgcactccagcctgggcgacagagcgagactccgtctcaaaaaaaaaaaaaaaaaaaaaaatccaaaaaattagccggacatggtggcgggcacctgtagtcacaactccttgggaggctgaggcaggagaattgcttgaacgtgggaggtgaaggttgtagtgagccgagatggcgccactgcactctagcctgggctacagagcaagactccgtctcaaaaaaaaagagtcctttctgggtagaatgcaaaaggttttgagcagtctctacattttttattaacgtctctatattagtctgttctcacattgctgtaaagaaatacctgagagtgggtaatttttaagaaaagaggtttaattggctcacaggtctacaggctatacaggaaacatagcggcatctgcttctggggagacctcaggaagcttctaatcatgatggaaggcaaagccggagcaggcgtctcagatggtgaaagtcaggagcaagagagtggggaggggaggtgcyacacactttaaaacaaccagaactcactattgygaggacagcatcaaggaggatggtgctaaacaaaccattcacgagaagtctatccccgcgatccagtcacctcccactaggcctcacctccagcactgaggattacatttcaatgtgcaatttgggtggggacacacatccaagccatgtcattctccatatgacagtacttcatcattttgcactccctccttccttactgcaagcccctgctgccccctctgcagtgctcctgggtcctcacactcacactccccttccagactcctcaccccagctcactctggcccagccctcatacctcctttggtctcctgtgctttgttctaccctcttctccccaccagtcatcagtctgtcttttccttccacattgtgtgctatggaactcctgctctgttgtttttcttgttaaaattgcttcagtggcaaagatcttacatggtctgcagagctaactcactggcagttattttctagttctatattggatactgtggaatgctctctgtggatgttttactgttaggaattaggattcaaaatgtagttatgtcctttgggcatggaatatttgggattttaattttctggataactcagggttaatctgaaatacagtgagtccttacttaatgttgtctttaggttcttggaaactaagygaaatgacacttaaatttcaattttcaattttaaaccaaccataacaaaaccaattttttctccacataaatgttataacaaaatgatgttgaaggaaatgacattacttgagaaggtcatgccacttgaagtcacagtttccaagaacctttcaatgatgttaaatgaggacttactttactttcctcccttacctttttttgttgtcaaaaccttgttgaaacatacatacatagtcccccattattgtatataaatatgtacacatgtatctttagaaattggactgctttgtcacaaggtcattgttctaagtggctactaggatttttgcaagatgtgggagattataggagactgaatgtgaaccaacctcattacttcactagcttctttttgctgaattccaggcataaactaatttatgagattttctttgtttctttctccattagttatagtgcagagaaaattatcagattgagttaaagtcctggtttgttgatcccagtagtgaatcaacaaatcaaatcttaattctatcattatgtgctctctcttctcatatacaacatgcgtctcagtttaaatttcagcttttagcaaaaggaaaggtaatgtaaatttattaatccaggttcttttaggaatcatttgtatcagctccaaagtatatgatgtttcaatttgcagccatactagggctaatgatggagaaagttgttctgctgggtttttgggtctcgttttaaatgactgttttttgaataagcaaaaaacaaacatcatgttgtttctgacttaaaggctgaagaggacgcccacctggatggggctgttcctatccctgcagcatctgggaatggagtggatgatctgcaacagatgatccaggccgtggtagataatgtgtgctggcagatgtccctggatcgaaagaccactgcactcaaacagctgcagggccacatgtggagggcggcattcacagctgggcgcatgaaagcagagtatgtgcttgagtcagcctaaacatttcaccagtcccaaatccaaatatgttttttcaccagtcctctcttyccagcgtaagtcacaagactggtaaaacagataaaaatccacactctttttagtctaacaagtgagctttgtttcattttttcaaaacttggctaaaatatttcagctgactagattacccggacctgccagtctggtcttgtgggttgattgaaggacttgtcaaagtctccgtttaaaatagcttcctagaaaatggtgacttccttgaactaagtcatatttgattcttagcacatgagtgacagctccgttgggctgcttgcctggactgttaattacctgctttttgctctatgagacataggaaattttgtgccccaccgtgttgaggttactcagaggatgtccgcactaccacgttcttctttgctcttttgagcaacttccacagattctttgagtcttggttatggagttcctaatagcactcctgcctgaggagacttttgagtattatacttactgagaaattcttgattgattcagacagggtcctactctgttggctggagtgcagtggcatgatcatggctcactgcagccttgacctcccctagttcaggtgatcctcccacctcagcctaccgagtagctgggactaggcatgtgccaccatgcccagctagtttttgtatttttagtacagatggggttctaccatgttgcccaggctagtctcaaacttctgggcttgagcgatctgcctgccttggactcccaaaatgctggggttacaggcgtaagtcacaatacctggcctatttttttttttttagagctggggtcttgctctgtgatccacactggagtgcagtggtgccatcatagctcactgtagccttcaagtgaacctcccgcctcagcctcctcattagctgggaccacaggcacgcaccaccacacctggctattcaaaaaacatttttgtagaggtgtggtcttgctatgttgtccataccatattgctgataaattcttttcgtttgtttgtttctgtttttgctttgagaccgagtcttgctctttgcccaggctggagtgcagtggcgcaatctcagctcactgcaacttctacctcctgggttcaagcgattctcctgcctcagcctctggagtagccgcctgccactatgctaatttttgtatttttagtagacatggggtttcaccatattggccaggctggtcttgaactcctgacctcaagtggtccaccccatctcagcctcccaaactgctaggattacaggtatgagccacccctcccggcctatttttgtttttggagatagtctcactctgttgtccaggatggagtgcattcacacaatcttagctcactgcaacctccgccctctgggttcaagcaattcttgtacctcagcctcccaaacagcggggactacaggtgcgtgccaccacacctggctaattttttgtattttagtagagacagggttttatcatgttgtccaggctggtcttaagctcctgagctcagggcagtccacctaccttggcctcccaaagtgctaggattacaggcgtgagccacygtgccaggcctgctgagaaattctttttttttttttttttttgagacggagtcttgctctgtcacccaggctggagtgcagtggcgtgatctcagctcgctgcaagctccgcctcctgggttcacgccattctcctgcctcagcctcccgagtagctgggactacaggcgtgtgccaccacgcccggctaattttttgtatttttagtagagacagtgtttcaccgtgttagccaggatgctctcgatctcctgaccttgtgatccgcccccccttggcctcccaaagtgctgggattacaggtgtgagccactgcacctgggtgtgaaattcttaaggattttaggccattgcctgctgtaaaccctaggatccaagattgtttccagctgcatatatttcttttgtgtttctgtcaaatgagatgttgtttctttatttatgtactttacgaggagcttctaccttttaaaggatggactggaatttcaggatatgccagtgatctgggaatatcagccaggttcactttgtaaagcactcaaaaaagtggagacaggagactgtgcacccggtagttagcccatacttctcttggtcttggttccttaattatacaactaactgctgaagacaggaaaaatcctgtctccatgagtgcaaactagtactcagaataacatacttacatgtgtactggttttgaatacgttgatctctttccttcaattagtgcaacatgttaagcatgttaatacatataaagcggaagactccactgacattttccaggtaatcttttagagatgactggttctacaacccaagttctttgtgcttctcttttcacctttctcctgtgatgttaatttcctccatgactatggaaaacactagaattggtaagagagactgagtgtcagaagtcagaaaaagacatcttttgctgactggttaatgtgagttggtacaagtctcaactgacttgttatgtaattttttccccatataataaaacattgttttcttagttctcaaaaaatgcaggccgggtgcagtggctcatgcctgtaatcccagcactttgggaggctgaagtggggggatcacttgagtccaggagtttgagaccagcctgggtgacatggcaaagcaccatctctacaaaaaattaaaaaaaaaaaaaaaagctgggggtggtagcacatgcttgtagtcccaactacctgggaggctgaggtgggaggatcactcgagcccaggaggtagaggttgcagtgagctgagatcatgccactgcactccagcctaggcaacagagcaagaccctgtctcaaaaaaaagtaattccattttctagctaatcataagtttatagctttgagccttcaaactttgttttgattattttgggtgcagatctttctaaaagcatttccatgctttcttaaagcacagtggacataatttaaccttttcttgtcatgaagaacatcaaagattatattatatcattgctgttgtttgcttttttgagttcttcgggaatttaaaaaacactttcccatttcatccttttatctgtagtccctttttactgtcactagtggctgtctgttcaaaactatcctcctttccacatagattgttgcttctaatctgctgtgagcctggaacttgggcagtacgtttattagaactgcaggagtttgtagtctcagggagctgcttctcaggttaccatgtgggcacaaagagagaaacatatggcatctgttttgacaggtttttatctggctagatgaggtgttcctgtattttaacttagtggtcttccctctaggttctttgcagatgtagttccagcagtcaggaagtggagagaggccggaatgaaggtgtacatctattcctcagggagtgtggaggcacagaaactgttattcgggcattctacggagggagatattcttgaggtaggttacctagtttactttgttgttttgacgctatcaaagcataaaataatgaatcttaatggaaaactaattggaactaatagaatgcttttttttttttggttgtttaaaattaggtaagaagaaaataatcacttttaattatattgtatttacagtttcttctatataaggttgttatataaagtttattctgtgtcttgaaaaataaaatcagttaggatgcaaaataggattgtgcagtcctgagaaatatataaagactttttgaatacagcagagaacaaggtgcactcatttgtttctggctctttgaagaaatatagatttcatttaagaagaaccagcattattataggagaaccaggcacatttttaaatgtaataaggtcgtcacctgttgcatttcatgtacatgagaaaattcttgctagcccctctgtgtcatcatccctgcaccccctggaggatggggtgatcagtgaaagaagtgactacatttagggttttaaaaagaagtgctgattagctgaatatagaccaaacttaacaataggtaacttggaatatagacttaacttaaaataggttacttacaataggtaacttgaccagatactttttaaaaataaatatttaccggccgggcgcagtggctcacgcctgtaattccagcacttttggaggccaaggtgggcrgatcacgaggtcaggagatcgagaccatcctggctaacatggtgaaaccccgtctctactaaaaatacaaaaaaaaaaaattagccggacgtggtggcgggcacctgtagtcccagctactcgggaggctgaggcaggagaatggcttgaacccaggaggcggagcttacagtgagctgagatcgtgccactgcactccagcctgggcgatagagtgagattccatctcaaaaaaaaaaaaatttacttattttaacttacaataggtaacttgaatatagaccgaacttataataggttacttacaataggtaacttggccagacaagtttttaaaataaatatgtattgagcacctaccatgtgcaaagaacactttggctttggaggttgtaatattctaattttagtattttcctactttctgtcttatttttaaatcaaatattaataatgaaaccctttaatcattggtgactgttctcttaatacagatacaacttcttttctgctctctctgacaatcatgacaggacaaaagtacctactgagttcactaataagaattttactctctagttaccaagtgaggcaaactgcaagaaaaagaaaataagcaaaatcagttttaactttaaaaaaaaaaaacttaaaattactttttttttttttttaccttcccattggccaaacccagtttgagtgcttactatgcttgtttttagtttgtgaaaagttctgaaaacattcaaaagatcacatcttagtaactgaccctaaatatggacttattttaattactgttggtcaaattagcaagttacagatttgactccaattgtttccaagagggcagagacatagacgagcccttgggtagaatttcaaaacgttttaactagaaaatgagaatttcttgtaagtaaaataatagcttattcatgaggcaggttagagaaattttttcatcgtaagattaaaggacagtgttcagaatctttcatcaggagtaaaattcaatccagtgagtagtttgagtgcaaatcatctttaagggtaggatgtagggcatgtttattttaaactatttcagatgtaaaatgaacggtagtgaaaaccaggtagattatgaaatgatcttatgtatgttgagctggtagttttcttcttccaaatgtctgttgctataaaatctttatttttactttgtatagcctccataaagttccctattaagtagattttcagaaaatactgaacgaatgaagtaattgtgattgtcatgtatttcagagaaaggcatgaggggcatgcaagtgtatttgtattgccagtctttccccttctctttgttcagcttgttgatggtcactttgataccaagattggacacaaagtagagagtgaaagttaccgaaagattgcagacagcattgggtgctcaaccaacaacattttgtttctgacagatgttactcgaggtgagtaatagacttcttatattatatactccaggatatgaactgagcctggcactacaaatacattgcctctttaaagaaactttatatggggatccttgaaaaataaaacagttttacggttttatataaagaaacagtgtctggttcaagttcatgtttgaattaaaaaaaaaaaacacagcagtgaaggcaggcttggtggctcatgcctgtaatcccagcacttctgtgggctcaggcaggaggattgcttgaacccaggagttcgacactagcctgggcaacaatgtaagacctctgtctctacagaaaaattcagaaagttagttgggtatgatggctcactcctgtggtcccagctgcatgggaggctgaggcaggggcatcaggtgagcccaggaggtcgaggccgcagtgagccgtgtttgtgccactgcactccagcctgggtgacagagcaagactgtctcaaaaaagaatgaaccaacyctgggggttgcatgtggggaagtggcattgaaaagactaactcttctcgtttaactccttgtccgtgatttcccagccatcgctatgtacacacacacacacactatgacacaggaaattaacaggaagacttagaggagttgtcatgggaaggagcatgcaagcggggttgtgagtataaggggtagktagttgagccagccagttctgggattaaatgcacagttccatttgtgatccccggacctttgctctatctcartattaagaattataacccctgtccttagaccacttatagtttcttcatattcttgtgtttagccacttaatttttgtatttgggatcacatagtacatctataatttcagatctttctcttctcatttaagccatttcctcagttgcaattgtagaaattattcctaattttggagaatagaaataatccctaaattggcttcaaaatgaaattagctccctttgattctctgtaaggaggttttattcctgcccttcatcttctgctggccccatacacacttaggcggtggggccagaacttgggtcatcggcagctgggatgaggcagggagctgtctgcctgcttgctcttttctctctggtcctgttttggtaccacatgcccagacttccactgctgaggcagaatgaaaaactaagttaatatcccaaataatggctgggcgcggtaactcacacctrtaatcctagcactttgggaggccaaggtgggtggatcatttgaggtcaggaattcaagaccagcctggccaacatggtgaaaccttgtgtctactaaaatacaaatattagccaggcagtagtggtacacgcctgtaatcctggctactcggctgggggctgaggcaggagaattgcttgagcctgggaggcggaggttgggatgagccgagatcatgccactgcactccagcctgagcgacagagagagacccttctgaaaaaacacaataaaataaaaaataaaatcccaaataatacccaagtatgaaaaagtgtctcagcattacaacagtagagcaaatagatgcttagggataaaacttgccctgcagtgaattagataaaaagcctgaatatggaacggccacttgtagtgtcaagycccatgtggattgtgatggcttaacttggtcatattcccgggttgccagtcacgatgaaaactttgctcagggcagtcaggctaggaagtaggggtgagtggaagatagctgcctttctccaatggcatctgcagaggtggtctgaagaagacattcccacacagagaggggagtcttgagtactgtttgctctgggaaagtgacaggccctttcacaggcagaacagaaagcaggcacttgaggaggtgggtgggtggaagaaacagctcagccccagtgtgtctcctgggaacttaactctctcagcacgactgcccttcagttaatctgttcaggtgctgtgactcttctccaaaggctgagaaactaatggtgattactcttataccaaatctaaattccacgggatttatatatatatattccagatttctcaccagttttgttctatctgtcctagtaagcgccatctstcttatcacaggcctgtatcccatttcccactctaacttgctccattctaggctgggagtatgacatgtttagggtctggaggtaagagcagatatcttgggctgattaaaccataggattccatttgtcccattatcttctttgtgtttttatttttttgatacagggtctcactctgtcacccaggctggagtgcagtagtgcgatctcggcttgctgcagccttgacctcctgggcttaagcaatcctcccacctcagcactcttgagtagctgggactacaggcacacgccaccacgcccggctaatttttgtattgttttgtagagatagagtttcaccatgttgcccaggctggtctcgaactcttggactcaagtctggcgttcaagtgaactcctgggtccaccgtgcccagccccatatcattttaattcgtgttaccaacagcttgtcctttgggaaacagctcagttctcggtatgggctgatgggaggaagtggaggaaaggtgtaggacagaacatggctccatccttctgcattcataagtacttaataaagctcagaagtgtaggatacactgccattctcttctgtcaagtacagttacgtattttttaaaattttatcatggaaaaattaaaacatacataaaagagataataatatagtcaaccccagggtgcccatcttttagcttcaacagtcatcaaatcagggccaaattcatttcttccatccccacatccccctgctgactttgctgcaaatctcagacatcattttttggtgtttctgacacacacacatcctttgatttttcacagaggccagtgctgctgaggaagcagatgtgcacgtagctgtggtggtgagaccaggcaacgcaggattaacagatgatgagaagacttactacagcctcatcacatccttcagtgaactatacctgccttcctcaacctagagaagggttgttaaggcagacygccctgttccccagagttgtccctgtagtgtctaggtttattctaatggtaaaagtaacttacttaaaaaacatatgtacacatatgtatgcaagtatgtatatatgtgtatgctcagattaacttccataggtacataagtgaaagaagtctcagttcagtgaacacaaaacttatttaaagatgctttatatgtagaaattgtttcaaatcatactctaacccttagtgagggcaaagtgtagttggtagaagaaattgctaaatamctatctaatgtgctatgtttatcaaatcgtgtactaaaatggaaagctagttttgagaaattattcagaagccttgttattttaaaaatgaaatatttcaaagactgaatattttcaaagaaaatgaataattcattgcccttgtgatttagaagattataacagctgtatttcatatttgcctccttatatatatcaaagaccaaggtatttccttctgcttcaaaagaacaaaattgggaaagaaaactcacttgagtcttgatcaaacaagtgtcttttacttaagaagaaacttggtaatcattgtggcacccacagcaagcagttgccttaccagtgaaaaaggtgcactgaggtaacatctaaaacagagatgtggttcttaatgtttaacagaacagttctaatcctgccacgtgttatcattatagattttatagttgcctttctaactacttagcacagtttgagaatacgttaattgctatttactatttaaaaagttttactgaaatcagtccataacattaagatgagccctaatatgtaagattttcctctggaatggatgtgagaaatgtaaattttataacagcagtatttatcctggtttaattctaatacgatgtcatgttaatttcatgttgtgattaataaaagcattttttcttcactcagttttatataggttcctgaactctatccacatgccgccatagcaaaagagaaactgaaaaacaagaatatttagctcttatcttaatcgtgtatcatgtgtgtgttttaatggagtgccggtggcaattcatggttattatttgagttatgtatacatataaggttactattccatttggatagtaagcattcaggatatgagtggagttccttatatttttgagaatcttaactttgaggtctctaaggtaatgcttgaaggagggagttactctcctaactaatcaagaaaaactcacgaatcctggaggagcaattttagaaatgctttgaataaggaaaaagaagtcttagaactatgagaggacaggggatataaaagattttatgttgataattttgatctagtagccaattaagaaatctagggtctatgaaaatatatgaataaaaaagaaaggaaatgagtttaggtacatcttagaaatgggaataatttgtaaatgatgataaaaccacaaatagtaataaaaggatgaacttaataccttttttggaaagctcataggcagatggcagaaaggggtatatcttaatgttatttaaggagtagttggaaaatgaagaaatgagaagattaggcactaggatctagattagaaaggaattgaataaaaaggaaggcacacagcatctagccagcaaaggattgaggtggagaggcattttactacccatgtacactgagtaaggaggacagaaaatcaatagatttcaggaattaagagaaaattgaagtatcaaatttattttgcaaagtaagggaaaaactagttgaatggaatcgtttttagatcctaggaaaaccattcacaaatgatggagaaaggtcgtaggaagaatttgaaagataaagtagattggcaagaggaaaaatacctatctaagaatgtaagcagtgatacacaatgtatacatgtattgaaacaccacagtgtaccccataaatatgcacagttatgcatcattaaaaaactttttttaatgtggataatgagctagaagatgaagtcagatgaattcatagtccttatgaggggaaggaaggcaaaaaacctctggaacttccaaaaagaggacaaaggcctcagcctcttgtttgcagagaatatggaggacaaaagcgtcttaaagttgtggctctttttattcctgtttattaatccagatgtacctctgttgttctctttcctacagtggcgctgatttctaatcttgggtcaaagcccaggttggttttttagaagagaagcccttgacagaagattctctaatcttatcaacatttctggagtagcaggacttctttttggtctggaaagcgggttttagttgctacgcagaatgtcaaatgtgtagttgcacaaggaaaggttgaaagccactggcttattgccagggcagatgcacggcagcctttccccagcagatggtgctgtttctccagacttgatatgaagtgtgaggctccacccctcctccccccctcccccaacccccgccccgtcgcccgccaaatacagcagatggagctaagagagagaaaactatattttgtttatccttacaagccaaaagcttgatgttgcaagagttggagtagtttggaaaaaatggcagtaatcctgaatgaaatccaactatctaatattccttttcctcaataaaaaattagtgatttttagcccctttttccagcggcagtgttaaaaagggattgttttcagggctttttttattcccacgagtacaaagttgagtataatatattccaaaagtttgttaacctaccacctgtgcccagatggcaaagtgatattatcctcaacctaatatttaagaataacgtggagtttttactaaaacacttggagtaactgacagaagtaaaatttctaccttacaaattcaacccaaatttattccttaaatatttattaagcatttaccttgcatcccagatctgctatgaggggacaaagttcctttctactcccattgtgcatacatttttcgagaagagaaacaatggtgactaagacaagaaaaaattagatactagtaagcgctctgcagagaacacagggtagaataactttacaggaggggtgatgagaaggtgacatctaatctaaatgacatggaagacatgtaggaaactaggagaactggtgttccatgcagatggaacagcatagcacagatctagggcaaagcttggcctttttcaggaattgagagcccagtggctggataccatcagagaagtgggctgaagccagatgatagtgctttgtactccagtaagaagtttgaattgtattctaagtatggtaaaaagcccctggaggactttgagcagaagataacctgagtggtttacatatttaaggaattctgtatggaatggagaatggtttataagtgggcatgactgcatgcaggaaggtgagttaagtatatcagggttgagtgctgcaggcaaaaatcacaaggagttaggtgtatacaacatcagtggaagaactgggagaagagtcagggcaactaccactggactgtggagttagaggacacctcacagtggttagctcaggaagcctgctaccattgccactgtagctcatgcccacgacgctggccagactctggaatgccaggccccattgctgcaacctctccaaacagaacacttccatctcttctccaattagggggtaaaattggcacttgagagagtcaatctactgggtctgagaaggctgttgtagtaatgaaggtaagggatggtggtggcttgccttagggtggtaaaagcagaaatagaagtggaaagattcagaataggttttagacatgacagtgaccacttattgattgattggatttgaaagggtaactcttacatttttagcttaagcaactggatagatgatactactggaaaaatagcagtgctgctgataataatgtaaagccaatgtagatcctgatgtcaacatgaccgaagagcagttggatataagtctagagttcagaatgctggcctggctggagatcagatttgagagttcactggcatagagatgctattaaaagccatgggatggggttgcttaggaagagtctgttgatagagaagagagcctaaacagcccgtaggctccaacactagaggtcaagccaagcaaagaaaccagcaaaggagatgggaaagtattgggcactgaggaaggaaaaccaggagagtggcaggggagcccattaaagaaggaactattcaaatttatcaattgctgctaagaattcagttgagaatagcagtggccctgcagtctaagtggagtggtgggaacagaagtaagattaagttgaggaggtcaggagggcctatgaggtctagctaaagatttatccattttgttgatctttttaaagaagaacatttggttttgttgattctctattttgtttatttccactctaatcgtatttccttctgcttgctttgggtttaatttgcatttctttttctagttccttaatgtggaaacttatgtaattgctttgtgagttttttttttctttttttttttgagatggagtctcgctctgttgcccaggctggagtgcagtagtgcaatctcagctcactgcaacctccgcctcctgggttcaagcgattctcctgcctcagcctcccaagtagctggaactacaggcacctgtcaccacgcctggctagtttttgtatttttagtagagacagggttttgccatattggccaggctggtcttgaactcctcacctcaggtgatcagctcgcctcggcctcccaaagtgctgggattccaggcgtgagcgactgtgcccggccattttctttttttttttttttaatgtaggcatttacagctctgagtttccctccgagcattattttcactgtatcccataggttgaggtatgttgtgtttttgttttcatgtgtctcaatatattttctaatttcctttgtgatttcttccttcacccattggttgtttaagtgtttaatttccacatatttgtgaattttccaaatgtccttctgttactgatttctaatatcattcccctatacttagagaacatactttgtatgattttgatcttttaaaatttaacaagacttttcatggcctaacatatagtctatcctggagaatattctttgtgcactggagaagaatttaaattctgctgttattgggtggagtgttctgcgtgtatgtctattaggtctagttggtttgtagtgttgtttgaatcttctgtttccttgtttacattctgtccagttgctctattattgaatgtgaagtattgaatgctccctctcttttgttaaattgtctattcttttcttcaattctctttagcttcatctattttgctgccctgttgtaaggtgtgtatatgtttataattgttatagcttcttgctagcttctttaacattataatgtccttctttgtctcttgtaacagtttttgtcttaaagtctattttgtctggtattactgtagccacttcaccctctatttacacggaatatctttttttttttctttgagtcagggtgtcactccggggccccaggctggagtgcagtggcaagatcatagcttactgcctcaatctcccaggctcaagcgatcctcccaccttagcctcctgagtagctgggaccacaggtgtgcgacctcacacctagctaatttttgtatttttgtagagatgaggtctcactctattgcccaggctggtctcaaactcctgggctcaagctatctgcctgccttggtctcccaaagtgttaggattacagcccggccgaatttcttttaccatcctctttctatttatttctgtcctgaatccaaaatgtgtcttttataggtagtatgtaatggattatgttttcaattcattatgccagcctctgccttttaattgaagagtttaagccattgacatataattactgacaagcacttaattctgccattttgctatttgatttctatatatatatatatgttttttttttttttttttgagacggagtctcgctctgtcacccaggctggagcgcagtggtgcaatctcagctcactgcaacctccacctcccaggttcaggcgattctcgtgcttcaacctcacgagtagctagggctacaggtgtgcaccaccacacctgactaatttttgtaattttagtggagatggggttttgccatgttggccaggctggtctcgaactcctgacctcaggtaatctgcctgccttggcctcccgaagtgctgggattacaggcgtgagctaccatgcccagcattgtcatctcttttaatatatatttttgaatttttttttagtgatttcccctgagggtacaattaacatatatttataacattctagttctgattaataccaccttagtttttgtttgtttgttttaagatggagtctcactctgtcccccaggctggagcacagtggcatgatctcagctcactgcagcctccccctccggggttcaggccgttcttgtgcctcagcctccctagtagctgggattacaggcgggagccactgtgcctggccactaccactttagtttgaatagtatacaaaactttgctccacataactccattctccaccatttaagttgttattgtcacaaattacatctgtatatattgtgtacccatcaacatagatttattactattgctttatgcagttgtattttaaatcagataggagaaaaaggagtagcaaacaacaaatacatttatactgtcttttaatatttaactattgtattagtttcctagggctgcaaggtactgcaaattgagtggcttaaagcaaaagaaactt

SEQ ID NO: 94126 - DNA, 26509 bp, Homo sapiens
gatatcttgatagccagtgaaatggagggtaactccatcctccatgccatcaaagtcttaaatttcctggcagataaagggtacaaggtttctaagaaagaggcatagatctctcatcccaccattcagtacctgggattcaagggactcacaatcttctcccagatcacagaggcaataaatcaggtggcagtctccagtatccttaaacaactacgtggtcctttagggatgcctggattttgtcaaatttagatccctaacttcaggttaatagccaaacctctctaggagactttaaaagaagaagaaagggaacccctttcttggagtagagaatgccaaaatgcctttctaaccattaaagagaaattgatgacagcccctgccctgagtctccctgacctacaccaaccttttgatttatttgttcaagaaaaacagggaattggacttggagaattaactcaagaccttgggaccttaaaatgtcccatggcctactttataaaacagcttgacaaggtaactaagggctggcctacctgcctaagggcagtggctgccacctgtgatatattgcaggaagctgagaagttcacctttcagcagcccatgaaggtacatactatgcattatgtgtttcccctgcccaagcagaagggggctattgtggactgccagggctggaaaagcaccaaaccatgcttctagataaaccaaatataactcttaaagttatttctactcctaatcctgccacccggctaccaaggaacctccagcctcctgttgaggattgcattcaaataattgatcaagtttactccagcagactgggccccacagatttgccattaacagaacccaaccaagaattcttcaccgagggaagcaatttcatggaacaaggagtcgggagggccagctgggttgaggcttaactcagcagaactgagaaacctgccgaagttgtaaaggctctaatgaaggaaataattcctccatatggattcccacaaactctccatagtgacaatgaagccacttttttttttttttaacagagtttcactctgtcatccaggctgcactgcagtgctgcaatcactacaacctcaacctccccggctcaggggacccttccacctcaacctccctagttgctggaactacagtcacgcaccaccacacttggataatttttgtattttttgtagagacagggtcttgccatgttgcccagactggtctcaaactcctgagctcaaacaatccacccgccttggccaccaaaagtgctgggattacaggtgtgagccaccacacccagcctgaagccacttttcttgttgttgttgttttgagacggagtctcactctgtcacccaggctggagtgcaatggcgcagtcttggctcactgcaacttccacctcctgggttcaagcgattctcccacctcagcctcccaagtagctgggactacaggtgcgtgacaccacacctggctaatttttgtatttttagcagagacagggttttactaggttggccaggcttgtctcaaactcctgacctcatgatcacccgcctcggcctcccaaagtgctgggattacaggcgtgagccactgcgcccggccatgaagccgcttttatagcccaaataacccaggaagtatggcagcttctgagtgtcaattagaaactgcatttgtcttggagaccccaatcttctggaaagactgaaagaatacataagacatcgaggagttgctttctaaagttcgccacgagacaaatcttacctgggaaaaggtcttgccccttgccctgccatgaccagtgggatttttttctagggattcaaggctggttcgatatttttaaatcaaccaatgtaatctaccagattaataggctaaagaagaaaaattacatgattatgtcaatttatacagaaaaaaatttacaaaattcaaaatccagttatgatttttaaaaaatactctcagaaaactaggaataagagaataatttcctcaatttgattttttaaaacctgcaaaaagcctacagctaaaggccgggcacagtggctcacgcctgtaatcccagcactttgggaggccgaggcgagcagatcacgaggtcaggagtttgagaccagcctgaccaacatggtgaaaccccgtctctactaaaaatacaaaaattagccgggcgtggtggcacacacctgtaatcccagctactcaggagcctgcggctggagaatcacttgaacacgggaggcagaggttgcagtgagctgagatcgtgccactgcactatagcctgggtgacagagcaagactccatctcaaaaaacaaacaaacaaaaaacaaacctacagctaacattacacttagtggaaaaagaccgaatgttttcctctaacatcaggaacaaggcaaagatgtccactctcagggtcgggcgtggtggctcacgcctataatcccagcgctctgggaggctgaggcgggcggatcatgaggtcaggagatcgagaccatcctggctaacagggtgaaactccgtctctactaaaaatacaaaaaattagccgggcgtggcggcaggcgcctgtagtcccagctactcgggaggctgaggcaggagaatggcatgagcccgggaggcagagcttgcagtaagccgagatcacgccactgcactccagcctgggcgacagagcaagacaccgtctcaaaaaaaaaaaaaaaaaaaaagaaaagatgtccactctcaccattcttattcaacataatattgggaattccagccaatgaaataaggcaagaaaagtaagtaaaaagtatacagactagcaagaaagaaataaaactattcatatttacagataacatgattatctacgtagaaaataccaaggaatctaccaaaaaacaaaaccaaaaccaaaagactcctagaatgaataagtgggtacagtaaggtcacagaatacaggattaacatacaaaaaacaattatatttctgtatactagcaataaacaagtgaccagtaaaattaaaaatataagaccatttataaacactccaaaataatgaaatgcttaggtttaaatctaacaaaacatatactgaaataatatgctgaaaattataaacttataaaagaaaccaaagaagatgtcaaaagagagatatattgtgttcatgaattagaagactcaaaagatgcgagtcttctcaaattgatattcagatttaataaaatttctatcaaaatcccagcatgctattttgtagtagatgtagacaagatttctataacatttgtatggaaagcaaaggacctataatagctaaaacaattttgaaaaagaaggataaagtgggagaaatcagtctacccagtttataacttcaagatttatatacagctatagtgatcaagactatgctgtattggaaggaacgcattcaaaccacagcacctggttgagggatagacacatagttcagtaaaataggataaagaacccaggaatagtcccacacaaatatgcccaactgattttcttttttatttttgagacagggtcttgctctgttgcccagactggagttgcagtggtgtaatcatggctcactgcagtctcctcttcctgggctcaagtgttcctcccatctctcagtctcccaagtagctgggactacaggcacgtgccactgtgcccagctaatttttatggtttttttgtttttgttttttgttttggttttggttttggtttttgtagagacggggttttgccatgttgctcaggctggtcttgaactcctgggctcaagagacctgcttgccttgacctcccaaagtgctgggattacaggcgtgagccaccatgcctggcccaactgatttttgtcaaaggtgcaaaagcaattcaacagaggtgctgtggtttgaatgtgttccttccaaaatccaggtattaacattttatggccaaagtggttgtattaataggtggggcctttaagaggtgattagttcatgagggctcctctggtgaatgggattaaggcctgtataaaagaatcttctcttcatgcagcattcagcttgcttgcccttctgccttccaccatgtgaggatacagtgttcctcccctccggaggatgcagcaacatagcaccatcttggaagcagatggcagccctcaccagacaactaaacctgccaacaccttgatcttggacttctcagcctccagaactaaataaaatttagcttatgagaaataaagttccattctttataaattacctagtctccagtatttttgttatagcatcacaaattgactaaaacaggaggaaagatagccatttcaataaatgatgctggaataacaggacacccatgggcaaaaacatgaaccccaacytaaacctcacaccttaatacaaaattaactcaaaatagatcacaaacttaaatctaaaacacataatgatagacttttaaaaaacaccatagaagaaaatctctgggatctagggctaggcaaagagtttgcagacttaagaccaaaagcatgatccataagagaaaaagttgacaaagtgatatattaatttcctgtgggaactataataattactacaaaattagtggtttaaaacaacagaaatatattctctcacagttccagaagccagaagtctgaaatcaatattactgggcccaaatcaaaatgtcagtaggtctatactgcccttgtcggttataagaaaggatgcattccttgcttcttccagtttctggtggctaccagagttctatagcttgtggttatatcattccaatctctgcctccacagtcacattgcctttccctcttccatcgggactgaatcatcctctacctctctcttataaggatacttgtgattgcacttagggcccatcccaataatccaagataaccttttcaattcaagatctttaacctgctgggcatggtggttcatgcctgtaatcgcagtactttgggaggctgaggcaggaggatcacttgagcccaggagttcgagaccagcctgggcaacatagcaagacccagtctctacaaaaaaattttaaaattttagccaggcatggtggtgcccacctgtagtcccaactactcaggaggctggcgtgagaggaacgcataagcctgaggttgaggctgcagtgagctgcagctgcaccattgcactccagcccgagtgacagagtaaaaccctatcaaaaaaaaaaaaaaaaactttaacgtaatcacatctgcgatcacatctgcaaagttcctttatctgccataaaatgtagcctttacatgttccagggattaggatgtatacatattttgaggggccactattcagcctaccacaattggacttgatcaaaattttaaatttttgctctgcagaagacccaagaggatgaaaagacaagctacagaatagaaaagattttcaaacttaggtacctgacaaaggactggtttctggaatgtataaagaaccctcaaaactcaacaagtttttaaaaaatccaattagaaaatgggcaaaagacataaagagatatttcactgaagaggatatacagatggcaaaaaagcatataaaaatgttcaacatcattagctatgaggaaagtgcaaattaaaaccataatgatacatcagtacacacctattagaattactaaaataaaaaaaaatagtgacaataccaaatgttagccagaaaatacagggaaactcaatcatgcatacactgctggctagaatgtaaaagggcatagccactggggaacagtttggcagtttctttaaaaactaaacacgcaactaccattggaaccatcagttgcacttctgggcatttatcccagagaaataaaaacttatgttcatacaaacacctataaacaaatgttcatagcagctttattcataatagccccaaatcgtaaacaacccagatgtccttcaacaagtggatggttaaacaaattgtgctatatccatacacggaaccactattctgtaacaaaaagaaacaaactattgatatttggatgactctgcagagaattacaccaagtggtaaaaagaatccttaaagcttacatattatatgactctatttacataacgttcttgaatgacaaaattacagaaatggagaacagattggtggttgccagaggttaaggggagggcgtggttggggagcaaatgggtgtggttaggaaaggagaaagagggattcctgtgctggtgaaaatgttctggaccttggctgtattttattattattattattattattattattattattttgagacagggtctcactctgccatccagagtagagtagagtgcagtgagctgtgattgcaccactgcacttgaactcctgggctcagatgacccacctgccttggcctctcaaagtgctgggatcacaggcatgagccaccttgcccagccttgactgtattaatatcaatattttgctggtgctattgtattagagttttgcaagatgttcccattggaggaaactatctacaattatgtcaaatttacaattatctcaaagtcaaaagtttaattgtttaaaaagatatacaaaatgcatgcccaaattttatactagatttcataggcatgaaattcatcaaaactttaaaattctcttcttcaaaagacaccgttaagaaaatgaaaaattaagccagacactgggggaaaatacttgcaatgcatatatctaacaaaggactagtatccrtactatataaagagctttcacaattcaataaatgcaattaaaaccacagtgagatatgacttcacaaccatgaaaatggctaaaatgcaaaagtctgacaataacaagtgttagcaaaaatgtagggcaagcgaactgccacatatgactgttaagaatataaaatggtggctgggtgcagtggctcatgcctgtaaatcccagcactttgggaggccgaggcaggtggatcacaaggtcaggagatcgaaaccatcctggctaacacgttgaaaccccrtctctactaaaaaaaatccaaaaaaaattagccaggcatggtggtgggcacctgtagtcccagctacttgggaagctgaggcagracaatggcatgaacctgggaggcggagcttgcagtgagctgagatcacaccactgcaatccagcctgggtaacagagtgagactccgtctaaaaaaaaaacaaaaaaagaatataaaatgatacacatattttggaaaactgtgtagcagtcacacctagatagctacccgagagaaatgaaagcatgtattgacacacagacttgtataggaatgctttttcataatggccctaatctggagacaacccaaatgttcaccaacagagaaatggataaacaaattgtggcatatatgagcaatagaataaaaacaataaactattggctgggcgtggtggctcacacctgtaatcccagcagtgtgggaggccaaggcaggcagatcacaaggccaagagatcgagaccagcctggctaacatggtgaaaccccgtctctactaaaaatacaaaaactagctgggcgtggtggtgcgcgcctgtagtcccagctactckcggggctgaggcaggggaattgcttgaaccagggtggcggaggttgcagtgagccgagatcgcgccactgcactccagcctgggcgacagagtgagactccctcaaaaaaaaaacaaaaacaaaaacaaaagcaataaactattgatacacacacagacatgaatgaacctcaaaaccagcgtggtgagcaaaagaagacagacacaaaagactccaccatatggttccatttgtatgaaattctagaacaggcaaagctaatctatagtgacaggaagcagatcggtagttgcctgaggctaggggagaaagagaactgactccaaaggagtagggggaaatcttgggggtgatgaaattttctatatcttgattgtggtggtgggtataaatatttgtcaaaatcacccartggtactccagacatgtgtatttcattttatgtaagttataattcaataaggttgattttyatttttatttttttgacagggtattgctctgtcactcatgctggagtgcagtggcacgaacacgagtcactgcagcttccaactcctagactcaagtgatcctcctgcctcagcctcctgagtagctgggactacaggacaccacacccagctaatttttattttatttctgtagagatgggggtctcaccatgttgcccaggcttaggttgattttttttttttttgagatggagtcccactctgttgcccaggctggaggcaatgrcgcaatcttggctcactgcaacctccgccttccaggttcaagcgtttctcctgtctcagcctccccattagctgggattacaggcaccctccaccatgcctggctaatttttgtatttttagtacagccggggtttcaccatgttggcctgkctggtctcgaactcctgacctcaagtgatccgcccgccaaggcctcccaaagtgctgggattacaggcgtgagccaccgcgcccagttgcttaggtttatttttaaaagacaaaatacaagcccatattttgttttagattcaacaggcacaaaactactgtttcgatgcttaaatttttggttgcctgttagtttctaaatgcttactcttaatgcctgtacttaatccttcctcccctatagatgtggagaaatttgaatttctggctgtggtccaagaccacactttgagtagcatcaccctactccactttgccaactacccgggttctccaacaggcattcccacaggctccccttccaaaccttactctagaaagctgggaggccagggacaggggggtccaggcagagcccggggtcactgggtcttgaacaccggcttgccccgcagccgcagcactctgtacgtgttgaggccgggcacgtcgaagccgggtgacagcccgtggtgatccaaggggtagaagttgaccwgctgcccgtgctgggcctcgagcgagagccacgcgtcgccgagtggcagtgcgcaggggaactcgtgggccacgtgcagctggaagacgcggccgtgcaggtggcgcagcgccagggtgcggaacgctggaggcaccagcgcctccacgcgcggcccgaactggcgcaggcgcagctcgcccgccggcccggcgcgcacctcgtagaaggtcaggttggcgaaggtgaagtagccggcgaaggggtgcgcggtgggcggcggagccgggccgggctcggcctcccggagggcgcgctccagggcgggcaggagctcatcgtaggcccgcgccaccaggtcgggcccgggcggccgtggccctgccagcagcagcaccaggcccagacgcagcgggggcaccagcgagaaggtggcggcgtagccgtccagatcgccgtccttgcgcaccacgcggtagccccgctgcgcgtggaactcccacggcgtgcccgtctcgttggcgaagtaggcgcccgggcaggccagcagcggcgccagcagcgtcttggccgcgtcgggccgcaggagccgccggggcccgccgcccaggagcgccacggccagcttggccaggtcggcggcggtagagtacatctggcccgacggccggtaccagcccaggtcatagagtggcgccggccgcccgctgccgtagaagcccgcggccaggcgcgcgcgcacgtcgggcgtgaggtcaaagcccgtgtctgccatccccagcggctccagcackttctccgagacccagcgctggtagtcgccctgggcggtgtgagctgccaggacgtgggccaggagcgagaaggccagcgtgctgtaatggcatctggaaggagagcagtggcaagtgggacggggcccttcctcacccgcccgcgctgtctgaaatgccaccagtttcatgggactgggcggggctgggaaggaacctgctcccctgcatcccaggtggtcagacctggaagagactttggagcactgactctgactctcttctacatctgggaagaccaaggcccagagaggggcggggaattgcccagggtcatacagcaggatggaggagagctgagctcagcggtgcacctgggaaagctgtcacacaaatcttattggtccttcacactttagtatgatttaccttatctaatggaaaattaaaggcttacactgctctggggaaacaaaaatgatagtgaccatgtatgaggcaaggtctcacccctcccttcttccaggctgtagcagacaccagtaaccagcaagaggcctcttttctttcccagagcaaatacagtttcagaatctctaaaacagaaaggtgcaaggatgtgtgaaaattcacaaattctcctaggcattcctgaactctgggccaacttccttatttttgcagatgaggaagattagttagatgagtttcacagagataaagtgcaccacccaaggtcacattgccatagttatttgcagagctgagaggaggactccagcctgaagatgtccaagcatctcctctctctgcatctcctggatcatttcttccttaagggaagtggggcctgaggttcagcatttggagaagcagagggacaaatttggaaaagggtcactgaccagcggctcagaagggggcccctgaagctggggagtgccagctgtcctctgtccagccccacagccccactgctcccagagtggggcttctctgttcagtggccacccagctatccactccccatctggtcagcaacccgtttatttccaacctggcaaaatctgtattcaccttgcttatttgctcacggtgtctccctcacaagagtgcaaactccacgaggagcaaaccgggtgwttatcaccttctgggcaaagtaggtgctcaataaatgttaagtgggtaaatggaaaaaacattccattcaaacagaacaggattctgggcccagctctcccctgtcttgctggcctcccctctctaggtcttgccctttgcagctggggagcaggtctctcccggctctgccaacctaggatgaggtgatgtgggctctttgccaggcaggtgtgtctccccaggaggctcctaacatgaggctgggcatcagggtatgctcctcacctggttcccgggtccactaccagcacatcgtccttgagcaggttcagggcctcctgggtgctgcccttccacagcagtgaagtggagcgcagccttctgggcagccctagggaggagcagtggtcagacttaccgggcccggctgagggtgggatggtgggcccctgggtgcactccctccccaccttccgtgagttgagagataacaacaacaaatcagttttttaaaaaagaaaatcagcctagygtggactccagtcctgccttctcttcctgcctgtgtgtcactgggcaggtcactgggcctctctgagtcccagtccttcatctgtaatataagggaaataatccttgtacccaagggctgattagattagattggataaaatgtttagtatggtgcctggcacatactaactgctcaaaaaataattgctatcatcaactatagaaagtttggggccgggcgcggtggctcacacctgtaatcccagcactttgggaggccaaggtgggcggattgcctgaggtcggagttcaagaccacgctggccaacatggtgaaaccccatctcttctaaaaatacaaaaaaattagctggacgtcttggcatgcgcctgtaatcccagctactcaggaggttgaggcaggggaattgcttgaacctgagaggtggaggttgcagtgagctgagatcgcaccactgcactccagcctgggtgacagagtgaaactccatctcaaaaaaaaaaaaaaaaaaagagtttggtccaggtgtggtggctcacacctgtaatcccagcactytgggaggctgaggcgggaggatcacttgaggcctggagtttgagaccagccttggcaccatagcaagaccctatgtctacaaaaaataaataattagctggactcagtggcacgtgcctatagtcctagcttcttgggaggctgaggcaggaggattgcttgagcccaggaagccaggttgsagtgggccatattcatgccactgcactccagcatgggaaacagagtgagaccctgccaaaaaaaggagaaggagaaggagaaagaggaggaggaggaaggagccccagttctgtgtgtgggagtgacaccaaccacatccattgactgagactcaggcctgaacacactttgtaaaatgatgacatggtgggcacttgagggattcctaccttttggagttgatgggtttatgactgcagatatgaccaaaggcgtctggggcagggcagayagtacctgtcttcacccccttacctgtgtcaatcacagcaaaacccagcacccctccctctaaagaccaacagagggtccttcagaagctttcagagcaatccctcygcayctgccttgctctgttcctgatcccgccctgcccaattcccgtgccccagcttcatcttccagtgccagcctgctcctgcccccaaccttgtcgacttcatcttgacttgttatcatagctttatgattataaaataatttattataataagtaattaatttacatgatttaagaytcaaaggaaatcaaagartatacaatggaaaattttcgtcttacccttctccctagctacccatttcccctccctagaggcaacctaatgtttcaatctctttagctcccttccaaagatatttgatgcatatataagctaatatatactacatacttgtgttatataatatgtacattacacatattcatatacacatatccattatatatgtatatattattttaattatttatatggtagcatacaaaatatgctgttacatgcttttttcctacttagtattctatcttattccatctcagtacacgcagaacatgattatcctttttttaggtctatacagtgtttgattgtacagctgtgtcatagttcatttagccactcccctattgatggacatttaggttgtttcagccttttgctattacaaacagtgctgtagtgatcaactgtgtattatacatcccccatgccagacataggtgagtacatctgtaagagaatttcctagaaatgaaattgctgagtcaagggggacatacgttttaaattktgatattaccaattgccctccatacggctgcaccaatttaaattcccagcattgatgggtaagaaggtctgttttaccacaacctcagcaactcagggcgtcatcatgttcatctttgccaatctgatgggggaaaacatgtctcagtgtagttttaatttacatttatgttgttatgaatgaagttgagcaccttttaatatttcttaatattcttttttttttttttttttttttttttgagacagagtttctctctagtcacccaggctggagtgcaatgacgcgatctcagctcactgcaacctccgccttccaggttcaagagattctcctgcctcagcctctggagtagctgggattacaggcgcaagccaccacacccagataattttttgtatttttagtagagacagcgtttcaccatgttggccaggctggtctggaattcctgagctcaggtggtccgcccgcctcaaccttccaaagtgctgggattaaaggcgtgagccaccacgcccagcccttaatattcttaagagtattttctgtgagctctcaattctgttcctctcctttacccatttttctgctgggctgttggtctttgtaataatttgtaggtgacttttatatattaagggaaattaggtcttctgtgtagaattgtttacaaatataaactttttttctttttagagactggatcttactatgtcattaatcatagctcggtgcagccttcaactcctgggctcaagtgatcctcccacctcagcctcccgagtagctaagactacaagtgtgtaccaccatgcctgggctattttttaaaatttttagagacggggtcttactatgttgcccagactggcttagaattactgggctcgagtgatcctcccacctcggcctcccaaagcactggggtgacaggcatgagccactgagcctggccacatattgactcgttgacttgctcttgccttatcaacttcattttgacctgcactgatgggtaagacctgccaactcatcttgatgtttctacttggtctaaatttccaggcttcagttcagcttttacctcgagagatgtttctttccctggcccaccacccacatcccatgagagggacgtagggccagttcaggaagcagagccaagagtgagcccagcctggctggatgagaacctgttcctcagcttccccacctgaaatggtttgggtcagcctgagtcagttctgagactcacctgagagctggctggccatccttcgaagggtgacaggtgaaggccttggggcggggcccacctgctccagcccgtccatcaggccctgctgttcggctgatgccaggcccagcgggttgttaatggtgaaggtgctggcataccgctccagagggtcatctagggaggccacgatgccctcctcccacagacggtacagcatgaggacaggaaagatcttggagatgctggagatcctagataatgttgggaatacaagcagtcaaagggcatcctgttggccccacaacccacctcctgcccccatcctgcaactttttagtgttctagaaaagcactgcatccctgcttaagtcaacatctccaacagaaattaaccagcctctgtggagctgcctttgggatgcttgagaacgtaaccagaagccgaggggctgaggtgggatggatatcctgggccaggctcttttccagccatttcccattcagggacagacctgrgtttggatggtgtctctgcctctcactggccatgtggccttaggcaagtttctagacccatctaagattcagtttcattgtctgcttcaccggttgtattaataaaagaatggaacgaggttgtgcatgcaaagtgcctgtctacgttcctaggaggtggtaagtgctcagtacatgytagcacatataactgttggccccatgcctggcacaaagcaggtgcaatttaaatgcaattccctcaggactcctgtaaaacccacagtgtccccaggaacaaatgtgttcactctgcatcatgaactttgaggatcctgcaggcagcatgcagaaggggagactccagatatgcaacagaatgtccccatctgtttgcatctgggccactgctgccacttgacagggacctggggcaaggacctaggaactggttatggttcctttgtggcacatggtcagggttggggggatgggcacaaggtagccttttctagtttgggaggtttagggctaaggttctttccagaagggattccttcctgaccytttacccctgtgatgtaacattgggaactcactggacttcagtcctctctggacttcggtctcctcttctataaaactgtcaagacttcataataggccctggcagattagaccccagccatgattctcttcagtatccttacctcctaggtctcccttgccctcccatcccttacccctccacaggaccctagagatcacccagctgacctgtacatggtgtactcattgggggccccagaagccgggtctgagccattcttcttcccaaagttccctgtccagagcacagtatcattgtggatgacaactgcagacatggcagccacgcctggggcagacattgcctggcgcaggatctggtccaccttgagggaaaagaacgggtgcagtgacaggcccccctgccctcaccctcagtaatcatctgcaaagccaccctcgtccatagtcacaccctgcatgcagcaccccagtgagcctcccagctatgccccatgggctggggcccccactgttgggcttctkcataagatgttttctcaaagaaacagtttcttagcaaaataaaaaaggagagggggttaaaacgactgctttaaggctgggcatggtggctcatgcctgtaatcttagcactttgggaagccaaggcgggcagatcacctgaggtcaggagttcraggccagcctggccaacatggtgaaaccctgtctctactaaaaatacaaaaaattagctgggcatggtggcgggcgcctgtaatcccagctacttgggaggctgaggcaggagaatcacttgaacccaggaggcggaggttgcagtgagccaagatctcgccactgtactccagcccaggcagcaagagcgaaactccgtctcaaaaaaaaaaaaaaaaaaaaaaaaaaccagctactgctttagtcaaacccatgtctgacgccctaaaaaacctccaataggcctagcctraacccctagtgttggggaattcactattaatacagtgcctgtaggccctctttgcacgtttgtttggttatttatttattttatttgtttttagatgaagtctcaccatgtcacccaggctagagtgcagtggctcaagcacagctcactgcagcctcaaccttycaggctcaagtgatcctcccgcctcaacctgtggagtagctagaagtacaggcacatgctaccacacccagttaattttttaattttttgtagagacggcgtctcaccgtgtagaccagggtggtctccaactcctgacctcaagcagtcttcccacctcagcctcccaacatgctgtgattacaggtgtgagccgcctcacctagcctgaacatttattgaaaatacctcatcattttcaatgatgaagtgcaatgatgacgataacagctgacatttattggacatttagaatgtgccaggcatggcataaagtgattttcatacattgtctcctttcatcctcgtgagtcagtgctaatttctgcccattttacagatgagaaatgagagcctatgagatatgaggtgacttgcccaagtggctactggctgatggaatcaagattggaaccctgtgctaagtccagccccacttctttttttgttgttttggttttttgttttttgagaccagagtctcgctctgtcacccaggctggagtttagtgacatcatttccactcaccgtaaactccacctcccgggttcaagcgattctcctgcctcagccccccgagtagctgggattacagtcatrtgccaccacgtgtggctaatttttgtatttttagtagagacagggtttcaccatattgaccaggctggtcttgaactcctgacctcaggtgatccggctgcctcagcctcccaaagtgctgggattataggcacgagccaccgcacctggcccctacgtcttaattaactgctggaccaccttgccacgtgattttacatatccttggctgagctcggtccacctccacttcccatccctgcactaactttgcctttcttttcctcgctttgtcaccctggctggagtgcagtggcacgatctcggctcactgcaacctccgcctcctgggttcaagcgattcttctgcctcagcctcctgaggagctgggattacaggcatatgccaccatgcccggctgatgttttatatttttagtagagacaggctttcaccatgttggtcaggctgctcttgaactcctgacctcatgatccacccatctcggcctcccaaagtgctggggttacaggtgtgagccaccgcgcctggctctaactttgcctttctgagcctctgtctccttctctatagakagggactcatgaggaatgcatgtaagtggttacatggcaatggcgcattccaggtgctcaacagaaggcagcatggttattattgttgcttttatgaaaatttgctataactcctgaaagccacatagcacccttctgctctctccccttcacaaaaacctttcaggtatttgcaagcagtgatttttgtctctgcattggcccacacgttcccttctcagcactcaacagccctttccctttaactattcctcggatgatagttttgagtctcccccaccatgctgcggctcatattcttctgatcatgtttcactcatctccatgtctcccatsgtgggtgacccaagtggctgggctctgactggcacagactagagctgactgacacctgcctctagggtttggccatcctgcaatggtaaattttgtgttggggagcatggagtgtttaatcatatcgcggtggcctctgcaatgtgggctctgtcatcctctcctgtctcagcttccctacttcccacctatggcctctcagttctctgtatgtgtcatatactttctgcagcctccaggcccttccacgtgctgttccatctgtctggagcacacctctccatccccagggtccctcaccacacacatgtcatctgggtgtctgctacttattcacatctcagcctagacaccacttcctycagaaggaggaactgaccctaaggcctgttcctttgtgcccccaaagtcccctaaacttttcttaccctcactcttgccccaggattataaatgtttggtatcttcaccgttcctctcrcttccagattagtaatttcttgagagcaggtcagtgtcttcttcctgccatatccatagtgcctcgcacagagtagatgctcaagaaatacatgttggacggatgaatgaatgaatgccactgccagcacagagggactgccctccccttcatcacccaggcccagcccatatgcccagtttcctcctgggtcatcactgaccttttccagggcctccttcaacacggggagtgggtgagccaggggcacgggctcagggtgccggggacacatcctcacaggggcagaggtctcctctggtcccagggaacctggagggaacatcacatggtgaggaggggacagagatcaggataggaatctagggggaaagtggcagcaaaggccagagcagtgcctcaaggacagccctccccagccgagccgagccgggggatatcagggtccagagaccagccctagcccctgaggggcctagggagcaaagtgtgcccttggggaggaggcacagccctgcaggccacagctcctggttggtggtcactgtactcccctctctcttgcttaaccagcttcccatctcctgtggtcagtggacttagaccattctggctgcgtggggcaggctcagccacatctgtctgtctgacctgctgtcgtcctgattatgtgtttgggtkgacttcgagccccacttaggacccaggcctaaaccacagcgacaactcattctctcaccagagctgagcatcagggctttgggggcctgagtctgttctgcctttgtccgggtgtgtggcttcctcggcacctcaggcgagaaggtgaagtgctggcaggacaggattcaggctgtgatatcatcacagcagcacccaagcctcttcctctaaggctggagtggggtgtgaagggggatgagcatcctccaggactattaatacatcctcctcgtcttccactgtgccctgagactccaccccaaaactgagacaaggtccctgcggtaggtttcatatgaccataaattcttgagacagagtctcaccctgttgcccaggctggagtacaatggtgcgatctcagctcactgcgatctcagctcacttcaacctctgcctcccgggttcaagcgattctcctgcctcagcctcccgagtagctgggactacaggcgtccaccaccacgcccggctcatttttgtatttttagtaaagccaaggtttcactatgttggtcaggctagtcttgaactcctgacctcaggtgatccacctgcctcggcctcccaaagtgctgagattacaggcatgagccaccgtgctcagccataagaccataaattctgtcagctccttccacctkcgaagctgrctggcttygtgacttgctttggccaaaagaatgaggcggaacaaattgcgacctttctaggctaaaccttaaggggcttactccctgcgaacactgccaccttgtggacaggtctgggatagcggtcttgagagcaggagtccacgctgagggagacaccgcccccctcaacccgacccccaagccgacttgcccagtgcaccagagagagcccaagctagaccagcagcagagctgccagccagcccacagaatcatgggaaataatcacttgctttgtctgaagccagtaggctttggggtggtttgttacttagcaatagataactgacgcagacccaaacaggaaaattacaaaccttagggaggatttctcaacaaccccatgacatgggtttcacagaatagggtggtcccagctagagcctaggctttgctcagcctgggacccaggtaggggctagtgtccacagtggtgctcctcctgctttaattggcaaacaaagggcctggtagttatcactgtcagtggtggctcctttattgggccttgacccgttcaggaaggagaggctccaaggcttggcagctgctgcccctgaacacctgtgagttgttcctattgaggtcttagatacagctgcaggaaggtcttgaaagggggctggagcctggagattccatcatggtggccaaaggcagaggaagggaaacaccgtttgctcttcctttggtgtccttgaattttacccccaaactgggtgtcttgaagaaaccccagtggcatcaggatcctcattttatacacgaggacatcgaggcacagagaggcaacaagactgtcccaaagatgcacagctagtgagagctggactcagaatggagtccagagcttctgagtctaaatcttatggtcctcccctacacactagaatcaggggtggcagctcaaagcccaggaggacccagggggctatggggaggaactcaaggctgtctctgcactcaccggtcttcagcttggggaggtgatactgccacaggaagcagccagtcatgaccactgagagcaggcagaagaagctgcagatggccgggaggagccacttcttcttcactttcagcaagttgggccaccagccatcctgggagagcaaggacataaggtacagtccccttgggggtcagtcagagggaagagagggaccctaaccctggcccctcctaggcctcaagttagccagacatcacaagagcccacagctttggataaatttcacagttgtgaaaccaatgcccttcccagtgtgactctttcaatagttctgccctccaagagcacccacccctttgcttgctgtaccttgttcccctatggacttagtgaaatatcgtaagaccagctgaaatgccacctcctccaggaagctttcctcaactctcctgtattagtctgttctcacgctgctaataaaggcatacccaagactgagtaatttataaaggaaagaggtttagttgactcacagttcaacatggttggggaggcctcagaaaacttgcaagtatggcacatatttcattcttctacttatataaaatgtctagatagacaacccatagagacagaaagtacattacaggttgccaggggatgggggtagcaaggaatgaagagtcactgctaatggctatgagtttttgtgggggtgatgaaaatgttctaaaattgattatggtgctaatggcacaatcttgtaaatatgctataaccactgaattgtacacttaacaatggtgaattttatgtcatatgaattatatctcaatacaattccttgaaaataatagtacctacttgtattcagttgcaaggattaaatgagttaataaattagaacagtagctggcacacggtaacactacatatgtgttagctattattgattgcctcctatgtgctaggcactgagccagatattgaggatatactgatgaacagaaagggactctttcctgccttttggaggtttacagttttacgaggagatgggtgttaaccaaatacattgcattaactcctccttgcctacctccctttctcaaaggcacatcttccacttctgtcctacaaacgtggtatttctcccccttccctcctctgtcctcagtacacacgcaatccctcagtggtgagttaccaaatgagaaatgaaaggagacatcactacagatcttacagagaaatattatgaacaactttgtaccaatccatttgacagtttaaatgtggacaaattccctgaaagacacaatccccaggtgatctcatgcacaaggacaccagccacatgctcatggtttccgattctcttctgcccagctctctcccctctacttcagactcccatttcaactgccttccgagcatttccacctggaagtcctcaagcacctggaactcaacatccaaaacagaaaactcacttgtttcaccccctcctccttctctcttattttcaacatcacctcatggcacctgcctccacttagtcatgcttcagggtctgcctgggcccctctatctccttcaatccctacctccagccagtcatcaagccctcctggcctgttacaattagaaaatatttcaagcttactgaaaaaaatacactgggcccagtggctcactcctattatcctagcactttgggaggccaagatgggaggatcacttgagcccaggagtttgaggccagcctgggcaacatagtaagaccctttctctacaaaaaaattaaacattggctgggtgaagtggctcacacctgtaatcctagcactttgagaggccaaggcgggtggatcacttgagcccaggagttcaaaaccagcctgggcaacatggcaaatcttcgcctctacaaaaaatacaaaaattagccaggtatagtggtgtgtgcctgtaatcccagctactcaagaggctgaggtgggaaaatcacttgagcctgggaggtggaggttgctgtgagccaagatcacaccactgcactccagcctagatgacagagtgagaccctgtctcaaaataaataaatataaaaataaaaattagccaggtgtggtggtatatacctgtggtcccagctactcgggagtctgaggtgggaggattgcttgaacctgggaggtcgtygaggctgcagtgagccatgattgcaccactacatgccagcctggatgacagagcaagaccctgtttctctctctctctccatatatatacacacacacacacacacatacatagatatacacacacatatacacatatatataatggtgccatacatatatatatagagagagagagagagagacagacagacagacttataatgtaatgaatccttgggcactcaacactcgactttgttgaatctcaacattttatcatattttctcatatatttacatttttcaaatatgctatgtccttgcttatttactttgtctgttcagtttccccatcccataaggattgttgtttgttttgtttactgaggtattcccagtacccaaagcagttcctggaacatagcagaccctaataaatatttgttaaatgcctgactggatgaaaataaaacatcctaggtggagttgaagtcctctgtgtacctttcatggatctcagtcccttcctgctctccccaaatgtaacacccatgcttgatcttggtgtttatcataattatgcacgtgtttattcttttactatgtgtttatgtttccataaacagcatgtagtattgttttttttgaacgtaaataaatgatttcatactgtataatcctcctgcaacttgctttttattcagttagctaactacagttctgggttattcattttgacttctgtggagtgtgttgttgtataaacatactgggtagtgtagtagttagagcccggggccagactaccttaaaaacgtgactatttcacagtccagttgggaatcctgtgctagaagtgaaatttctgggtagcaaggtacagccgtcttcaacttagccacatactattctgttcctctctaaagttgtcattccaatttatgctcgtcccacctttgattctcattgctattaatatttctaatctgcatcttcttggtgactaataatgttgaataccttttcatgtatttattgtatgtatttgggtttgattttctgcagttggactgttctcccttgcctggtctttttctattctcttttctttacttattagagttcttcatatactcttgtttgtggcttgattttcactctgtgttgataacttttgtggagagacagaatagtgtagtggtgaatccatggccagattgcctgatttgcaatcttagctcagccacttaccactgcgtgaccttaagaaaatcacttaacctccctgtgcttctgtttcctcacctgtaaaatggggacgataatagtgcctaactcataaatttgtaaggattagatgagttgatgtataaaaataacattgtctgacacattgtaagccctgttagctattacggtatttggggattgttttgagacagtctcactctgtcacccaggctggagcgcagtgatgtgatcagtttttgcattttttgtagagacagggtctcactatgttgctcaggctggtctcaaactcctgggctcaagcaatcctcccaccttgacttctgaaagtgctgggattacaggcatgaatcactgtgcctggccaactattacagtatttttgaataggagggcttttggttttgattttggttgttgccaaatttatcagtattgtctttttggtttgcattgtgtatatggtgcgtgtgtgtgcttaagaaatctttcttttcacagaggtcagaaatagaggtttttgtacttttacacacaaaagaatttttggttatagaataaagtagggatccaattttatttttccatttggataatcaatagtccagcactatttattaaatacaccaacctgtcccccactgactcatatgccaactctgaagtatatcaacagtctgtacatactgacatctgccttctgggctctgttccaggagagtcttgctgagtttatgttccatccctccctgtccaaccctgcactctcttccacaacaaagatctctcacatgttgagcacagtgtgccagacgctgttctacaggaaacaatctggcaagagagactttctatgatccgactccagcgaactccgccagcccattccctgcccctcccctgccccctgtgtctttatgcccccacctcccgcatcattgcccctctctgtacttttgcacctgccattccttggggctgtggtttccttttatccttttccatcagaaaaactgtgttcttcccttaacacccataggcatctgtgaagccttctcattcttccccaggcagagccgctcatggtaactggctactactggcttctttgtctgggtccctacaaggtaaggattctctccagcaccagcagagaattccctcctggctcttatgccttggacacctagtaccccacctggcactagcaggttctcaggaaattcttttgaactttacatggttctgcaagttgaaagacttgggttcaaatcttaactccactcctgagtcagttgtaactctggacaagtctcttcccctctctgagcctctacttctccaggtgttgaagagggttggctacttgtaaagagtttacttttacatctggaaatcttgtgtgatttcaaaagtgtctttcagctgtagaatctagggttctcactgaaatcatctttggtcataatattcaaagactggaaacaacccaaatgctcctcaattggtgagtaaatagacaaactatagtacgtctgtacaagggaatactactcagcaatgtaaaggaacgagctactgatacatgcaataatgtggatgaacctcaaagcatgatgctaagtgaaataagccagactaaatggttacagactatagaatacaactcatagaacattctggaaaaagcaaaatgataggaacagaaaacaactcaatggttgtctggaggtagggatgaggtagactacaaaagagcagaagggactttggggaggtcatggaac

SEQ ID NO: 94127 - DNA, 25598 bp, Homo sapiens
ctcaagattgcagaggcaaacctgtgcaaagcttctgccaactcaaggcattcactgaatgccccacacatgttaccacggcaaaactggaagagcctatcaacagtgttcttggacacaaacaaattaaaggcaagattcttgctgagagaattaatgtgtttattgagcatattaagcagtctaagggccaagataacttcctgaagcatgtaaaggaaaaggatcagaaaaagaaggaagcaaaagagaaaagtacctgaagtgccagccttctccactttgtgaagctcactttgtgagaaccaatggaaagaagcctaagttgcttggaacctattccctacgaattcatagcataatagccgttaaaaaaaaaaaaagggggggagccccctaaattgaatagacttcaggccctacaatatccagatctacttctgatgatgttttatttcataagctgggcagtaagtcatgctgagtattctttaaatgattctctatattatttggtttactccaaacagaaaatagcaaaacattttgtctaagaggcatttctttatctgtccttgtcctgatgttggatgcctatgacttcaccgattgctgtaagcccttgagttggcagaagctttgcacagctttgccccctgccatcctgagcacctcaccacagtgcaggcgtaaggcctgggcttattggccctcttttatttaaaaaaatttcccaacatttaattgcaaaaatcccttagcttcatttctactttactctatttcagtccccaatgccaagttcgttctttttgtaagtatcttctgaaggagtgactcaccatttacttctattggaatccaaattttgcaatactcacgaagttgcaaataattaaattaggatatcttagaatctcataaccagggagagattactgtaaactcaaccatattcaccactatttattgcatgtctgcttcatgcaaaccttggttccatgtgctgggggaacacaaatgtagagcttatttctgtccctgagctgatgagataagaagttgcctagaggccgggggcagtggcttacgcctgtaatcccagcactttgggaggccgaggcgggcggatcacgaggtcaagagatagagaccatcctggctaacatggtgaaaccccgtctctactaaaaatacaaaaaaaattagccgggggtggtagccggtgcctgtagtcccagctactctggagactgaggcaggagaatggcgtgaacctgggaggcggagcttgcagtgggccgagatcacgccactgcactccagcctggacgacagagtgagactccgtctcaaaaaaaaaaaaaagaaaagaaaaaagaaattgcctaactaagttataagtcaaaccgctgtgactgctgtacagaaaaggcaaatatagtgtatgggagcaagagaagtgaatgattgattaggataggtgaaagctgcagagaggagatatatttaagttggaccttaaacacaataaaagatttcttcagctgaaaaaaaattccatttatgttagaaagtttttaaaaaagtgaatatggcaatttataaaaaattttcattttgaaatgttacgcttcttgattttccatgacagaaagtgtgtgtacacacgtgtttgtgtgtatgtctgcatgtgtacttccattgcattttaatctgaacattttcaaacatttgtaatagtttaaagaattttacaggctgagtgtggtggctcacacttgtaatctcagcactttgggaggccaaggccagcatacgacttgaggccaggaattcgagaccagcctggttaacatggtgaaaccccatctctactgaaaatacaaaaattagccagatgtggtggcaggcacctgtgggtccagctattcaggaggctgaggcaggagaattgcttgggcccgggaggtggagtttgcagtgagccgctatcacaccactgcactccagcctgagtgacagagtgagtctctgtcaaaaaaaaaaaaaaaagaattttaaaataaatatccatatatccataacctagattctacattaacattttactataccagttttatcacatatataaaacaaatatagtgaaatgcctgttttacttccttctatcaatctactttattttattaacatacttcaaactaaattacagacatcggtacccttcccctttaaaaacttcagcatgtatatatatcattcattaactagagttcaatatttatttagttttttttcctttggatgtaaaatttgtatacagtgaaaggcacaagtcttaagtatatatttgctgttttgacaaaggcatagactcatgtaacccaaagtcctgttgagagatagaacatttccatcacctcagaaagccactcagtggaggtgtgtttttgaagtatatgtgtacacagatcccagccattgtagactaatggagtgattagaggtaaacagaattaagctgggagaaggtaaagtttctaaggacagaaggattagtagatggccagcatcctaggccctgagaggatattaataacttgctgtggacagtaagcaggttagcttggctacagctgagtgaaaggcatgggatactaagtaaaacattactgtcctctaatccttttcaatactacatacaccagggttatcctttaggcctacattctggagggcagtggttcccaaacgggggtgattttgccccatagtgaacagctggcaatgccaggagacatttttggttgtcacaaggggatagtagtgctccaggcatctcagtgggtagaggccagggatgctggtaaaaatcctcctttactcggaacagccactcacaggaaagaattataaggctcaaaatgtcaataggctgggcgtggtggctcacacctataatcccagcactttgagagaccaaggtggaaggatcacacgagcctaggaattcacgaccagcatgggcaacacagtgagaccctgtctctatttttttttaaatgtcaatagtgcctgctgtgagttaagagtaagggttgctgatcccttgaaaaatcaacggaagttacatactagcagcaaaaattctttttctttgagaaagacagtgtgtttattttagcttttaaaatcaagaaaaaggaacaacaagtcattattattggttaaaacaaatacaaaaaaatgtgcttccattttggtttgctgtttggggtcagggcatgggaagaggcagcaagttcctcatggctggaaaaggaaataactgtggtgctgtacgggctccttagggaagttgggcagggcttgcagtagaaagatggaatctgtcatctcccacctgtctcatctggcttccaaaatatgtgatttgaagaatagggaagaggagaaggaggaagggaggaagagaaagagaagtttacagttttccctctcactctattttgtaagaggctccattcttagtagggtatccaggacagggataaccaggagaccagtacagtatgagctgctagatgatttatgaccaaaggtcaaatcagcaagcagcttcccagctctgcttcatagcatgtgatctccacacatccctgcctcagtgttagccctgggaggatggctgatccgggaacctgacctgtgattgattcactcacggtgaggctagaagaggatccttctcaaaggtgttgcaagtgatgagtgctctgtcatcactgaacttcaggcctattcctacactggttcctctggtgttttcatctctttctctctgtgacttatgcctatatctgtcccagattgaaaatccctaaagagcaggtatcctattggtccctggcttttttgatgttgattacaatgatgaagtgggtgatgattatggctttgcttatgtgccaaagcatgtttaagaatgtctcgataccagtttgagaaatagctttatttgtgatactgcaatgattaatttaacaaagataaacatgtaagttgttgcaaaatgatacggttttcaacagaaattaaggccattggggcagagataaattgataaaagtttattggaagccaaatgtgagaatttatccagtaagatacaccaacaaagttgggcatgttccaacatctgttacaagttggaatgcttttataagactgtttaggagaaggaagggggactcctcatatcggagttatccttttccattggagggtacaatacagaggttacaatcattgcctatggatgacagcgtacaggctaaaatgttttatgcacaagacaatcagtaaaaacaaatcagcagagctttatgatttagaaagaaaacaatgtccctttcaatgtcagtattaatcagtaacctgacaattaataaatacatagtttgaggaactcgcaatagaatttgagtgcctcacgataagattctttactcagagacaggatgcaagccatcagtcttaagaccttttccaagcagttcatttggaagcctgtgaaatgtgtcctgcaggttatcagggtctttttgctgaaaagtttatttattttttcttttcttttttttagagacagggtcttgctctgttgcccaggctggagtgtagtggcatgatcatggctcaatgcagcctcaacctcctgggctcaagtgatcctcctgcctcagcctcccaagtagctgggaccacaggtgtgtgccaccaggccagctaatttttagttttcctttttgtagagacggggtctcactatgttgcccaggttggtcttgaacttctggtctcacgtgatcctcctgcctcggtttcccaaagtgcaggaattacagatgtaagccacagtgcccaaccaaaatttaatgtttatttacttaagttttttatttattctgtttcttaattatttattctttttttacagctgtatactatctattatgtggctttactattgatggacatttaggaggtttccaaacttctgctataatatacaatgctataatggtaaccttataaatacatggaagtcgaatgtttaggtgaatgagtgcatgcacagctttactagacattacaacacttctctctatggaggctttaacaatggactctcccacgagcaatgcatcagcattatttcttcacatgcttgccagtggatcatactacaatctttttgacctttggcaatctgataagtgaaaagtggctcccagtataattttaatttgcatctctcatatgagtgagggtgaagagccacttgtatttccttttttgtaaactgctatttcaattgggttgttattccttttcttactgatttgtaagagttctttatctactaaatcaattagtctcttgtcttcaaagcctgttatgaatatttccccccagtttctcatttatcttgccttgtgtatgatggtttttgtcatgctcattttttaagttttagttttcagtttcctgtcttactagaaaggtcttaccactctaaaaatgtgtccagtggttcttcttaatacttcagtggtttcatttctcatacttacgtctttgaggtattcgaattttggaaggatcaagtttgctttttcccagctggatacctaggtgccacaatactttgttaattaaatcatctgtcccttccactgatttgaaatggcattttcatcatatctaaatgcccatgtgtatttgggtctatttcttgcctttccattctgttctattgatttgtctgcctattcacctacctgtacttagtagtatggtttagcattttggtacaacttatcaatgatatgatggtggcctttggattataatatttaacattttattttagcaaagtgtttgtgtattttcataattctagatgccttatggtccttctaatatcttctctccagaggactgtatgctgttcttaaggactctctgcttcctggacaagctcaagctaaggtgagtaccatcttcttaaatgcaaggatcttagatttgagtcaagaagtgtctgctgggaatgatctgatcactccttgytctgttggtcaggtccatgggtttccccaggggcagaaactgtgtcttcctagtatgttgcacaattcctggtgcagagaaacactcagtaaatgtgtgttgaggatgaactgatgaatgaggacatgaacacctgcctgccacagaagtctttcatgcatgggtgttcctggaggctcctctggcttcacaggaagggacagaactgggaaattattcctggggtcctgtcccagctccttgtctattcttctgtccaagagaggaacacagagcgaggaagggcaatgaatcccacttacccttctcccatctcacacacatccagaggcacgatcctagctcacttcaaccttgacctctgagctcaagtgatcctccctactcagcctcccgagtagctaggattacaggcacgcaccaccacacccagataattttttgtagagacagggtctcactaagttgcctaagctcagtcttgaacttctggcctcaagggatccccctaccttgggctctttaccagcattttcttgtatttctcctcatcttcaatagcattcaactgaaacatcacccacgttcatcatctctcccttttctacaccatggccttgagtaaagcaagtgagatagcaagggagatasgaatcagaacagctaaccataacagctgactcttatatactgtttagcatatgccagtttcgttttccaccaatgtaataattgaacacttagaacaagtggggatatatatatatatatatatgtataacacatatatatataaaaccatatattatatatataatcatacccattgtacaagtgagaaaactgagttaacagagaggtttagtaacttgcccagggccgtggagcttttaaatagattcagcgctagagtccatgcacttaaacaccatacctttccttgtaatatgcatgtgcgtgtgttaacttcattgaagtaaaatataaaatgcagaaaagtgcacaagtcgaaagcatacgactcagcagattttcataaagtgagcacacccatgtactagcacccagatgaaagagcagagcactctcagccctccaggagttccagtcatctccctccccagtcactgccccctcctccctaaggttaactgctcttctgacgtctctctccattcttctgggagtttccttcccatcctattttaatccactcrtattttaagcatcatggggtttgtggctaaagttagaaatattctatatattccatcttgcagtagaggtggcagtggttgggagaacacatttcctagagaagagaaacaattgaggatggggggtttagggggtacttgctttagtttccccacattctctttgccagtaaacctaagtaagcttcaaaccttgactccatcccctccccaccaggactacatctcccagcaggctgtgctctgacagctcttggatttaaataggattctgggctctgctcagagtcaggctgctgctcagcacccaggacggagaggagcagagaagcagcagaagcagccaagagctggagccagaccaggaacctgagccagagctggggttgaagctggagcagcagcaaaagcaacagcagctacagaagttggaacgatgctggtcaccttgggactgctcacctccttcttctcgttcctgtatatggtagctccatccatcaggtttgtcttaattcagcaactcaaacaatcgtttacaaagacctgcactggaagccggttctcagctgctgaaagaagagaaagggaaggaggctgacagaggagaaagtcagggcaggaaaagcaggaaggaagggggtgttgtggataccatggtggaaaaccagaaggaagcatctgcrgccgggcagmggtggggctgagttckggccccacctgagctctggggagagttctactgccagcggaaggctgcatggatgactctgtcaagtagctcaacaaacaccttaggtgggagtccttgcgttttcattttattcctttgggtgtctctgaagaactcggagactctgtccctattcagggtggccctgctggcttgtcatgctgttaagtaccaggtagtttgggaaagaaacaaactcttctgcctttgagactaccctcaattaatgttttgggatggcttttttgctgtgggatttctagaggtgtcaaataaatgtgtgttctgagtggagaatttttaaatttctcttttttaatttttgctctgtcaccccagggtggagtgcattggtgtagtcataggtcactgcagccttgaactcttgggctcaagcaaccctcctgcctcagcctcccaagtagttgggaatataggcaggtgccactacacccagctactttttaaattttttgtggagatgggggtctcactatgttgcccaggctggtctcaaactcctgggcttaagcgaccatcccacgttggcctcccaagatgttgggattacaggcatgagccactgggctcagcctaaaaaayttcttatgataaaggaggttaaatggacctaccaaggacagtgttattctaggttctccatagagatctgggttcaagtcccacttctgccaccactatgtgacatgaacctccctgagcctcagttttctctactgtaatgtggaaataatactggagaagttgagaggattaaaataaattacatatggaaagtgcctagactagtaattggcagtcagatgatgtgcaggaaatgttagttctgcccctccgtattctgttttaggacctgtgaagtcaacttcatgtaaaagagtgctctctgcacagaggtctgaacaaaggaggttttctctctgtttgccatcggccagaatgaaatctctaatacaatggctgaaagcctcrgaaatgacccactccctaaaactggagaggcagcctaagatcagtacctgtgtatgccatcccccagagtgctaagagcagtacctgtgtgtgccacccccaacagagtgctgttcatcagttactcatgatgatggttactgaatattgactccgctaatgtttatcatgcatatgtttttgaatgtaggttagaggggaaagctttcctctggaacctctagagataaaagctagatgtatttattatctaacaaggaaagtctccattggccctgactccagcatttactctgtttgctaatatgattatttgtggcttctgggcaagtgatcttcccacctgcaccgataaacaggcgactaccttgccccatggaaaaatgttgtcctatgaaggttagcttttatgagtctcctgactgcaacttaaagatacccttctttgaggctggatagagttgtttttttttttaacgtatcttagtgtgagctcgtgaaggatggtacgtgatgctcttgtttcccttgccgataggaagttctttgctggtggagtgtgtagaacaaatgtgcagcttcctggcaaggtagtggtgatcactggcgccaacacgggcattggcaaggagacggccagagagctcgctagccgaggtaagtgtttcccctttagtctccaaagggccatgcctcccacccttcttcccactggggcctctgtccatattgctttgtgtttcctcctaggcttgggggctctgactagaaattcaaggaacctgggattcaagtccaactgtgacaccaacttacactgtggcctccaataaactgcttctttcctattccctctctattaaataaaataaggaaaacgatgtctgtgtatagccaagtcagttattctaaaaggagatactaagtgacattaaatatcagaatgtaaaacctgggaaccaggttcccagcctgggattaaactgacagcaagaagactgaacagtactactgtgaaaagcccgaagtggcaatatgttcactctaccgttgaaggatggctgggagaatgaatgctctgtcccccagtcccaagctcacttactatacctcctttatagcctaggatatgarcatactgctctttttttgtcttggacccaggagcccgagtctatattgcctgcagagatgtactgaagggggagtctgctgccagtgaaatccgagtggatacaaagaactcccaggtgctggtgcggaaattggacctatccgacaccaaatctatccgagcctttgctgagggctttctggcaggtgaggtcctgatgggtaggtagaaaagcaggaaattgggtatgggagtggctgctccaccctagaccatctatggcccttacatcagaaccatcatccaccccactagacaggttctgccacatgaaccagcaggacagggaattggcaagaggatggtgggtagatagactgggcaggatccttatcatcttttcgcctcagcaatgggaatgtcggaggtgttagctccctgtctgggcttgcaccttggcatcaaggtgtggccacaatgccactctcttctttcatcctgagaatcaaccttgtgtggccataggcatgagatgaagttgtgctgctggcaagttcttctggatcttggaaaatgaccagcttctaccacggactatgaaatccatgagggacatcctgggaccatgtctggcttgtgttaccactggattcctagtgcccagcagagtgcacctggctcagagtcggtagttagtacacatttgctgaataaatgaatgaacaatgtccaggaagatatgagtaactaaaattactcattagaaacccagtgacaatgcttattggatgtcactgagataggtccaaatgaaggatagttattgagtgctgaggcaataccttgttttaaaaggaaggggcagagcaagtgactcctatcaaaatsttaccccaacaaagacaactaatgaacaaagggaaagggcaattatgcaggtctgttacaggcagctaggggactccttgctaaccataggatctctttggttgtgccctatagaggaaaagcagctccatattctgatcaacaatgcgggagtaatgatgtgtccatattccaagacagctgatggctttgaaacccacctgggagtcaaccacctgggtaagtatctttgggtgactaaaaaatgaggtacacccactatcttttctttaggaagatgacactgtgtaaatgtggagaatgtccaggggccttcatagagcctaggaattccaatagactagacccattggcttgttgttcactgtacctctcctgatcagtctaaaaaagtgagatcttcctacccataccattaagaagccccaaatttcaggaaataccagggagaagaatgtcattcttggatggggcagtggcagtacaaggcttgccaggcagggccagacctggggttatgcaggcatctgggcttggctggaggggtcacatctacatgatggccaaccaagccatgggttggtccacggaggtaggcaatccttgagaacttgagtacgaggcagggtggggttcagcgttcaaggcraagactttagggaggagagcatggagcatgttttctgatcctaagcaaatgttatcttccctgactgttctatccttctgcctatacacaagtgtacctgggtccctagttatgcgatcatggccagagtgggagttggaagccagcaggtgggtcaagggcagaggtacaaagtaatataattaagtatrattgccttacttgtagtctagctctggctcttgctttgaggaatccacaaactcagaccaaactgaccattagagttactcatggcatcaaaattggttcacacccagaagatagtgagctaacactgaagtcctcttggctcccacatgctgagcctgggctgtcattccactttcaatcttccctgctggctctcctcacaggccacttcctcctcacctacctgctcctggagcrgctaaaggtgtctgcccctgcacgggtggttaatgtgtcctcggtggctcaccacattggcaagattcccttccacgacctccagagcgagaagcgctacagcaggggttttgcctattgccacagcaagctggccaatgtgctttttactcgtgagctggccaagaggctccaaggtaagtctggagaaagaggaatagcaaaaatggtcctcagaccaaattagaggtccacagcaacttgggaagtcaggctgtcaaacatgcacgtgtcagtaatatctctgtggactaaggagaatgaaattatgaatggaataaaaacagagtgcttgcccccagggagcttaaaatcaaataggggttaagaacctcaaaaagttaccttgtatttgtgtcacatcttatctcttatctcatttgattttcacagtagctttttgcaacagacagaggctttttkttttttttgtttttttttttttgagacttgagtttcgctcttgtcgcccaggctggagtgcagtagtgcgatcttggctcactgcgacctctgcctcctgggttcaagtgattctcctgcatcagcctcttgagtagttgggattacaagcacgcaatatcacgcctggctaattttgtatttttagaagagacgagctttcaccatgttgtccaggttggtctcaaactcctgacctcaggtgatctggcagaagaggcctttggtaacaggtattattactcctagtttatagagcagagctgaggtccaaggaaatggccagctaaagagtatatggcaggtgagggcrtcagaaccggaatgtgggtgctcagctttaaacctagggtgcttccttctgggtgccatttgctgaggtccacatggtgatctgagctacagagctgccactgcctggactcagggagttagggctggatttcagacccctgggtccaagttcttgctctaccacatgctagccgcatgtggatgtggatgtggatgtgcccctttaacctcccctgacttcatcttctcagctgtaaaatcaggtcaggctggttcttattccttaatgattctgtgctctcctggagcactgggtgagctgctggctctgacatctgcggatctaggggtccatttgttacagtgaataagccagagtttgggaacaatgatcttcacttccagaatgcctacagtagaagaagacggtaatcataaaaataaacaataactattacaataataattgagaggtttatgtgtgccatgtactacacatcttaactcatttaatacttgcaacattcctgtgaggtgggtgctattattttcccccactctaaatatgaaaagacaggcactgacagattaagaaatttgcccaaggaaggttcctagctgagccaggattcaaatgcagacagtccattccatgtttttaactttacatcagagttcagaccttggccctgcaccctgccaggtataaccttaggcaatttacttaaactttctgtgacttagttttctttgttgtaaatgggtatcataacataatattctattttacaagcctctttaagaattaaatgaaataatacatttaaagcatgttgtatggccctggcacataattggtactgaaaaatagtgacggcaccagggatatcttgtggggggggggtgttaatcccccacaatctgcatcaccatccctcaatctatacctcatgaaatgtgcttgccaggcaaatgcagctcaaaataaagtcctacccaccaccttccaatcagatcgctacccctaaactcctcctttagaaatgataaagataccactgtcaatgattgatactactcactacatgttgtcatgtttattagtagtactaaagccacagtataaaaacgacattgaaatagaaggacctcgaaccaggcactccttttggaacatagaaggctgagaaggctatagatctttctgaaagatcaattcattcctgttcaaattccgcctggccaggagtggtacctgctgaatcctggggttatgtttcctgagtccctccttctcacttgtgtattttgctgcaggagataagctgttttcctgggctcagagtgtgtccctgatctaattgtgccctctttgtcccaggcaccggggtcaccacctacgcagtgcacccaggcgtcgtccgctctgagctggtccggcactcctccctgctctgcctgctctggcggctcttctccccctttgtcaagacggcacgggagggggcgcagaccagcctgcactgcgccctggctgagggcctggagcccctgagtggcaagtacttcaggtgtgtgaaggcaatgcggttctctccaccacctgtgtgcatgggaggtgccggactcgctgggctgttcatcctgagaagctgagtttgtgcctgatgatgcaatccaggtttgggttgggcctgcaaacagaatgccgttgctttgttaaggaaacttacagtacaaacttatgtgttgggaagagttgcttttctggctttattttatactcgtgtgccgcttttccatgaaaactttgcagctttctgaaagcttttaaagaagactgtcgctgttggttatgccatggagatctggatcgtttttctccttctttaagcttttggctcacttgattcatgaatttttaaataccaattagcacaaagtgctaggggaacgtcctctctcttcggtgtgaactctgtccctcaatgctgccaagattggcactatctgttgaaatatagaagtagaaattttagtgctgaatcttatcatgaactcaatgagcaactagagtctgggagtaaagggaagcccagggtgaaatctytttcccattccatgacagaatccagccctgtctgctctgttgtcccgctttgttcaaggcttttcatcagtgcagtatttattcygtgaagcactggaaatagtcttagtgtctgatgagaggggaatggataagtgataatagctaatgttgcttgagtttttataatgtgtttggtactcagttctgagtgtgtaatgtgtattaattcatataatcatcacaaccctgcgaggcaggtaatattaccccaagttttcacatgaaactgaggcgcaagataattaagaaacttgctcaaagtcatatagcttataagtggtagatctgggatttacgccctggcaatctggctctagagctgtgccattcagtatggtagccactagccacatgttgctattgagcacttgaaatatggctagtccagattgagatgcactgtaagtgtacagtgcataccagatttttgaagacatacaggttgagcatcacaaatctgaaaattcggagtccggaatatttcagtaagcatttcctttgagttgcatgttgctgctaaaaatgttttggatttcagagtatttcgggttttagatttttggggtttgagatgctcagctggtaagtacaatgcaaatatttcataattcaaataaatgtaaaatcctaaatacttctgatcccaagcatttttttttgagatggattttcactcttgtcactcaggctggagggcaatggcatgatcttggctcactgcaacttcagcctcctgggttcaagcgattctcctgactcagcctcctgagtagctgggattacaggtgcccgccaccacacctgactagtttttgtatttttagtcgagatgggctttcaccatgttggccaggctggtcttgaactcctgacgtcagttgatccacctgccttggcctcctaaagtgctgggattacaggcgtgagccaccgcgcccagccccaagcatttctgataagggatgctcaacctatagtataaaaaaagaagtgtaagttatctcattttatatttttaaatgagataaaagatatctcattttttatattgattgcatgctaaaatgattttgctatttgtgggttaaataaagtacatatttattaactcaataaatgaatgtgtaattaaatgttactaaataaatttcaccaatttctttttacattttaaatgtagctgctagaaaattcaaaatgacatatgtggctcacaattgtgtttctcatcatatttctttctttcttttttttttttttttttttttttggagacatagtctcactctgttgcccaggctggagtgcaatggcatgatcttggctcactgcaacctccacctcctgggttcaagggatcctcctgcctcagcctcccgagtagctgggattacaggtgcatgccacgacgcccagctagtttttgtatttctagtagagatggagttttgccatgttgaccaggctggtcttgaactcctgacctcaagtgatccgcccacctcagcctcccaaagtgctgggattgcaggcgtgagccactgcgcctggtcttcccatcatatttctattggacagttgctactctagagtctgagtgtttaacattgctgccttaaatatgtaataaaatatacagtcattaaatatcatattttaatataatatgtaattaatataaaaatgttagtgatataatgttgtaaggaaaaaactggaatacaaaactatatgattttttatacatagagaacagtctggagggataaccagccactgggcagtagtggttacttccagggagttttagggagagccaagcagagtgtgaaggatgatttttatctttttattctaggtgtttttttattatttaaaaattttgccaggtgcagtggctcatgcatgtaatcccagcactttgggaggctgaggtgggtggatcacttgaggtcaggagttgagaccagcctggccaacgtggtgtaaccccatctctactaaaaatacaaaaaattagctgatcatgttggtgggtgcctgtaatcccagccactcaggaggctgaggcaggagaatcacttgaacctgggaggcggaggctgcagtaagccgagatcactccactgcactccagcctgggcgacagaatgagactctgtctcaaaaaaaaaaaaaaaaaaaaaatttaaggctgggtgtggcggctcatgcctgtagtcccagtactttgggaggccaaggcaggaggattgcttgagctcgggaattccataccagcctggacaacaaagtgagacccccatctctactaaaaatcaaaaaattagcccagcattgtggtgcatgcctgtagtcccagctactcgggaggctaaggtgggaggatggcttcagcctgggaggtcaaggctgcatgatagtgccactgcactccagcctgggtgatgaagtgagaccctatctcaaaaaaaaaaaaaaaatcctcctcaaactagatacagtatgatcccggttttatgtaagagagaaagagagagagagactatatctctatttatatccaaacaaagcaaaaaaaaaaaaaagactgtacagaaagcaactaaatgatagacttttcttttttttgagacggagtttcggtcttgtcgcccaggctggatttcagtggcgtgatctccactcactgcaacctctgcctcctgggttcaagccattctcctgcatcagcctcccaagtagctgggattacgggtgcccaccaccacacccggctaattgttttttgtatttttagtagaggcagggtttcgccttgttggccaggctgctcttgaactcctgacctcaggtgatccacccacctcagcctcccaaagtcctgggattacaggtgtgagccaccgtgcccagccgtgataggcttttcttcttttatcagcactscatgttccgaatgttttacaggacttttataattagaaaaaaggaacattaaaaacaaaaaacatggggggagcggggagggatagcattaggagatatacctaatgctaaatgacgagttcatgggtgcagcacaccaacatggcacatgtatacatatgtaacaaacctgcacgttgtgcacatgtaccctaaaacttaaagtataataataataaaattaaaaaaaacaaaaaaaaacatgatgagaactgtgttctgctcccaccccctatccctctagtcctcagggcccctgctcattccaaagcaaatctggagggcttggtctggggttcatggtatgcaagtgcatctgtccccagaattcaagaggcctgtgaacttggatgggaaaataacttcatctttaatttaacctccaactgagatttggcattttcttcaattacgaatgtaggcactgaactgtagtagtagtagtgatacctgtgactttgtcaccaatagaattataaatatttttatatcacattgcagttgttgcagatatcctagaatgtcacttctgctcsccactactttgaaatcctttgattattagacctggtactagatcttgttatagaatatattaataaataagcctgtgtattactatatcacaaatttgtttttaaaatatttttggagtgcattttgtataattagtttctttgagtctggcatatattgtattttattcatttagaaamattctgagaaagggaccataaagatttccagactgctaattctcattcctggaatttactgtctttctctgccctccagtgactgcaagaggacctgggkgtctccaagggcccgaaataacaaaacagctgagcgcctatggaatgtcagctgtgagcttctaggaatccggtgggagtagctggtggaagagctgcagctttatcaggcccaatccatgccataatgaacagggaccaaggagaaggccaaccctaaaggattgtcctcttggccagctggtgctgcgaatcctgcctgctctgatcctcttgacccttctgggaatgtttgcacacctgacactcttgtgagactggcttatggcatgagttgtggacacctatagagtgttcttctctaagacctggaaagtcagcaaccctctgggggcagcaggactgggcagatcccaggctgggcatgggggtggcagaagagcccgagaaattgggtcagttccctcatcagcaccagaggctcagctgaggcaagaagagcaccatcactgcctatttctaggggctatacactccaactcttggttgatctctttctttttaaaaatatttgccaccaccctggagtctagaccaacacacaaagatcctggctaaccctggcctatttagattccttcctctcacctggaccttcccatttcaatcatgcagatggtttctttttgtaaagagttccgtttgcctttcaatttttagagaaaataaagactgcattcatctcattgtcttatttattttctcagggcagcaagggagagaaatggaacaaatcaggaaaccagcctgctagtttagtgagtagcatttcaccctacccagccacgggaattgggaatagcaagggagcaggcctaggcctagaactcagggcaaagacagcagctggaatgtaagatcctcagagtgtgtagctgctgggaggaatccatctgagttaggcagacagagaaaaagcagtttcagtgagaatctggcacccaaaaggaaaggattttactcccccatggcctaactgccttaggaaatttgagtgctgacggagacactcttccccttgagttttaggaaaggggtgctattctctgcgttatccccatctccttccttcctgaaggaggctccacttgcagaatgcatcatttcctgccgccctcagcaaggatcacagcttggccagctcacagtggtacagggctgggagtggatactcctaactgcaatgctgtactgcctctcatttaaagacattttgttaaatatctggctagagaaaatattttaaatctgaaagtttccatcatatcccagattattagatgcacttacaaccaacagcaaatgacaccaaatatcgggaagctgagcagcaaagaatgcaaaagaaaacaatgataggcatgggtgttgattcgacatgttgttggcattttcagaatattaagccacagtcgttccccttgttcagattccagactccatcatttctcgtggtgttcaggtgctcccacgagacacagcctccctcagcactactccttcagaatcgcctcgtgctcaggctacatctcacctctctgtagtgtctcgcccgacaccaaaaggaccatctagtctgctcagcctgggcaaggaacatgtgccagtcttggcctcttgtcatgtttccagaaaagacttgccgcaagttaacatctgagcaagtgaaaggccttggctctgcacaaacaatgccgggggattggtggccgagacaccgttcgaccttcccatcttggctccctgaaatcccctgcaaccttcggggctgtttttccgctattgacttgtgcttggatatggatatggcttcctgccttggcagagtgcccctcaacatacaggaaacaagatcctggatgagaagggctcagggatttcagttgttccagacttccctcctaggtgcttctctaactgccccagttccactgccttcactattcctggcttctcttagcctctgacacccttagctaatctagcctggggtggaaaatctttttcttttggctcagctgagactgtcctaatttcctaaaaataacacttcaatgggaaactaaaggaaaaggaaatcaaagagacatatgaaactcaagaaacaaacagtttcagagcaccgatttcctaggtggtgactagctgccacagattaccttgggtggcacttggcccttgtccaactcaacttcgtatacaatgttgccatgcgtcccaagctcaggaggatataccttgtgtatttggtctcttttagttataagatggacactcagtttgagcaagcttaagtcccaaaccatgcaatattttgctcataaactcaaggaagggttgaaactggaaagtgggaatgggcagagatgtatcttagaaataactagaactcaagcgccaagcaacaccagactcctctccctctaccattgaagagttcctgcagccatttcctatttttagaatttaaaaaattccaggtttggcttgggtcaaatgctcactgtgaagcattcaactgtagttgggtattgggtattgaaacgtctcttctacggctatcatattctcatatatgctattttgatatcgctatcatattttcatattgtagaagaggcatttcaaatcagtcagaaaaacatagacaatgtcataagtggtgctggacaaataactatccaaatgaaacataaagttagattctttgcctcacaccatgcatacaaatgagtactatgtggactaaaaggcaaaaaaagttgtgaaaatattagaaaaaaatatagaagaatatctttatgcccttggaagagggatagcattcttaagacatgaaaagcaaaaagcatatgggaaaagaggaatacatccaaaaagcatacctcaaacaaagttcaaagtcaagtgataatggtgaacatatttgaaattgttttacgttatgtattctagaaaacggacttcgagatacagacatttgcacacagcaaatttattaggaggactgttaggattggtatctataggggagtgagagaagcgggacagggcagagggtgaagttgatctgcgatgcagtcacactaaagggttaggtgatcctgttccacagagagctctggagctgagctgtcttgaattgaggaaaggaggttggtctttaaacacccgcagtgaccagtaattgggtgtgggcagcttccagggagggggcatgacctgggtgagggcaagttctagataaaaactcagctgagagttggcagctgtgtacatttccagcatctgggagaataagtgcttcatttctttttcttttcttttttttttttttttttttcggtagagacaaggtctctctctgttgcccatgctggccttgaattcctgggctcaagcaatcttcctgtcttggcctatcaaagtgctgggattacaagcatgagccactatgcctagctgtatgcttcatttctaaagggagtatattagtccattctcacactgctataaagatcctacccaagaccgggtaatttataaagaaaagaggtttaattggctcatacttccacatggccggggaggcctcaggaaacttacaatcatggtggaaggtgaaagggaagcaaggcacatcttcataaggtggcaggagagagagagagtgcaggggaaactgccacttttaaaaccatcaggtctcatgagaactctctcactatcacgagaagacaatgggggaaaccaccctcatgattcagtcaactcccaccaggtccctccctcaacacatggggattacaatttgagatgagatttgggtggggacacagaaccaaaccataggagggaatctgggtggtgcaacacagcatctgctgcagatgtatatgtatatatgacctatcttatatttacatagataatatgtatcacacaaaagagtagtacccatatttttattcatttttctttcgacttggggtctcgctttattgcccaggctgatctcaaactcctggactcaagtgatcctcccaccttggcctcccaaagtgctgggcttacaggtgtgagtcaccactctcaacttattatcatataaagaacttctacttctcaataagaacaagacacagaacccaacagagaactttgcaaaagttataaataggaaattttcagaagaaacgcaaatggccaatgtacctaagtcaagatatttaacctgaccagtgatcagagaactgcaaattaaaacaagatgccattataccattttaaaccatcacattgtcaaaaatttgaaagcttagcaaatattggcaaaaatatagaaaaatagatatttttatacactgctgctatgagtggaagaaatggtggagccatttctaccagcaattcagcttcttaatatctgcagtaacattagcctatgtatgtaaagaggaggcattgttcatattagcaaaaaaatggaaatagcctaaaagtccatcagttggcgaaaaactaatctgtggtatgattatacaatctgacatgattatataataattatatactaatatacttatatatactaatatacttataaatatatacttataaaatatatacttatagaaatatacttatatacttataaataattatatactaatctctgtatgattatatgatgaaataattattttggagtagttattccaaaaatcattatattaaaaaaataattatacacgtatatacttggataaatcatactgaatttcagaatgatgtgttctgtgtagtaagacttatattttgaaattacacacatgtaatatatattttctatgagtacatatataggtatgtaaaagcacagaaaaagatataaaacaatataatgaatgtgtaagagaggttatcctggggaaggattaatgggaaatgatttttcaattttttaaaagcagaatattcttatatcttacttgaaaattaaacattaataacttcagcagacactgttagctgtcacccagtagtcattccctactctgactttgttccagtgtctacctctgctttctgtgaatgattaactgatcgcagttgttctcaactctggctgtgtatttttaaatatttaagatgccaaagtccaggcctccccacagagatccatattcaattgttctcgccttgggaaaatgtttttgaaagcaacccaggtgattctgatgggctgccagggctgtgaaccactggcccaaggcaaccgtgcggatcacatttttttgcaagtgacggtgatggaaaagtcacgtggctcaatcatggccggtgggatgtggaaggagcctctttggtagcttctaggaaaggcttcctcattggttaaaacatgaggcacaggaagaaattttctgtcttgtgttggatgctgtcatggctaaacatgacacctgaatctgccacaatcatcttgagaccatgagtgaagctggctggcccaaaaactagcgcacatgccgagggtggtgaaaggaaagatagagagaatctgggttgctgatgacgtggtggtgagtcactgaattaaccaagactggagctgtgctcccttgggacttcttgttacacaacataataaattgaccttattaagtctgtgtcctactgatgctatcgtattatgttgaaccctataaagttgctgacattctaccatttttaacctactttttaatttttttttttacttttttttcttaccattactgctagtccaaggcagatatcttcctgacctacttttatcaccctcaatttcctcatctgccaagtgaatatttgacaactttttcattacatttttctccacccccaagttctgtcatcttccattgatttctgaatatgacagatatccatggagaaaactgacctaatatcctagcacagagaatcctaatagtcctggcacacccttacagrtgttcacccaagttttaatctatatgtacaatctattttttctacatatggatatataatctatattagccaaaatgatcagctaagaaaatctcaagagaggaggtacaacttgctctgataggaggagattaattattgtaacaaacaatgttaactttagtggtacaatataataaaagtttatttctcgctcatgtcacattccactgcaggaatgggggtgggagggtggttctgctccccatggccaagaaaaaaatcaatggttccattatttcccaggacctcagtgttctctattggatcccctgtatccagctgccagatgatgcaaaagagtgcatccaactatatccagctattccatttctgggccagggatgtacagtaataaaagcccacaaaatttttttttcctgttttcatcttaataaaatcactatgttgttatagtcatctaataatttatgttccaatgacagcagttacttaaaggattaaaccaatataattgtattgaaagtatacacaatttaatatattctcataaaaatggaaatcaaagaaatgcaaaaaaaattatttaaaaaatgttttagattatttttcttttaaaatatttaaattatctattataattaaaagacaaattataattttgagtatcaacattttaaatccaaa

SEQ ID NO: 94128 - DNA, 113108 bp, Homo sapiens
atgagtctggagtttcttgtgagtgccagaaagtaagaaaatgctaagacaaaaacaataacctagaaactccacaatgatgggagtatgtcaaaggggcacagaagccaaacaaaagagcttcctataacatacactggcagaatttgagtgataaaattaataaagtagtactgtattataactccaagtataaaataaatatccatgagtctatactgatataaataaatgacggaacaaattaacaaagggagagaagagacaaactcctgtgcagtagaattccaaagaatttatgcagattctccaccctcaaggaaggaaagcatgatgccccactccctgattgtgggctgcatatagtgacttccttccaaagagtacagtatggaaaggggttaaagaataattttccagtggagaaacttgataaatactacctcagttggcattgatctgatcaaggtccacatcagcagtcacaaatcatgttgatagtgtgaactgttggtatgaagtgataaaagtcccatacagatgcaagatattaataataggggaaaaatggtatggggtatgtgggaactctttgcaccatcttctcaatttttccataacataaagccttctaaaaaataaagtatatttttaaaaaagactcaagaatgggaatgttagataagcaattttaagttatttatgatgctatattaaacccatctgtctgcctaaaccagtaagaagatctagcatactcactcatcctggggtgatggtatgttgggaaataaagcaacagggcagcaaggccttgcagctatccttctcctgagaccctaggaaagagaaacatatgctccagaaagggactccaatacacgcagggttgtcactaccaacaggaaaacttatgtggccatggcacagctggcatggcagggaggagcagcttcatggcaggcacctcaggaggaggtctgagaccaagccttctttctcaccttcatcagaggaggatgtgaggatgtatcaattgagatctagtcaggaaaactattgttaagtatttcaaacaggaaaaatttaatataggggtttggttccaaagatgctggcagggttaagaagcaccaaagggagaagagagattctgaagaagcaaaaatgaaagaagtgatgcccagagatcagaagctgtcagctgcagatcagctgagaagaggggccttgataacaggggtcaacttctgaaaagatgttgcctccctggggctgctgagtccagaatcaccccatcctcactgcagcaagtgccagcaactatcagcagccactagccatggccacgctagaagaactgacacagaagcatctctcctctgcccattgatcttcctccggggccctctcttggcagagcataatgcgaagcctggaagatgcagtgagcacamgctaggcccagcagtgttcagagtagagtgcaaagatgaagatggaggctgacactgctagtgagtagccaggaaagaaagtaacccttgatgagggtgtgattgatgcctagtttatactaacccttatggccttcctttccaacattatttacaccttcacttcttttttttttttttttttttttttttgtgatggagtctcactctaccaacatggctggagtgcagtgatgcgatctcggctcactgcaacctctgcctcccagattcaagtgattctcctgcctcagcctccctagcaactgggattacaggtgcccaccaccatgcccagctaatttttgtatttttagtagagatggggtttcaccatgttggccaggctggtctcgaactcctgacctcagatgatccacctgcctcagcctcccaaagtgttgggattgcaggtgtgagccaccacacctggccaatataccttcgcttcttgttctctgctcctcctgccagagatccccactatttcctatggcaacctttcactccccagcatccttgcctttgctatttcctgagggatgcccctgcccaagatgtatgagtccaaatcctatactacatcctttcaaattcagctcacgtaggtcctgctctgcaaagctttctctctctcactgttctcatctgcaagcagaagtatgctagttaaaagaaaaaaaaaaaaaagaatccctggtatgtagcaattgcgttatttccatggtgcaaataatcccagaggaacagttgctaactgtcagctcttgtgagcctgtcagctggtcccggcatggcaaaccacagtccatgacctggaagcataccttcctgttgtgaaattccttagccattcatgcgaccctgtcccacagtgaccacttcaccacattttgctatgagtgatagtcatttctgtgcaagtctgcactcaactccagaaaagcatcctcacacagggaaaatcatggcttaaaattccagccctacactcccagctctgtgactggtaaccctgttacttaccaagccaagtaactggtaaccctgccacctaccaagtgttgggacacttatcaaatgttcagagcctcagtttcctcatctattaatgacagcagcaatgtaaatcagtacagcccttaaggaagaccgtatagaggttcccaaaaaaattaaacacacaactaccttatgagccaaaaattcctcttctgggtaatgtacccaaaagaactgaaagtggggtcttaaagagatatttgtacacctgtgttcacagcagcattattcacaatacccaaaaggtggaagcaaactagttttagctattccaccatctatacatatattaaaacctcatatgatacatcataaatatatacaatttttgttgatttaaaaattaatttaaaaaaaatttttttttttttaaagagcagcaacaatggcaaccctgccccacagggctgttgcaagaattaaatgagtgtgttagtagttttcacactgctataaagaactgctggagactagctaatttataaaggaaagaggtttaatggactcacagttccgcatggctggggaggcctcaggaaacttacaatcatggcagagggtgaaggggaagcaaggaccttcctcatatggcggcaggggagaggagagaaatgccgtgaaggagaaacttccgaacacttttaaaaccggccgggtgtggtggctcacacctgtaatcccagcacattgggaggccaaggcgggtggattacctgaggtcaggagttcaagaccagcctgaccaacatggtgaaaccccatctctactaaaaatacaaaaattagccaggcgtggtggcgggcgcctgtaatcccagctacttgggaggctgaggcaggatgatcacttgaacccgggaggcagaggttgcagtaagctgagattgtgccattgcactccagcctgggcaacagagtgagaccccgtctcaaaaaaaaaaatgccattggctgtcatgagaactcccttaccatcatgagaacagcatagggaaaaccacctccatgatccaatcacctctcatcaggtccttcccttgacatgtggggattacaatttgggtggggacatagagccaaaccatatcaatgaggtaacaatgaaagtgcattgcataacagtccctggcacattgtagaggtttaataaatgttaattttctccactccttaggctttaaacactttagaagtcatattacaattcattttttaattaccctgagtgtcaaaaacactacctttgtaacttgttcaaaaatatgtaatcgctcaaaaatattgttgttaacctatccactggaaatatgagggggttgacagtaaggggagggagcagggagggatgagcccagaacctgcgggggaagtggggatgggctgggaagaaacaagggggtctgggaagaaacaagggaggcaaggagcacagggaaatggtgctgcctacgcccaagatgcccggaggagcttggagggtctccttggcatctccctccctcaggccttcttacctccactgggtgcacacttactattgcttactttttaattctggctgcggctgagcaagacaccagtgtcctgggacaccaaccgccttctgggtggcaataatgacagcagcagctatttcaactgcagctgctaayggtatttccatatacttaatcccacagggcagaagttggcagtagtgtccagcagcagaaaaaaatgctaactgggaatgctgggcttaaggagtttagtacagaaatggcaaataccccacaatttctgacctttgtcgtctaataggatacctatcaactaaaccctacctaaaacctaaaatgcttgaaatccgcctagaagcttcagtctgattttgcccataggtcaaatgttaatgaactattattttcttccatttctgctcctcatctttaatctaaaaaccacggagtcatggaatgggaaaggcctagagctccacttgctctagttctcttttcaaaaaccatagccagaaagccacgaggaaatgcagacttacaaacaaaatcgatttgttccaaactggtgtgctctgggggcctggcccctctgggaacccaggactcaggctcccatgccaggtgttttgtcacttggcagcctccttggacacgtcagagtcagggagctgggcttctcgaaagaagtccactccatctatgggcagcatgcatagcaggggcaatccgccttagcaaaccgctcagtgtttcctcctagtcagggattctcaacaggtttaggggaggggtaggatggaggtaggttttatcagaatcacatcatttgcactatagtttgaaagatgtaacataaagctgctgctttaataccagctgccatatttccttttcttggaggtttctaataaatctaaaggagggtgatctattaagttttgcaaaatggcctgaggttccaagaggtaggagagccgctgctgacttcaatttctccgtatagctgaagatgacctcttgaagcctgcagatcccaaatccgggatctctcttaatgtggcatcacacacatctgtgtgtacctgtctttttttcctccatgggaccagctctctccagatccaatgacaagcttccgattatctgtggatcttctgatacatctccttgcttgtaatcatcattcagtaaatgctttttaaacacaggtacctcctatgcaatcagtacagcactcataaaacagatatactcaacaaaaagattgaatgaaacacacacgacaacatggtcagggtttttctctaggcagagacagcgcaatttcatcttttcttttccaagtctatcctaaattaatatacttagcactgctttttaaaataataataaaagactattattaaaacaaaggcaccccagttgatcatagccaaggaaaaaaaacgcagccagtttttacttcggcaaggtttaggggatttatcattttcgctgccgatattctaactaaaaaaagccaactaaacagcccagagaacgaggcaactttctgaggcaggcattcaacttctaaggctcggccaagtttagcaaataagtttcgtttcactgcaacaccggaatgcccaccgcgtgcccccctccgggcggggctcggaaactggccactgcagtcgtgcccttgggttggggacgcacctcagcgaaacgaatccagccgcacctcccggctggcacccgcgcgctttaactcagggaaaacagaccggaacgcgcatgcgccgcggcgcgccgcaccgcccaccagccctccaggtcacattcttcgaaaaccaaggcaagaaaggcggcaactgcgcctgcgggtagagaagccggaggggcgggggcggagccggaggaagggggtggaggcgcgcctgcgcggtgatcccgccagcaggaagcaggcgcgcgggggcgggggcgcgcggcggcaggaggcggggctctcggggccgctgccgccgccgccgccgcgcattgtgcagcaggcgggcccccgcgcggtagggccctggacccgcgcggctcccggggatggtgagcaaggcgctgctgcgcctcgtgtctgccgtcaaccgcaggaggatgaagctgctgctgggcatcgccttgctggcctacgtcgcctgtgagtgcgcgcccgctgccagctggggagccccattcattccccggcgccgcggtgggccgggcggcggtggttcggggccccgaggcggccctgcagccccgcgttgctccccgccccgggcggggccggcgctttctgctcccacccctttccactcttgcagcaaagcgggccaacttgggcgcacaccccctaccgcttaggcccgggcgcggaccccgggcggaggggcccctagcagtcctcgggcggccccaggtctctgcctcctgcccgggcgcgggggactcggcggcggcgctgtcgtccatgtcgcgctgggagccggcgagggtcccggtcggggactccggagcgtgccgcgtggggatacccttggggacagccgaggtcgcgccgcggtgtyggttaagtcggataaaaatactgtggccattggcagagcccccgctccgactgtttgctcctcaggaaaattactcagcgtttaactcttggggagccaagtgtgggcggctccccggcccgcggccgtgcccaggtgtyggggcgcaccggcatccccattctaggttttcccccggggctcggcggccgggcgaagcaggcaggcagctgggtggccgggcagggcgtgcctrcagcttctctgtgcgcgggtccagtttctgtcatcgctcacagcatgctgcctggagacagggcaggaggggcacttcgcaggcaggtggtcggccctctgcttgttagggaagtcagaaaccgtccttttaaagatctattcgttgggaatgttttaattgatgctattaatacgttaccaagtagcaaaattggactagaaatagctcccagtgtgagctgcgtttgaatgctagccacccagacacacactgaaatgaaatcacctgctaacctgttggcgttaccaagatctgattccagaggtgagtgggtacttcacttgtctgaagtgacttcagytgagctctaggaaggcaagtatgagtagatccagcctgtgtgctacagcccagctgttcaggaggtggagctggaaaaccccagcaggactccgggttgctaggggaggtttcaggcgtcggatgggtgttagatgtgtgtagttttgcaagggaggaagaactagtctraagtgtgtgtgtggtcaatcttgagtaagaaagctgagacccaagaggaaagaccatttaaagttgaataactattattatggcagtaatactacctacatttgttgagtgcttaactgtgtgagtcatgattcttagtgccattgtctcaatcattgagcaaccctgggaaatcggtactataatgattcctattttagaggtgaggaagttaaggccaagagagattaggaaatttatggatgatcacacagatagtaagagaaggagggccaaaatttgaacccagaaaggcctgggagcaggagctagaacccaggtcttcgaacagcagtttcaatgtttattttgggggtattctatagtcgctgcaagggtttagaattaataaagtaggggatttatggagccatgggaagtttttttttttttttgagacggagtctcgctctgttcagcccaggctggagtgcaggggcgcgatctcggctcactgcacgctccgcctcccgggttcacgccattctcctgcctcagcctcccaagtaactgggactacaggcacccgccaccacgcccggctaattttttgtatttttagtagagacggggtttcaccatgttagccaggatggtctcgatctcctgacctcgtgatccgcctgcctcggcctcccaaagtgctgggattacaggcgtaagccaccgctcccagcaggaaagttttttaaccaatcattcatctgaccaggaaatcttaccaagtccttactgttgtccctgaatttggcactaggagacaccatggggtgctaaaacttaactggtctgtgctgtgatggtacagaccctataccacatagtgtagcacattgattctcagacttaagcatgcatcagaatcagtagggttttttttaaaaaacacagactgcttgtctcccacctcaagtttctgattcagttggtctgggatgtggcctgagaatctgcatcactaataggttgttctgtatgctgttgctgtgacctgacaccactttgagacccactggccaagatggtgaggtgggcatgaattggaaatgaaggttaaattacaaactggtgtgaggaaaaggaatgcatgagaactatgccaggaactcctragtgagagcaatcaggtacgtttgttttgttgaggaatcaaaagtgagctgagaatggacggcttatgtaggagttaacagggaagtcataggagagagcgtgttctaggaggagcagtgtgtgcagaggtcctgcggcagccaagagcaggcagtattctaggaatgcaaagaaggatggtattgttggagtgtgaaaacaaaattacagccatgaggctgcccaggcagacaggggccagagcaggcaagcaggcaggcaggcctggggtgcagcccacgacatggttgattttagctatgaggggtttaacacagggtggaggcagtgttaataaggagcaggtatgctaagtctgagccactctgcagggaaaaatgttacagggcttgtgattgataacaccgaaggacactgaaaatgtagtccctcaaccgtgatgtctgtgttttctaatctctgcttttcctaattagtaatcttgccctccctgttacaagtaaaatctcaccactgtttgaaaaaactgtccatacttcccaattatrtacaccctcactgttagccagcctccgttgcagaaatgccctccctgtttcgggaacagaactcaagttctgttagcctttctccttctcctccttacatctttcccaaagtctttgttacctactctggccctgagtctcctccttgataccacataactcttcttcatgtcttagggttgaccacctgctaacttgcaytgtacttgagttctttcccattcatatgttggcttttttttctcaatgaaatcccgattctgaggacagggattgtgtcttatgtgtttcagcccttgaaacatttatagcagtgctaatggctcattgaaagaactcagtttctgccctttgtgctgaatcaaaaatcaggccaacctactaggtagctcctgggcagactgcttgaattacctttaacgtatttttttttaacatgcatatagtgtaaaaagttaaatagcttctgcagggccaaacagtatcccctgccaccatttccctctccccagaagcaggcacttcatttctttttttttttttttttttgatacagagtttcgcttttgttgcccaggctggagtgcagtggcgtgatttcggctcactgcaaccttggcctcctgggttcaagcgattctcctgcctcagcctcctgagtagctgggattacaggcatgcgccaccacgcccggctaattttgtatttttagtagagacggtttctccatgttggtcaggctggtctcaaactcctgacctcaggtgatctgcctacctcagcctcccaaagtgctaggattgcaggcgtgagccaccgcacccaacccctaggcatttcacttcttttagttgattattttggtatttatcattgtgccattgaatcacctggcttcctsatttttcagttgtagatattacctagtgactttgttctttgggagatgatttttttcttctctttgcccctgtacatgctctccaccctcctatatagatgtggtataatctcacggagctcatcatgcagtgtttacaagcatgactatgtaaatgctgttcctagtgagtcatgttgtaggttactttttgttttctccagcgaataattggctggtgttctaatttgcttgctttctatgtagtatgacagatccaactccaaactctttgccagttgtctgtcgcgtcttcccccatgatgttcatgagcatcaggatgccccttggtcagcaccccttcctgaagaagggccccggggccttctactgcaacttgtggatacatctgagggtcagctgccagcctcaccacctgcacccacatcagcctggacctacccactgcaggacttctgtttcctgacttcctcttcctgactccctcttgtttcactccctggtttggatgtgatgggaagtgaattctgagactttacccataagtatattttctgccttcatgtctgatagattgatagtgtagaattatagaaaaaaagttcctttagaatttttgaagcattggtccaatcctttttggcctccagcattgttgaagaatttcaagccagtccttctctttctgaagattgtagcatcttcctttcgggtctagttgtcagtgctcgccacacatgtccagccccctgtcccccaggctcttggtaggattgccctcccttcctcactccctgagcttgatggcctcacatggttgttgtgccagtggcctgccctcctgctgagcggaagtgctacttccacttctgggcctgcacttcgctgcgagtgtaagttgctgccagagttttccttccctttagttaggttctgaactcagcttgacaatgatgatactcagcttgcagaaccccctcccacccatgctatgaccctgttcgattgaaataaacttgaagaataaatcttggttgttgtaggcctctgagggcttttgggctgctcattgctgtagtttaacaatgcctgccctgactgatacatccatggtgttccaagatccacagtgctaggccttggtgtattttatccagcatgttgggcattttttgtgccctggcaatccagaaacacttattcttcagttatgggaattttcttgaattattctttggtgattttctcccctcccattttctatttcatctctttctgggactactactattctgatataggattgctggaccaatcctcttatttcctattttctaccattttaaggttgttgcacttttgggacgtctcctcatttttgtatttagactcttctagtgatttttttacattttatttttgccatactttttcatgtataagagttcttttttgttctgtgaacttttttaaaaaactaaaacatggtcttcatttcatggtatattctctggatttttaaaaaatttgttttcttttctctttactgaaggatctctttcctctaggctgccttcccgtttctgtgtgaggctctcctcagatggcctgcccatgtttaagagtgggggacgctgtagggatgggcactgccttctgtgagctgaacctttccttgttggggccttctgaccttagtgctgcgggttggtcctcccgggctattgtcacaagactctccctggtccctgcaggaaggggaggcttggctgcctgcatcctggagcccagtgagcgagggctgtagcctaatcagtaacctgattgtcccagggggatctgggctcctctgtcagagaccctgattccaccctctccagagatggagccacctgtcttctgccagggtgggacaggagctggaacttgtcctgcttcttagatgtctttgaaaatcagacttcctgtctctgctgcctccacacccattgcagatgctccaggcctggcccagttcttgaccctaagtataaatgggccattccactgcccgcccacgtccgtgccctctccatgtccccatattcacctatcttctttttcctatccagtagcattttggtgcctgttctcccttccccttctccctgtccacgtggattgattccttaaacaagaacaaaaaagaagtcagggaggagggatatggagagaggggcagggaggaaaatagattgcctatattcaaaaaaagaaaagaaatcaaagacaaaagacattttctgatgttttagtcgggtttaggagccattatcttttcacctttagcctttgaaagttagagttaaggctggtcgctgtggctcatgcctgtaatcccagcattttgggaggccaaggcaggtggatcacctgagatcgggagtttgagaccagcctggccaacatggtgaaaccccgtctctagtaaaaatacaaaaaattagctgggcatggtggcgggcgcctgtaatcccagcaactcaggaggctgaggcaggagaatctcgtgaacccggaggcggaaattgcagtgggccaagatcgtgccattgcactccagcctgggcaacaaaagcgaaactccatctcaaaaaaaaaaaaaaaaggaaattacagttgtgacattgtgacatctagtaacatttatgtaatttttggtgtattgtggattttgttgtagtgacattttagttgtggtacctttctttcctgtcagtgttacttaacaagaaaagagataaaacctgaaaaccatatgaaagagtgttttatgtgtcttagttttgtgtttatggtaatagacttcaaacttccctgaggttgggactttggttacggtacagttttgcccttaatataatcagctcccacatgatcggcaattgccctcataaattcactcgggacacaattgttagcctctgccttggaggatgtgcagcaagttagatatcactgtgacgccagaggaccctgggggacagcagacagctaaaatccaacaacctagtaccggtggcattcccaggctgacccgagcgtgagatcagcttgggcttgtcaaatgcaggttcctaggatcctcctaggcctgtaggagcctgagggttggaggcacaagctggaaattgtgaattttcaacattttcaaaatttcctttcagattttctatcttttctactaaaagaatattttagtgaacacccaaatactctctgcccagattcaccagatgcctacatttttttccacatttttctttttcttactttttttgtatatattttatatatactttttttgttgaaatatttgaaaggtgcagacgtaacagtacttcaccttcaagtactttacatatatctcctaagaataaaggtattcttctatataatctcattaccattatcactccctaaaaattaacaaaataatatctaagatatagtctatatttaaatttccccccattgtaccataaatgactgtgatagcctttctgagattttttttttgcttctgtttttttgagacagggtttcaatctgttgtccatgctggaatgcagtggcatgatcttagttcactgcagcctcaaaatcctggactcaggtgatcctcctgcctcaggctcctgagtagctgggactacaggtgtgtgccaccacagccagctaattaaaaaatttttttttgtttagtttaaaatctaggacccagtcaagatttacatgttgcatttggttttatgcctctaaatttctggagccatagtagcctgatttttttttgtttgtttgattgtttctcataacatttacctatatatgtgtgtgtgtgtatatacatatttacgtatattcatgtatatgtgtgtgtgtgtgtgtgtgtgtgtgtrtatatatatatataaaagcccagagcagttttcctataaatgtcccacattctggatttgtctgattgtttccttatgattaagttcagttaaacatttttataacartgcttgctaattggtgtcgttgggaacatgtagtgtctgggctggtcccacttgacagtgttcagtgtgacccctggaaggaatggcctctatgctgcttcattttgaaggtacatttttgcagtatgaaatctgtggagtgattcttgccacctgtgcgaatatcttgttctccagccagtgcatttcatgtccattgatgatccttgcctggaccgatttttctgttggggattgcagttagtgattttctaattttgtaaatcttttgatagttattaactggtggtgttttgaaaagaactttccctccctttttcttctctcactgtattagtttcccgtggctgctgtaacaaattactccaaattaggtgcctttgaaacaagagatatttattatttctaaatctggtggccagaagtctgaaaccaaggtgttggcagggctgagctccctcggaatgctcctctgtggctccagggtttcttgtcttttgcctgcactgctccagcctctgcggtgacatggcctcctccttttctgtctgctaaatctctcctgggtgtttcttataagaacatttgtcactagatttagagcccaactggataatccgggatgatctttttgtcttgagatctttaattacagctaaaaagaccttttttccaagtaagataacaatcacaaattctaggaattggaatgtggacatattttagggggcaccgttaaactcatggtgatctttctttaatcactgtggacccgtagcttcttttagtctttgagcacttccttaatgtctagatgtttcaggctcattttctttttctaccccaaacctggaatcagccttctctccaaggagccagaattgaatggaatcattggccacttgcttggtgtctagagagtgggagaattggttggtagtatgggaaaagcacacacacgtggtatcagaagtgttctgtargtagaaacagggtttaagacttgggcatctttattttcaacaattttcccattttccaccatagttcctaagaaaatggacaaggtaaagtagtcaaggtaaagtgctgagtaccatgagagaaatgagatctgggacttggagagaatgggatgcccttaagacctggggcattgagttggcatttagcagaaggatacaatttgggcggtggagttgaaggtgaaagtgatggaatgagcagaggctggagtgacacaatgccaggagcaggagtctttgtggcccataaaggcagaatgtggaagtctgacctgacataaacttgatttaatgacatgagtaagccctccataagaatttgtgcagcatgagagagattttgatgaacatgcctgaagtgttcagacattagggcagggcaaagtataatcagttttgcattttggggttggcccgtgtggcctgaaatgtgctttgtggtgtgcatgtctcctgagctgcctaccttttgtagatatgtgactggattctagtcctggtatatgatatgtatggtacttctatacaggccagtgctgtgatctgaatgtttgtgtcccctggaattcacatgttggaacctaatccttgaagtgatggcattaagaggtggggtatttgggaggtgattaggtcaggaggcagagccctcatgcatgggatagtgtctttgtaacagaggcccaagggagttcattcctcccttccaccatgtgaggatacagcaagaaggcaccgtctgtgaataggaagtgagccctcaccgccagtgtcttgatcttgcacttcccaaccttcataactgtgagaaacaaattcctgtttattagccacccactgtgtagtatatttgtgatagcagcctgaacatggactaagacagctgagaagtcaagaacatgtctgatgtgaagttggagagctttcacaaatagatatgttgaataggtgaggccagttaccagattcttcatgtgtactgaacccacattaatgtctactgcaaatttcttgtcttgctttttgtcttacaaatatgacaagtcctaggaattacctgaagggtaaatgtggggaggattaattcagggtcagcccttttctttttctttttatacttttatttttttctgagatggagttttgctctgttgcccaggctggaatgcagtggtgcgattttgcctcactgcgacttctgcctcccaggttccagcgtttctcctgcctcagcctcctgagtagctgggatcacaagcgtgcgccaccacacccggctaatttttgtatttttagtagagatgaggttttaccatgttggccaggctggtctcgaactcccgacctcaggtgatccacccacctcggcctcccaaagtgctgggattagaggcatgagccacagtgcctggccagatcatcccttttctgaataaagcggtctcaccctatcacgtggtgcaagctttctaaccttctgtttcaattttttttttccatttgtaaaatgaaaatactcytttgccttgcaggtaaaaataatttgttttaaatactgtgaggaattgaagggatttctctaaagagctgataacttcacttgatgagcttcaagggaaaaaaggtgtgggtgtgtgttgtaaagtaacctgcaacatggagggactccttccaggcaggaagggcagtgacggccagcaagtgggaacttctcctctgaggggggctgagggtttcctcatcgccctgcatttagaagggccaagagtgaatttggagttaatccatcagtttctttttggttaagctttttagagttgctgtaaccaaaataaataagtgaagtaaagcaacagcagaaaacgtttgaacttcaaagcagtctttttcagagggagtctggatgtgctagaaaaggaaaacaattttgttagggtggtgagatcttggaatgttattcttagtatctttgaatatttttatagtatttttagaaattgaaagcaaagcctgctggttctaagttagaatttggttgacatatatacygggggtgaccttgctttttttttttttttttwaaaaaaagacttgagcaggcagctgggttttatcagcaacagaacattggtggtgtaggatggcttggttgtaaccaagggaaagaaccaagttattctgacactcatcaaaggggctagtgatggctctggtggaaatggccattagctgtgaataatggatcctcstaaacagggcttctcagcaaaactcatacattgccaaatcaggatctttttctttttttcttttggtttcttttgctgttctgtggaatttaattctgattccctgctcccttaccccagtgcatcctaattatttaaaaaacagaatttctatcctaggttcttaattcaatgagaggwccccactatcccaacggaagcgctctctgccctccttaggcttcaccttgcctgcgttcccaccccacccccacccaccagtgtagatgctgaaatgcagccctcattttgggcaggagaagcagcacccaactatcctgcagtgaggcgtgaagaggggagatgttctctccatttcataggtggggaaactgaggcatggagaatgagcccagagcactgacagccctctgggttggggcacagctgtggtggctgaggatcrtgcccgtgggtgctgtggtttggagatggtcctcctagatccctctctcaccttctttccctctctgccctttttgaacacaaaatgaaaaggctagcttaaaaccattattaaaattttttaagctcccatttgaaaattacaaaatacaggagaaatgagaaaacaaggtgctcaatgtggaaaagctagagaatgaagtgcaaagaagagaaaaatcccagacctcataatttctgcatattaaattgccttcccatccagaaatagcgcctagcttttctttaccaaacttgttcaagccactgsccgcgggctgcatgtggcccaggacaaattcataaactttcttaaaacattatgagttttgttttgctttttttgctcttcagctattgttagcgttatatgtggcccaagacaattatttttccactgtggcccagggattccaaaagattggacacccatactttagatagacctttcttttggccctcagcaaagttttgtaatttctttcttttgtgaagtgtatttccatcaaatttctctttcgcattcattctacatcaagatcaagtatcaaatatattactaacaaaacttcttaacagtaagcaataaaatgagccctgaagtcataatccatcttttaaaaaaatttctcctttgccttttgcattaatccttaagttgtatactttgttcccatcttcttcttaacttttagaaagtgccctactttcagaaagaaataatagagctttacatgttacgttggatcccagcgttagcactcctaggtttcttagatcatagtagttcctcctaaaagtcgtggtgagaagtctgaatttactttttcttcttaactagtatggatttttaaaaaaatttatttattttttttgagatggagtctcactctgtagcccaagctggagtgcagtggcgccagattggctcactgcaacctgccctcctaagctcaagtgattctggtgcctcagtctcctgagtaggagactacaggcgcacgccaccatgcccggctagttttttgtattttagttgagacagggtttcaccatgttgcccagggtcgtctcgaactcctgagctcaggtgatctgcccgtcttgacctcccaaagtgctgggattacaggtgtgagccaccacgccccgcttgccccagctttctttgccttaggcattctaaaaatagattcattaacggttattctcaaacctaatcggtggtgctcgctggagcctgctgagaagggagcatgtgccgggagctggggcctgttagcagttttcagagagagatgaggttccagagccccgccctgagccagggacgtgattggcagcggggaagaagagtacagggctgctgagggatgtgcctgtgaggatgagggccctgatgcttagcctcactggtgacaggtgtgggagggatgaaactccagtgacctctccgcagcccaccctgtgggatgcccccatgaactaggagggattccctccccttggtttccctctttttctttaatgtatctgttcgttccatcagaaaactaaggagattcattcatttggtaaccttagggaaagtatatttcattttccattgttatcgtttgaggtaaaatattgtcacatatccttaggtggagcctatatctctttaagtagaaaaaggcaaaagaaatagcatggtaacattttctaccatgccacaccaggcatcattgatatttgcgaagttgggaggagaggaggaaggagagtccacttctttgttgtctgtagtaatttgcaggatcaaagtccatttttgctttctggagttcagaagtggtctggaatttttctatttctttctccctattctccccaaatttgatggtatcctctggtatttcagatgaagagatgttttgtgcttgttaaatggtgacgctggactagaacctcgagtgaaatgtgtgagtgcaacgtgtttccaagtttattggtgtcctgcttccaatgacagaaagtacttgattttctcaggtggagatgtgcagatagtgtatcttatttccagctctaagaattagtcacataattgttactgaaatacttattgcagagctttctctctgtagtatttttgcagccaaatcctwagttgaggtggagaacctgggaaggtacttggtggttaagggtggtttataatttggatagtgayatgcaagggtcattgatattttacmtatctttctggggcttagttttaattcataattttaacagtcaaacagtctggaagtatatggaaagcatcgctcccttccagctaatcctgttcaccttcccgtgggttactggttgtttcctttgcattgtaccatttgtagaatgtcttaggtgcttttaaaatgtaaatggttttatgcccttgatttttctgtgctttgcttttttactttatatgtggaggaaatctttcttttttgagacggagtctcgctctgtcgcctaggctggagtgcagtggtgtgatctcggctcactgcaatctctgcctcctgggttcaagtgattctcctgcctcagcctctggagtagctgggattacaggtgcacaccaccatgcccggctaattttgttattttttttagtagagatggggtttcaccatgttggccaggctggtctggaactcctgaccttgtgatctgcctgcctcagyctcccaaagtgctgggattacaggcatgagccaccacacctggccgtggaggaaatctttcaacacagagatctacctcatgaatctatggttgcacagaactcattggtagatttatatcatagtgtcttctcatgtaaacaaaaagaaggctttgtatgagtggggacttctagtggaaaatcctgttccttcaaactgttgttcttacagccttcttgaataagagtgaaaccccttaaggatagaatgcaatatttagaactttaaagctttaccttcaagcctgtcttgggatttgaaggtcagtcatattaaagttctcattgtaatcttccatttcctctgtaatgttgaacttgcagagtaaagtagagaatgaatcaracagggaccttgtcctcatcgtgaaggtggagacaggagcaggcggaagactccatggtgatacaaagaaagggtctgggcgggcatctgagagggggtgaggccgcacagggttgggaaagatgacagagccagagagcggagagcaggagaagtgcagggcagggcctttgtggagagggtcaggggaagagccagggtttgaagtcagagcaagagcgggggttcagggtggggtgggggagaccatggaggcttcatcacaaaggatcctttgggcatcctgtccaggaacatgagcagggagccttgggattggccttgatttggagagggtgcctcacctgtgcctgatgcatgatggagccacagagggagactgggcaccctcaggaggaggagagagccagacaccagtgaccatgcagggctttgctgcacagagcaaaggtarcatgaagccctgctcccaagctgtgccccgtccagcccacagggacctggtgctgagcaagctttatcaacaccgmcctgctgtccgttagagaaaaggcccattaatgatcagacgctgattatttcttggtcaggaagtacgaatgtgatagaagaagctggaaggcattctgtggttcaggaaggctggggggcactgggtgtgctcagaactacactgcccagcttgccgcaggtgatggaggagtagacatagggcgggggaaagggggctgggggtgggggccagtgccaggcatccactagggtggggcagggtgtgccccatgggccctactccatgtggaatgttgtaaaagagatttgtggagctgctatatatacacacacacactctaacatatatacacacacacatatatacacacacatacatgtacatatacacatatatatatacacacacacacccacttgtatatatttacagacacatacatatacatagacttgtatatgtatacatacacatacttatatatatatacacacacttgtatgtatatacacacacatacatatatacatacacatactttttgccttgtccttttacattatttctgttgttataaagaacataatatagtggtacatatacatatatgtggggtgcatgctcaacactgataattggaagcgggtgaccagattgttctggagaactcagaaatcttgarcaggaaaaggacaaagactttttggacaaaccgtgtaaagacgggagaagtgccacgtggggatggcatagacagaagggcccggaaggaggtggcatggtgatgcagtggccagggcccccacgcggcgggcacagagatgggggacacatggaagaacacattgtcagcatctgccaaccacaatggaagagcagtgaagagggagaaggggcgtctagaatttagtagcgcctgcgatggaagaggtttgtrcagaggagwtcttctggcatttgactctgttctttgtcttactaaaatgtggaatgtcttcagaggaactgagcaagtgagaacacaggtgggtgcccagagcagagggtctcagatttgggtcacgtcagcaacacctggaaccttgctaaggccagatggccagaccacaccccagagtttctgctttgggagctgtcctaccccaggctgcagtaacaaaataccacagacagggtggcttatgagcaacagaaatttatttcccacagttctggaggctgggaagtccaagatgaaggccccagcagattcagtatctggtgagggcccaattcctgttcatagatggcgccttctcgcagtgtcctcacatggcagcatcctgtacagacttaaaaaaggtgttcaaaagtttcttcttgtgatttgcggaaattaaagtaatacaaaagtataggaaggtcgtattacctggtgtccccagacttctaaaataaacaaatacatgaatagctttaaaaatgcatgtagctaggccgggcttggtggctcacgcctataatcccatcactttgggaggccgaaaaaggtggttcacctgaggtctggaattcaagaccagcctggccaacatggcgaaaccccatctctactaaaaatacaaaaattagccaggtgtggtagcacgcaactgtaatcctagctactcaggaggctgagacaggagaatcgcttgaacccgggcggcaaaggttacagtgagccaagatcatgccacttcattccagcctgggtgacagagcaagactccatctcaaaaaaaaaaaaaaagaaaaaagaaaaaaaaaatgcatgtagctttaaaaagcaaaaacattgaccctgctgtatgtattatcctctaagttgtcctttttacttaacgctggcattttatgtgcaaaaagttgtaaaaggtgcagataccatctacaaaacccatacttttaaccaccctttaaaaaaagtgacatcttggggcaaaattttttcccctgggcatattggtaggattttattgggtaagcctatgggaaggtgtgcatcacaagggttttatagccgsatttcagagcctgccagctggggttgcagagagctgctcttttgcctgcttctggagacaacaaattrgagttctggcttcctggagggctcagagcaggrcgaggaccacagggaggtctgataagcaagcgccctttgctttaggcttggagcatgccggttgctagagcctgctcaggcaccccagattgactttttatttgggccacttttcatcctgtgtaaccgcttagaatgagcacaggcctggaaggctgagggcrgctgcagagtgcttctctagtctgggcatgctccaaggtttagggctaaggctccttcaggttcaggagtaggcacggcttcccgttcagcagctgccactctttggtctatcatgatgcctgacctttgagcacctcattcttttggtgggaactagcaactgcgaagccccctcaccgcagggacacatccccctttcttatttggagaattaaacacagagcagtatcttctaattcgaaccttctggtcagcttaagcaaaactttgaatgcttttcttcttagaagaatgatgcatattcttatctgctttaagcaaacatttcagttgtgccacctcagggtttatccaaggaaagtcgaagatttgcccttttccagagtgctaggatgattggggttcttcagaggtgagtaaggatgcatctttcctatgtacacttgttttcttcagatgggaggtgggaggactgcagccaggtggggagcagccaggggtggggggatagggatcagaattttctgaggacttcagacttggcccttgccttctacccaggcgggccagtctctatgcaaagcagtgcctttgactggaggagggcacagatacacttggtagggcaagctgtgggtgaggagggatttagccctatatttggcttgatttgagggctgtgacctgggcgtatgagcatcaatagattaaaggtggtgacaggtctggcactgttttggttgtggttatgtttcactgcttaaccaaccactttaaaacatagtggcagaaaacagttaccgttgtatttatacccatgggcttggtgkatcaggaatttgagacggggatggctcttctttgtttcgtgatgcctgggaccacacccaggttagagcatccacttgcagggggcttcttcactggcaggtctggaccttgaggacagactcaggcttggctgttagagtgcccacaggcaacctgtctggcctcacgtggtcagacttcacgcatggtggttcagggctctgagaccaagtgtctcagcaaatgtggcagaagcactggcggccatctgtgaccatctaaaggcatcatatagtgtatcttttgctcttcmctgtggtccaagcagctcaagacccccagacttaaaagaaggacacagagacacttctgtccccccatgcaaggtgtgccagataatttttggataggttttaaaagtgtcactttggagtatccctttgggtataaaggctccatgtagctttgctgcaagcacttggcagagaaactgtttttcaacttagatgaagcttttcgatacagctcacatgttcagaaaagcttgagaggaacagcaaacagtccagcattggaatgcatgcagcagcagcattctggaactttctctgccaataatactttcagtgtgctcaaggtgccctctgtttgtacaagatttccattttgaatgtctctctaaattaaagtgttcctgctctgagcactggaaggttggaaatcgctattcattctcctgaaatggggggcatctttcacattccaggaggcttcgctgccccactgaggatttcatggaggttgatgtcactcagtttttgtttgagcatgtgccaygtggcattgaggatgggggattagcttagaggatgtgtttggaaatgaacaagatgcgtttcttccatgcagatgggaaggaatctggagcccttgacaggtcatgcaggccttggactgaggcctaacttttggaagggtggcccagggatgggtgggcgctagctgtgtgtcctcaagcaagtcaccggctacctcttggggcctgtcttccgctgtgggatggtggtgataccatgacgctgtgattagaaccaacataaaaggcccacgtggagtaggtgctcagtaagcagcagtgatgctggcattgccactcttactgggcacgtgccttggttctgttactaggccctccccagggctgtggcctctcactacgtgcgccccacacaggccctgggttgcacctctggctggtgcgggccttcaagccccagccctcaggttctatttgcctgtgagacatcttcatgtgggttgctacaggatgccctgagctaagcatgtacttatctcagaccatcctcctctgccccaactatctgcctctggtgctcttatcttgtgacattactgtcctcaccctcaggaccggtgggctctgccctctgcattatttactctctgttcacctcctccctcgtccatttgtctctcacaccgctgcttccagatttgctcagactacagcacctcactgtctcttcatgctctgaacagctgttcattgcctgctgtccggagcccagctttcttggaataatataaaagggaacacagtggtgcccatatttggttcatgaacagaatctcctggggcttgttatgaaaacaaccatcctgcccatcttgaccttgctgctgcatcttcccctccccaggggcctctgctggcattgccatcccgcccccgccccccccaatcctcttcctccaccagaatctccttctccgtccgtaagtcatcccacagscatcttcacgctactccccaggactcaggtgactgcagcctttacttctccagggtgcattatatataggtggctgctgaccattttccttcaaggacaagaactccttggactggaatcaccttagtcattctggtatcccttagagcagaggtcagcaaactgtggcccatgggccatatccagcccagtgctagtttttgtaagatccaagagctagaaagttttaacaattcttaratggttgaaaaaagtcaaaaagaatactagttcacagcacctgaaaattgtataaaatgcacatttctgtgtccttcaataaagttgtgtgggagcacagccatgcttttacaaattatcttcagctgtgttcactytccagtggtagagttgaatagctgggacagagatgtcccacaaaactgcaatatttgctattctggctcttttaatagagttttgtgggtttttaattttttttttgagacagagtctcactttgttgcctgggctggggtgcagcagtgtgattatggctcactgcagcctcaacctcctgggctcaagcgattctcccacctcagcttcctgagtagcagggaccacaggtgtgtgccaccatgcccagctaatttttgtatttttttgtagagacaggatttcaccatgttactcatgctggtctcaaactcctgggctaaagcagtccacactcccaaagtgctggsattacaggcatcagccaccacacccagcctacagttttctgacttctgccctagagtagcaattcccagtcatttgggggagctttttagtcaggctttcagcaratatttagggagcacatactatgttcgtctgtctcagtaccctagataacagcactgaacaaaacaaaattgttgctgctgtggagcttacatttttttattgggcacaaacaggcaataaacagatataaataggtatattagctggtgataagtgctgtgaagaaaaagaaaggctaagtgggctgttggggggtgggtgctctcacagatagattggtcagaagacctcttttataaggtaacttttgagctgagaccttggatgaactgagggagggggaaaggtgaagaggcagttgggagaagtgtaagtgcaaaggccctgaggcaggcaggtgtggcaagtctgaggaatgacgaggcagatggcctgagcctggactctgaacattcagagagatgggcaataggtggtggcagcaggtccccagatcccttagggtagaggtcctcctccctcgccaggggtcacagtcacctggggtacttaaaaaatacagctgctgggaggcctctgtagagattctgattcagcaggtctgaagtacagacctgtggcctggaaggtcctagattttatcggttgagatgggagaatcagatccacactgctccacccccagccccatctctgtcagtgttggggcctgcagagcccttgcaatgctaaaaggcagtgtggattaggaaccttggctaccggacctcacacattgcttggctcctagaagatactcaaataaatgtttaaataatttttaaaaagagacctgcatttgccctgtgactgatggcctctgttactgttattttggggcatgccttttctttctctgtgcatggttccgtctagaggcctaggtctcaataaaggggtaagtcctccagcatctagccagtggtggctgctccaccttttattgcaggaatgggggcacactgtttcccgtagtctgaggtggatccaccccgccccccactgcttgtcacccagccaggcctttgggaagggttctccacgccctctcagggggtcctccccatacatgctgcatttccatcacagaccccatgtcgcctctggacagtaaagcaatgtgtgcagggtcttaacttgtgcatccgcaagcgctgagtttgttgaatgaatgggggatggaggagcaaggaaggattttaggaaacattggaaagaaggcaaagcctgcatgaggaccccgcagccaggggctgcctgatttcactgagcatccagcaggctgctttataggatgtcatactataaagaagggcgtgccttacatacagtgttacatagataacgtagggtaggagagcagtctccctaaatcacactttcttcctgtgacttagtgtaaaagtacatatgctttccagtttgaaatagtgatcggaatgactgagaaaaacatgctaaagcatactgtagccatttaaaatggacaggtataaaacggaaatggtgattttgcctgatccagccttgtaacattacttgaaatagggccattgaaattgctacccagatctggattcctggtgaagaatctgtactttctgtgtggcctggcattcagggactcaggctatatccctattctaaaacaaatgtgcctcttaaaatcccgggcttttatggattctgaattgatggtttttcatttgttcggggtcttgaattcattggaggaccttgagacctgtgaacacacaatttcacatgtgctttcacatgagactcccctctagtctccctgaaacccattcagggatccatggagatccacagacttcagattggaagactgtattctaaaaggattgatctcatgatagctgatgactatttaagaaatcaagttagactcagagagattatgaaagtgttgggttagcatttgaattttttctttgttggaaaaggacactcattttaatcatatcctttaaaaaactcaatttttcactctaaatgaaaatttttatgagttagattttcttgaactgggttccctgcatagcttgaagtctggataccaacataatgagaactatgaagctgatatgcctcagtttacatacaaagtattttttaaatttatattaaaaattaaaatatcttgaaagctgtgtaagagcattcagttataagccctttgtcaataactgaataattatctttcttaaaatacttactttacttaatattgattcctggtactatataaatgggtttaattcagttcaaatatttgtagagtgcatctgttagtaatgcccagctatctgtttgaagcaccgtaaggtgggtcaaaataactcaagcaggttgcaaaaacttaaaagcaatattaatttaaagtaatgtttaacttttaaggtctatgccctgcaaccttccaggctactctacacaaaactaaagcttcataattgttggaaattgcttgtgtctttccctttggaatctgtgcagcaacgtgggggtttgtcctgctttgctgtgtgtgtgtgtctgttctttggtctgggctgggtattgaattatctctcaagcaaagcaggtagagcttttgataatttgaaaggaggccacaacacttgacatgaaaacattgtaaagattaattggttatagcgcgtctgaagataaaaagtaataagcaagagataaatgtaagaaaagggaaaaattacttggcatgcattcaacgaattttagtgcttggaccatgtatgcctggtgtaacaaatgtaaatatgaaaacgcctcatcttgcagtgagacccacctgtaaggtaccaattagaacaaaacatgcagcagaccttggccacacaggagggccaccagtgtctcctggagcaggagggaaggttgaagrtgctttctggagaatcagatgctcagatgagtcttggaggtgcaggtgcccaggacactacctgtagacgagctgaagggttggggacagcaagtggtttagggaaggtggagagtcacatgcagggggctgcttgcaggggcctgctctggaggtctgagtggcgaagcgtggaggtctgagtggggaaggaagggattcatgaagcctcctttgcagcatgaatcaggaggtgcagctggggaggagagggcacgtctccaggtgcatctccagcctccaggggcagtggaagaggtctgagacacagaagtggatctggtccatatctgcttacatccattcttatccatttatgaagggtggtaaagctttggctgtggcttggacatcattccccagggctgatcctgggaagcatgggcgtcacctgcttccccaggaagagatgattaaggagaagcagtgggcaaggggaaagggctcaggacatcatggtcaaggaaacagaaggtgtctgggatgggtggcagccttcactgctgtgaaatggactgaggatagaaggattgagagatttttgtgaaatcaactttttttcttttttctgagacagggtctcacttttgtcacccaggctggagtagtggcgctttctcagctcactgcagcctcaacctcctgggctcaagcgatctttctgcttctgcccccgccatgtagctgggactgaaggcacaggccaccacccctggctaattttttgagatggggttttcaccagtttgcgcaggccggcctcaaactccagagctcaagtgatttgcctaccttggcctcccaaagtattaggattacaggcacaagccaccgcaccagcctgaaatcaacattttaaagtgagttgaaaaaaggtttgaaagaaaaaactgaaaaagcaaataacgatggaatgatttgaaaagtctgccaaaaggtgctacccacccagaaggcaataagagaatggatgcttccatagcatggaatacttattctcagtaaagcagcttaatcctgtagccaaaatgagacagtatacttatttgagatatatagcacagtaaagaaaagcgcacatgggttgggcaactggtggctcacaggtgatctttgtggactctggtggcagcagtgcgtggtgtccgagctgaggactgacccaggtgttcaycaggtgtctagaaaaaggcaagaacaggacaacaaggacatagagtttagtaagggttaaaatctcttccctccttttttaaaagtaastaaacttttttaaaagtaagtaaacacttaaccacaaggaaaattaaacagttactcatgtcaccatttaaactcagtattttggaaatttcacagtctttttttcccaatgcattttacagaagtgagagtcacactgtatatatactttttcgtctggtactgtcataactgcatcatgttacagtgtagttccgtggtcatatttaatggctttctgatttcatcaaatggctgtatgacaatttatacagcaattctctaattatgggatattttggcttattccttttttgtgtgtgtgattataaataaggccatgacattggtgagggcacttttcctgtatgtttactgatttcctgagagtaagataaaagcaaaatcacatggttcaaaggtataagtgttacaggaaaggggtcccgatccggaccccaagagagggttcttggatcttccacaagaaagaattcaaggcgagtccttaaagtgaaagcaagtttattaagaaaatgaaggattaaaagaatggctactctatagagaggtcagttctgagggctgctgattgcccatttttatggttatttcttgatgatatgctaagcaaggggtggattattcacacctcctctttttagaccatataggtaacttcctgacgttgccatggcatttgtaaactgtcatggcgctggtaagagtgtagcagcgaggacggccagaggtcactcttgtggccatcttggttttggtgggttttagtcagcttctttactgcaacctattttatcagcaaggtctttatgacctgtatcttttttgttcttgagacggagttttgttcttgttgcccaggctggagtgcaatggtgtggtctcagcccactgtaacctccatttccagggctcaagtgattctcctgcctcagcctcccaagtagctgggattacaggcatgcgccaccatgcccagctaattttgtatttttagtagagatggggtttcaccatgttggttaggctggtcttgaactcttgacctcaggtgatctgcctacctctgcctcccaaagtgctgggattacaggtgtgagccacagtgcccggcccatgacctgtatcttatggtgacttcctatctcatcctgtgacttataatgccttaacagtctgggaatgtagcccagtaggtctcagcctcactttacccagctactgttcaagatggagttactctggttccagtgcctctgacataagcagtttttattttttttaatgaataatgaatctagttaatagctttattttaatttctcccatttccctgctttcttgccacttttatttatttggtcatatattgctgtcttttttttaaaccaagtttyctcctctgtttgaagagagatgtgcttctatggaattagcaacattccccttcttgagagtgggaatttcatgtgggggtgtagtttggatactgaatcctatttgatgagtagctattaaactcctactacacacaagaggatggcaatgggaagatgcctggggttatgagatcctaacctcagggccttcccaagctcacaaatttaacagcccgggacagggaggacgtttgtgtttaatctctctgttcttcctcggcacstggaagcacctaaatgcacctggcacttagaaggccttcagtatctgctgagtggccacatgagggccaaataggagtgtgtacaaaatattaggaccgcctatgctcaggaaaggcttccgtagaaagaatcctgctcagtaacttaaagtgagtgctcatggtccagtattacattttaaagtcatctgctgttgattcagggctgacttatacacatttactgaaggccagctgtatacaggcaaaggagagcctgcccaccaggtgcctagagtatagaagggagatgtggtaagtgctgagaaaggatggcactcccgttggagttaagccgcactgcaggccactgtttaacctctctgggtttgctttcatcatcattacaagggagaggttagactgaaccttaggacttctttcagacatgtgattatttgatttttgtgactagctcttcctcaaacaaaggttgagaacatactgtttatcaaaacacatgcatccttagctaggtgtgatggcgtacgcctgcagtcccacttactcaggaggcggaggcgagaggatcactagagaccagactgggtaataaagggagatctgtcacttggaaaaaaaaaaaaaaaaaaagcttcacctgcactgtccaactctagaccccaaaagaggtattccaaaactgcagggatagatagaaaagaaaaacagctcagagcagtgtgagccatgtgaggtttgcaaaatttatcaggctggagagtcatgagcacggaactaaagtcatgccctgccatgcccagggccggttctttaaaggtattttgtttctgcccagctgcctcaaccaattatctttttcctgggatttttgatacaaaaaacaatatatggccaatcagtagcttatgttattttaatgtaaattcttgataacttagaaactgccttttcctttaaaagcccacttgtcactgctgctgatgggagcatatattcagggcaacttgaattgatgttcctgggttgcagttctcaaacttggcctgaataaactctacgatcctgtktttacttattttgtagtaagatttaattgttttgaaaacaaagtatgcattttgttgtcttcgtaagttaattttctttgtaaaatttaaaatattggttaaaatttaagattccatccattggaatccctgaaagttgtggacttaaacattgacttccttttttctttctcttacagctgtttggggcaacttcgttaatatgaggtaattgtttttaattacttgggtactgtggttggattttatagacacatttcagttggtacatatataccatggatgtcatgggttaattgaaaaatatttttaaaacaaaastgggttcttgctattcacatatctgagctgtttcttttctcctatgggtattctcaaggaatgcagctgattttaacaattaccaagtaaggcccacaagtaaaacaatggtcggccacccccccttccctccttgtgtagataataaagggttgaccctagcttatgtaaattgtatttctgggtggattgagcaagaacactgaggggcttttgcaaagccttctgagaagggagctgtcttcgggaagccatggcaggcccatgacctcagggggccagytagtgggtatcgatgcagagaccacctatttagtccagcgttaggcctgtatgcatcgtgtgtgcttcttcatagggcaggaggcactcttgtaaaaataaaactcgtgttatctctttaccaaataaaaaaaaatagcctttaaaaaaatcagcaaaaagaaataagcacttattgtaaaaaccatttggtactgttaatagttttccatgtaaaggaaaatttgctccacttggtwatgttgtgagaatcactattgtgatgattaggttggtattgtaatgtaatgcggctgcacatgtctaccagggtaaaaggttactatgccctcaggaggcttttcatgtggagttgggttttgcaaggtgggtgggatggtgtcgatttgattcctaccaccagggcatgtgtgtgtctcctgacaaaggctgctgtgtatgactakgtggggtgctcagatcccttttaaaggagctctgtggttttacttaaaagactccatttttacattaaatccccaggaaagcccagcaggcacaaacacatactcctacagacgcacttcctgcttcaaatttaaaatcctgtgttggatgtagcatagcagtgagattattttagtttagtggaaataatccattaggtaatactgagcatgttcacagatggatttaaggggagtccttccctttggttgtcttcttttcctctggtgcatcccttctggagggaattgtacacatgactgatacttgagcaggagacagaggtggtctgcatccgttgggttatgttagggtaatttattcagaaacagtcttaaagtcacaaagcctttcagttgatctcagttttatagctttctactcaacaggtctatccaggaaaatggtgaactaaaaattgaaagcaagattgaagaggttagtcttttttctatttttgtatctatttcatctgtatacttgtcaattttacttcctttgctcgtgctgtcattcttattgtggcagcttgatgctgttctgtgattttgcaaccrtgtctcaaaaaattactcccttatttaagaggacatgcagtctgttactgttggtccatttttgatgtattaaaacaaattctacctcaaaggcaaaatggatttagacttttacatgacttttcaggtaagcgttttttagagaaagggaagtgattgcctttgggagatagagatgagtacaaacatcctctcactggcacaggtgctgaaaagaacaatggccaccaatcggatgctaggccacaaatgtaaagagcatccacgtgcacagatggagacgttgcacacccacccagctgaaggctagcacctatgctcagttatgcacctcctatttaaatacatgtagatacagccagaccattgtaacatgggctgtgggggaggggatgggaggttacttactttggatttgaagccaacttagggagtcctgggaagcccttgagttgctgtctttctgcctgagtccacagtgtctacagacgtggatgtaggttgactcacagcctgcaatttatgtgctgcagctgataacatgagtatacacagtaattgcagaaacaagatgttaagcttttgtgggccatgcttaggggattgttcctaaaaagagatggatagtgttgatctgtttttatgagcctgaaacaccttttacattcttcctagtaggatgggtgagcaaaaacattaattgtctcagaaaccgaggcatttatggagtaagagttcaaatggacagtttatctgttcaattctagcattgtgatgcaagtggtgtatcttaatttcaaactggaagttaatttgtagaagaaattaaaacctgttttgccttatctgaaacatcagaatggggtgaaaggggttgagaactgtgtttttgctttaaaactgatttttgttattattgttctagatggttgaaccactaagagagaaaatcagagatttagaaaaaaggtatgtgtactttttgtcttaaagtcaatagttaaaataagtttgtctcaattgagtaattaattctgtttgtttgctccaaactctgccaacctaaataaatgtctrtatacgcatttcccccactttgagtgtaatacccagatagaacatggggagaagaatcaatctagatgtgttaagatcttccttcttcaaactctgaacgtctgaatttctgcaaatttattacatagaagttgaggccaggcctcacattttccttgaacttctgcatatattgatcagtgggatagaattccaaaataggaggacaatccagtgggcctgaaatgtagtaccatatgcaaacaccacaaaataaggatgtggagcctatggtgtgtcatgtgtagtcatttagctgcttttgtcaccagagttcatgaggaggtttccagaatttagtccaggtgaagtgagagggcagaagaattatgtaatatgatagaaatgtttatttgagtcagatttcggagagaacccctcctcaccctttgggacactattgccctcaggttctctctcaggcactcccgaggccgctgagcctcagcctccaggactttcctcttgcacgtactgtatgtggaaaactatctagagtagcagttgaatcttcagaaattttagaaagaaaaatgacagcatttattaaagttgatgtgattttttccccttattgggatgagtttggacgatgtgtgtcagcattgaatgagccttttatcaagtccagaacaaaaatgaaaaaatgaagagcagttttcctttgattttcattaaatgatcgaagggaaatacgactggagaagagtcattaaacaaaatgtgtcattcacttgattcttatcctcaactgagcagtcaagcaaactgttaatttcagcacttatcagaacaaaagttgtcagtaatttttaacagattccttagtaatataaggttgttacttgtgctttaaattttttttgccatgattctgtgctttagttatgcagcttgtaatatttccttggatgggagccagaaaatctgcctttgataagacagcagaattgagagatcttaattgaagctttttttttctttttagaaaaattggaacaataagaaataacccaccacacattttctatattggtctaaaaacttgtccaccagtgattattttctttagacaatagaatttatttatgaaaagaaaaatgtctcaattcgataacttccctaaggcaatagcttacaaacaagagctctcaacatgtgagaattatgcaatctctttgatacttttgtgatatctttgagtgtgtgcttttaaactggatggagaagcacaaataagaattcaatcctaagaatttactaataatttattcttgtcaacctgtgaaaccgccttgaaaatagtggcagagggcaaacatttgcctctcgggctgcttgcaggtgactcattctggaatggttccgtccttcaggttggtcagcaagtcaggtgatccgcgtgcctgcattactgtgtcagaaggtcaagcgtaggcctggctaaaaaagcgtgacggtggaaattgatggaactccgtctagcttacttttcctgactcagtgtgtgataaagatgatcaaacaaccatcttgacactgacaagataagaatgtaactggaaataggtttacttgacgtgcttgtcactttgagcaaagtggcccccaagaactaaagatatttttggaagttacaggttatatttgtacagggaaagaaagaagacagtgtcattctagaatcctgagtaaatggattgtatgtgggctttttctcttttaccacactcccattgcttaatactttgattatatgccatttgtttaattttaactctgtatctttaaatgttctttgaatagatggcaaatgataatttaaattctaagtaagaatactgcttactggctaaacagtaagtttaatctggaatggcataaaatattaatgattagtaaaggactaatttggggttgtaaggaaagatttgttacctcattctgcctctgcttgctggtttctctctcgcttaggaatgcaggcctcatgcctctgctgcattttgctgcttaacccccagtgcctagtgtagaacggagcttaatggaaagttcctgaataagtggatgagccagtacactgggtaggattttcacctgctacaggtctttaagaagccttgtgggccaggcacggtgtaataccagcactttgggaagcctcggcaggctgatggcttgagcccaggagttcgagcccagcctgggcaacataatgaaacctcatctctacaagaaatacaaggctgcagtgagctgtgattatgccgctacactccatctggggtgacagagtgtaagaccttgtctcaaaaaaggaaaaaaaaaaaaggccttgtgctcctgcccagccctgagtcagtccagcaggtgcttgggagcacccaggcagctggctcagcatgtggcccagccaacggcacccacatggtcactgcactctatcagtcactgtgctctgtcacccattactgcaaggaggaaaacaggatgacatgcatactgaggaggaccccacaggcactctccccttcctgtttttcagctttgtatgtgtggcttctcgaagaagtgaggagtrtaagatagttttttaaaagtttaattacttgagcgtatacatatgaaatctaaaacttggctgctacatattgaagaagaacaaagcaagaaactcaacctatttttcgttttttaaattaaaggtttcagcacgctgcatttgaagtattttttagtccatcttatgcccgtcactgcgtatgtcgggcaaccatgcctttgcttcagttcaatttctttgaagtacatttcctgtaataaaacggtttggccgtttcctcttggtataagtagcacaccacatttcattttaagctttcagatagggactattctaagctgacagcttggattaacatttgtttccatggccccggatgcacactccacagtcctgcgcctccgctcctcactgaattggttttctccctgcaccgcgttttcccatatgtagctatattcccattcccgagcggtcytgactctaaaatcatatacacggtagagaaggagccctgaaggtgagtgaggggaagtyatgagtcagagacggctccagcgttttcacgacagacagttcggaggagccacggtgcttatgagcagtcgtgggaaggaaagagtctcagctgtgccacggcactgggtgtgccacttggggactgaggctgaagacatggatatcgtgagctcagagaaatgaggacaattggagcggtgtgagaggtgcacacaaataactctgagatttacagtgccgtcccctagctgagttggtgagggaagaagaggcggaatgacaagaagtgttacttggcaaacaagacatctgtgccgctcccgccagtctaacagcatcgctcctgactgaaggcagaacttgctcctgctccccagctgcatggatgactttcctgaggcacttcctatgggcggcaagtactaaagacggtcggtgagctcacaagggggagccccagggttcccacccttgccctcagactctcccatctgattttgtagtctgcaaggggaacttgagcttttgagaccctggaagttcttaatgggggaattcgtctgcattgtaatagaaagccctttcactccaatttaagcacgctcagggctttctggagatgagaaacccctgcttcaggggcttctgtctaatgacccttcatattcccttcagttcagcgaccattaaggaagtgcattctgtatcctagtgctgtgtctgtgctggggacagggcagggatggagacggtgccacctggcacaacacctttccaattagtataatgaccataaagctgatgtctcagattttatttaaagcacttttgttcctaactgaataacttttaaaatgaatatttcagttctgtgtttattacctctcactggacgttttatattcagatcacactgccctgctcctgggacatcagtgtgggctggggaccagtggcaccttagggcagcaagagggtatcaaaagataagtgagacttagggtcagagcagatccacagagacagaagatgctgatgctcagtcgttttaccagggacgctggtcaggaagaggatgccgtgattgtgaaaattcctggagcaggagacaaagtttcattaatatctcttctcgctcttgtggagcggtcctcatgcgttgggcctgtgacttcacgaagctgctttcttccacctggaccctgatacagtacccagagaatgccatgattatagcccggtgggctcttcttgccgactgccctgagaaaaccaaggcactgagaacaacaggtgttacagcgaagagagagtttaatcacagggccagccacgtgtgagaatgggcgaggtttctcaaatctgcctccctgagaactcggcggcttgagtttttaagggtagtttggtgggtgggggcctggggagctgaaacgattggctgggtgtgaaatcatgggggtgtctaaactgtcttcaggcagctgaatcaattcatggaagccaagtctgaggaccrggtgacatctcttagtctgtctgccaaaatgctaaatctgaaagatacctcaaataccgtttccttaggattcacaatagtgatgttatctgtagaagttgttggagaagttacaaatcttgcgacctctgtttgagtgaccctggggcagkaagcaacatatagaaaagccagctaagctaagcagttggcaggtcattgtttatgcttattctttagcaaagttcagaccctaccataactctaacctcggcttaggaatgtggcttcaatctcgaaacaaggaggggggtcagttttccttgcctcatcgtttaactataaattcctctcctagttatattggcctctgcactaaaataagcaaaaacaataaaaacaaaaattgagcctgtgaggttagatggagccagtcatattagatttctctcattattacaattctgcaaaggcagtttcacggccatctccctcatggtgtggttttatctggactaatagaggtagtgcctgccctgctttagcagctgctggaagccggtagctccttgcgcttttgcttctcagagatagaatctcaagtcacgtctttagcttgattctaaacaaggagcaggttatatagctcttgacctcaagttaactagtgactccttggtttctccagcactcattcaagagtggagagaagagcaaacaataacagtcccaaaacctggcacatgctttgatggtagacagagaaaatattcaaatgagatgtttgactttttccttttgaatctctttatattatacagctttacccagaaatacccaccagtaaagtttttatcagaaaaggatcggaaaagaattttggtaagtttgcacacctgaatagtatttgtaatattaagaaactttcttttttcgttgagagataattcacatatcatagaattcacgcttctcaaagatacgattcagtggcttatagtatgtccacagagttagcaccgcattctgattccacagtttcttcatcaycccaaaaaagagtcctgtactcattagtagtcacttccatttcccagtcccctcccgccagctctgggaaaccactaaaactactctctatctctatgaatctgccttttttgaacatttcgtctgaaagaaataatgtgatatttgatctgtcttcaagactcagctgtagcatcaatcagtacacttcattccttttcatggctaaacaatgctccattgtatgggtgtaccacatactgtttccctgtttctcaattgatgggtatttggagttgtttccaccttgaggctatcgtgaataatgctgctatgaatgcatgtgtgtaagttttcgtgtggacacaggattttcattcttttaggtatactttggagtggaattactggattgtatggaaaccctgtgtttaactttttgaggaagtatgaaatttgagagcagtggtttttaaccttttctagctcacagaccactttgaagaatacccaggggtatccttggctaatagtgctcttgttaaacatcagtataaactcaccaatgaaagaaacccttttaactattaggtaacaaattatgtccaaaaagatttcatgttgcatttttttttaaagtaacagctttattgggatataattcacataccatacagttcacccttaaaatgtataattcagtagtttttaatgtattcacagagttgtgcaaccattaccacatccaattgtaggccccccccaaggaaagcctatacccattagcagtcactctccattttccccttaggccttccacaccccaatctctaggcaaccactaatctgttttttgtccatgtagatttgccaattctgggtattttatataggtgggataatgcaacatttgaccttttgtgactagcttttctcacttagtatgttttcaggttttgttcatgttgtagcttgtatcagtatttcatatatttttattaccaaataatctgttatatgaatataccacagtttatttatacagtaggccctccatatctgtggtttccttatccgtggattcagctaaccacgaatcgaaaatgtagttaggtgcacaatggttatggctgtactgaacatgtgcagactttttttcaggttattattccctaaacaatacagtataacatttttacataacatttacattgtattaggtattataattatctagagatgatttaaagtatacaggcggatgtgtgtgggttatatgcaaatactacactattttatatgcggaacctgagcatctttgcgtttaggtatgggggtggggtgcggtcctggaaccaattccttgtggatactgagggatgactgtacgtttgttatatgtgtcatagggtgactctctttaaccttttgaggaactgctgtttgccagagcagctgcgccattgtacatttccaccagcagcatatgagtgttccagtttctctacatcctcaacgccacttcttattgtctgtctttttgattgtagcctttctactgggtgtgaagtgatatctttttgtggtttggatttgcatttctctgatagctcatggtgttgagcatctttttgtgtgcttattggtcatttctgtatcttctttggagaaatttctattagatattatcctattctttaattgggttatttttcttttcatcattgaattaagttctttatatattcttaattcaagtttcttatcaggtatattatttgtaaatattttatctcattctgtgggttctctttttactttcttgatgacattctttgaagcacaaatgctttaaatatggataaagtctgtttttttctcttgctgcttgtacttggatgtcatatttaggaaatcttgcctaaactaagggcacaaagatttaccatgtttttttcctaagagttttatagattttgttcttaaatttaggcctrtgatccattttgagctaatttttgaatagggtattaggtcatcattcttttggatatggctgtccggttgtccagcacaatttgttgaaaagactattcattgcccattgaattttcctggcacccttgttgaaaataattttaccgtaaatgtacagtcaagcatcacttaacagtggggatacattctgagaaatgcattattaagtgtttttgttgttgttctgtgagcatcatagagtggacttacacaaacctcgatggtacagcctgctacacacttaggctacatggtatgacctattgctcatatgctacaaatctgtacagcatgttgctatactgaatactgtaggtagttataacaaagataagtatttgtgttcatctgtgtaggccacttaccacaaatggagcttgcaggactagaatttgctctaggtgagtcattgagcgaatgccttgtaattaactaatttcctatttggtacctttcccttctttttccttctggaatccatttactatttggggtcacttgctttcagcctaaagaacatcctttagtatttcttgtgtggtaggtctgctagcaatgaactctctcattttttgtttatctagggatatcttatttttggtcgtatataagattcttgactgccagtttatttttacactttaaatatgttgatagagttcggatgtttgttccagcctcccaatcccatgttgaaatttgatctccagtgttggaggtggggcctagtgggaattatttgggtcatggggacagatccatcatgaatggcttggtgcacaccccactgtaatgagttcacacaagacctrattgttaaaaaagagtatgggacccccttcttctccctgtcttgccacgtgacatgcctgctcccccttagccttctactatgattgaaagctctccgaagccctcagcagaagcagatgctggagccatgcttcatgtacagcctgcaggaccgtgtgccaaataaacctctttgctttataaatcacccagcttcaggtattcctttatggcagcacaaaatgaactaatacatgtgccatccactgctttctccattgtttgttgtaatgagccagcagttaatcatactggggttcccttacatgtgacaagtcatttttctttttctgccatatgaatttcctaggacttgcagttaccaccatctgagtggtttaaaacaacataaatttaatccctcacagttctagaagctagaagtctgaaatcaagatgtcagcagggccatgcctatgcccctctgaaggctctgaggggagttttttccatgcttttctcccagcttctcgtattgccagcaatccttggtgttctttggctggtagaggcatcactctagtctctgcctccagcagcacatgggtctttgcatgcctttagtattggattaaagtccyaccctaatccagtataaccttatcttaactaaatatgtctgtaggggctctattttcaaataaggtcacattctgaagctctgggacagacataaactttgtaggacagtatccaacctagtacatctgttttcaaaatcttatcttgtctttggtttgcgggatttctagaatgatgtgtctgtgtgcatctatttttgtttgtgtttatcctaattgcagttcattgaacttcttgaatatatacatttatatgttcatcaattctggggagttttcagccattatttctttgaatatattttgtattcctttctcttttctgatactcccagtgcagcatgcatgttgatgcacttattggtgtcctgtatttgtctgaggctctgtttagtttcctgcatttcctctgatctttgggttgcataagccctttcagtccaagtttgctgattctttagcctagttccaattgactgttgaatccctttgttgaatttttagtttcaactgtggtatttttcaactccagaattcaatttgtttctattttgtaatctctctttattatctatgtacttctttaagcatggtttcctttcgttctttgaacacttgccataacttttaatggcaaaaactgcaattgcttttgcaccaacctaatatttacagtggttgctttggtgtctttgttatatccaacacctgggacttcacacagacagtttttattgctttgttgttttttctgtttatgggtcacccatttctgtttctttgcatgtcttgtaatttgttgtagaaaactgggcattttaggtagtatattgtagcacttctggatactgtgccctcatcccaacccccaccttccccaacttgttttattttatttatttatttatttgtttagtgacttctctggtctactttagtgaagtgtttcctattccgtccccgccactccagtgtgaagctttaactgttgttccttggaggatgtagccttggccaaaccccctgggatgatggtgggtctaacaggctcatgctgacagtctctttccctgatttctctattaagcctgtgcagtatctcacccagctgttaggctgcagtggttgctagctaattgctttatttttcaacaatgctgtgggttttaaattgctcttcagcctgatccagttaaattctatccccttggcaggggtagattttgagaccagtctttgagatttgttctgaccccaggaggtttcttaagtgtcctctccttggttctctctgttaaacaagctggcctcggatttagctttttattctcatagatctattgccttctatttattgcttaccatctgcatctcccttgttcttgagagcacccttatatttgactttctctttcaaataaagtcaactccctttagggagagcttttgagtgcactgttttcagtacctctgtcccccaggaaaacctctgaaccactgccctggtgctggggtgggagcaacacctctgttttataatcagggtgctgtagcccctgattttttttccttgcccctcttggcatggaacttctcccttctaagcaagttggggcaaccgtgactggaatcctattattctcagccttccctgtctaggaagtactgctaagtggcccttcctgttgagataccatatcttttgagtggggttctcattttcttggccacacccagcacattccccactctaaactgtggggatggactcaagtgttgcagactcttgctgttcttacttaattttatattttctttctttcctcttttctcttcttttttcttttcttttctttctttcctttccttcctttccttcctttctttctccctttctctctctcttttctttcttttcttttccctccctccctccctccctccctctctccctcccttccttccttcctttcttttctttcttttctttcttttctttcctcactttgtcacccaggctggagtgcagtggcatgatcttgggtcactgcaacctccacctcctgatttcaagcgattctcctgtctcaccctcccaagtagctgggattacaggtgtgctccaccatgcccagctaatttttgtatttttagtagaggtggggtttcaccatgttggccaggctggtcttgaactcctgacctcaggctatctgtccacctcagcctcccaaagtgaattttatattttcttgaatacatgttacttcatttgctgtacgtgcttagcacaatttccagagacttttaatggttatttaaaaaaataatttggaccacttatggttgtttccttggggaacaggtctgtggagcactttacactgcaattctacaagaaatgatttatatatgaccttgatgttgaaatgactagtacacaggttgttttgttcttttacccatcacctaggctgtagtactgtgcatccctaaaatattattgtcactcctgaatcgatattagactgttaccccatataatctctctgttcttctggaagttatagaagtctcttgcctttttgagatggcttacataactctcgctgtgagcagactctgaagtctgttaatacttgtatgtccctcttttgaggttatttctattgcatcaaaaaggtatatgcatttgagcatgaatttggaaataagtgtctcaagtagcatagaaaagttaatttttttaatgttttgttgccatgttgtcagattgatcacaaatctgatagtctacttttcttagtttgttttgtgccgctgtaacagattaccacagactgggtaatttataagtagaaaggtattggcttatgatctggaggctggcaagtgcaatatcaaggggcattcttgctgcgtcatcccgtggcagaagggcagagagtggatgagagagacaaaggggacctaactcattcttttacacataacccactgccgcaataatgacgtaaattcattcatgagggtggggccctcatagcccaataacttctcattaggcctcacctcccaatactgttgcattgggaattaagtttccagcacatgmttttgggggtacacattcaaacccatagcattctggctgccgtctctagaatttatgtccttcttacatgcaaaatgtatttatttcatcccaatagcccagcattttaacttgttccagcaccaactcgaaagtccaaagtctcatctaaacatcatttgggaaaaattcaagacacgattcatcctaaggcaaattccccttcagctatgggcctgtgaaatcaaaacaagttatctacttgtaaaatacaatggtggaacaggcgtgggataaacattcccattccaaaagagagaaataggaaagaacagggtaactggtcccaagtaagtccaaaacccaacagggcaaacaagatcaaatcgtaatgctccagataatctttcttgactccatggcctgagtcctgggtacgctggggtgggggttggacctccaaggcctctgggagccccagccttgtggctttgttggtctcagtccacctggctgctctcgcgagttggagttctgtgcctgtaacttccttaggctggtgttacatgctggtagctttacagttccggagtctttgtggcagctgtatcaccgcaatgagtctctgcctaccccccgccacctcccaccctgtcccgggctatttgtgacatcctttgaaatctagttggaagaagccatgttctcatggctcttgcattctgcacacttgcagaattagagcaccacgtggacaccaccaaggtttacagcctatatcttccggagcggtagcttgagctgcacctggactggccggagccacagctgtgctggctgaggaatgctaaggggagcagagacttgtggcagcacagggcaatgaatggtgacctcgagcacctctctggaaacgttggcctcaaggtctcagcttgcctggaggatttctgaaatgccttcagggtcattctcccattgtcttaagggacagaacctggcttccttctaaccatactactctgtgtatcaaagggtcaattgtctgcactcttgcacactttttcattctttatatggtaaggctggggacttaaaaaattttttttgttctgtttcccttttagttatacaatctgtctttaaatcatttttctcttcccttgttttactctatgtagttaaaagaagccatgcaattcttttaatattttgcttagaaatttcttccaccagatgtcctagctcatggcttgtaaattttgccttcataaagccagaggacacagacacatttcagccaagttctttgccactttgtaataaggatagccttcactccagtttccagtggtatgttcctcatttccatctgagacctcatcagaatggcctttactgtccatatttccacaattgttctgatcacaaccatgttacaggtaatctctaagaagttctagacttcccccacagctcttctcttctgaggcctcaccactgtttctttaacactccattcacagaagtctaggctttttctagcatgcacctccagattcttccagcctctactcattacctagttccaaagctttttccacattttcaggtgtttgtataagcatcatcccacttctctggtacccattttctgtcctagtcctttttgtgctgctatgacagagtacctaagactgggtaatttataacaaatttattggctcatggttctggaggctggggagtccaagatcaaggggttgtgacctggtgagggtcttcttgctatgtcatcacgtagtggatgggtaaagagagggcaagagagagaccaaagggactgaactcgtgcttctatgtggaacacacttccacgataacacactcactcctctgataatggcattaatccatttacttcacctcatggcctaatcaccccaccttttaacactgttgcactggggattaaattaccaaaatgtgcttttggtggacacgttaaaagcacagcagcactgttacaggaatgctgcaaaatcttgccatgaattttattatgtgcacatggaatgatcttcctgtcgatgctgagtattatagaatttattttgctttacacatcaccacagcaaacagacttagttttttttttcccctcatctgccatctcataggttaagcacatttctgaggcatttggcatgtgagtctggtatattgttgctataacttaaagccttttcagtaaattggtaagccttaggacagcttcaacagaaagaggagacttgctttgaaatacattttttgattttttgctaatttgctaagcatcatgagtttgactgctgaccttgaactagaccactttagctgcctattggcacccacaagagcgagcaagaaagcacactgagacaaacccctatactggaaagccatgcaaagccgtgtaagttctaatccatctcagtgtaagaggtcttacttcttttctcctgttctcttttgggtattagctccttgttattcaaagaatatccttgggtttggtgattagtgttcctgatagagctttgtaagtgctaagctttcaccaaatttgtttctatttgaaacacttgcctaatgggctaacattgattaggataaaaaattgcataaccatccagctatattatataaatcttaagtattttaggtagaaggaaattacttcagaaaaaaaaattccagtgcattttagtcaagctaaggtgcttccaacaattttacgtcagtactaagactagtgagatgttggagatgatcatgtgtaatttaatacgctgcatctctgatatctcagaactgtctgccaggtattttgggtgcagagataatgttagagtgccactgaacattttgttttcagaaatatttgcatatagagaaacagttatgttaaaaggggttacatttctttttaaaagttgcaagtttttaaatgtaaaaatcatggaaaacttggaaaaaatgcaataacgtgaagataaaatgaaatctcatcccgtgagttaagctctagtggtgagtcaactttgaatttcaattatttttctggaaaatcgtttttcatagtcattgttcaggtatagcagtagaatgtgggagctcttaagatgaaacacgaaccagacaaattgacaggcagtagagagcgtgtaattagaaagactgtagctttagtgtgtcccagctagtgatctctgaggattttagtcaaagacgtaacttctctgggtgtcagtttcttatcttgaaggcaaaggggatttggaaaatggtgctgttggtaaagccaaatgaaagctatcgagcatgaggatgcctggtctcacccatcctgtcttaaccatttgatttgcatttcatcagagcatatgtaatatctatgtggtggttaagggatggttattcttgaggttggccttgttaactgaaaaaccaaactctaaaatattttagaggtgtattatgatccagtatgagtaactgcagccccaggaaacacaaaaccaagaagccttgagtaagtgtgcccgaggcaggcggattagtttagttttatacattttagagaggcagaagttacaaggaggtataaatcaatatatagggcttttacattggtttggcccaaaaagacaggctattttgaagtgggggctcacaggtataggcgggttaagagattctgtattttattttatttattttgagacagggtctctctctgtcacacaggctggagtgcagtggcacaattgccactcactgcagccttgacctccctggctttagagattttttactttgtaattggttaaaggagtaaatctttgtgtaaaactttggagtcagcagaaaggaatctaagttatgacaaggaagtctgttcaccaatacactgggtcagaatgacttggagggatgtgacttagctcctgtctggcacgaccctaggtcctgtttatgatctctgttttaatattaacgttggtcagttgtgtctaaattccaaaagagaaagtatagtgaggcatgtccaatctcctttcacatcactgctgggaactcagcttttcaggtttctctggggttccgtttggccaagagggggcccactcagttgggggacttaggatatttatttatttatgagacagagtctcgctctgtcacccaggctggagtgcagtggtgtgatctcaactcactgtaacctccacctcctaggttcaagtgattcttgtgcttcagccaccatagtagctgggattacaggcgtgtagctaatttttgtatttttagtagagacggggtttcaccatgctgcgcaggctagtcttgaacgcctggcgtcaaatgatccagccaccttggcttcccaaagtgttgggtacaggcatgagccactgcacccaacccaaatttcatttttagtttatagcctccccttacttctcctctgccatttttgatctttttcatccagatggcttcttttttttttttttttttttttttgagatggagtcttctctgtcacccaggctggagtgcagtggtacgatccactgcaacttccgcctcctgggttcaagtgagtcttctgccttagcctcccaactagctgggattacaggagtgtgccaccacgcccagctaattttttgtatttttagtagagacagggtttcaccatgttggcccgactggtcttgaactcctgatctcaagtgatccacctgtctcggcctcccaaagtgctgggattacaggcatgagctaccactccactcaaatccaggtggctttactctctcaccgtggtgaatacttcatcgtgtgtgagatttcatttattttaaacaggagtttcatggagaattacatgttttaaaaccatagacctaggagtttgtataccttttattttaggtagaaaggattgctgtcttcctattartwctttccgtttgaaacagaagggtgaaatgaatgagaattttggtgaagagaaggcagagtggagaacaggatacagcaggctagagaattgagttgtgcatggcacgtctgttttctgagcctattcttttcactcccaccgcctataaccttcccccagatgaaattccctttatcctcctccagttacaccatttaatttgaataaaatacctgtgttcaacttaaaagtatttttcaagcgcagttgacttttcacctttgcaggggtctaggttttgttattactgagttactgtcaagacccctcacagctgcctcatcgtgctctgtggctgggagtgtataccacactgggttcacatcaccattcagaaattaaccacacagtggacttaggcgtttagggctttagtctrcaaacagcatgtattgcttattaatttgttctcataaacaatttaaaagatatttgtttttcctgcagtttttgaatctaacttaaatattaagtttttttttcttggtagttcaccaaatctctgcattttgctaatcgttttttctataaagtaatttttaaagttctcagcagtaatattaaagccacgtgagctatgtccagcatcccatttgttataaaacaagaacctttgactaatgggaaattctcagtcagcaaagacattttgaaatttgtaactatgatttttctgtattcttccaagactggtagtttgaaattttaggctgcttaggagtttacagatagtatgacctctttgttctgcagtaagagtcaagatgctaccttaaaacctttgctgtcttccttccccgccttgctcctgagttttaagtcgtggctgcaccagagatgtctctccgtggagctggtcctcactgtgttctcatgtgctttttctgggaatgctctgcacacgctgtccggatgcagataacaggaggcgcagggttcgtgggctcccatctaactgacaaactcatgatggacggccacgaggtgaccgtggtggacaatttcttcacgggcaggaagagaaacgtggagcactggatcggacatgagaacttygagttgattaaccacgacgtggtggagcccctctacatcgagggtgagtgaaaactgcacattgttattattcagagctccgcaggtggccttgccagagctgcgggattcctgagggtaagctgtttgactcagcacattgaaagctatgttgggttttatttttgaaatgtctcaatatgtatgaggtgccgtcctagtctgtgtgataacgagtggttataacagtgtgaatagccgtcttctctcctacgtggcacccctggtcctgaacttcatggacctgttgaagtaactttcctgtagtacacatctgctgtggtctgaatgttggtgtcaccccaaattcatatgttggcatcccaagccccacagtgatggtattaggaggtggggcctttggaggtgatgagttcatggagacagagtcgtcacaaatgagattagtgtttttataaaagaggcctgggaaaaccccgttggcctttccaccgtgtgaggacgtggcgagaagatgcatatatgaaccaggaagcaggtcctcaccagcacccaatctgccaaccccttgatcttgctaatttgatagaaaaccattggttcaatgtacatttctttggttactaaatatggttagaatttaacatgttaattcaccagagaaataccaatggttttgttagtccattttaaaaatattcttttagtatgagttctttgtaataggaatgttaactgttgggcttgtatttagcatttttcccacaaaggcaaaaagtttttgccttttcgtttgagtgacattttataacatagtttcatctgttcatattcttcttgctgtttcttctgttctctttctgctctaaccgttccaagatgagatgaatatttaatctaatatttagaaagcagccatggtgttaattttgttggttggttttttgcttcatttttaaacgtttaattatgtaatctgtttaggattcattttggagtgaagctgtagtttttgtaaagtataacaggctatgtagattatagctcagtgggctcactttcctcttggatttcctcctgggattgctgtggggttaactgaggtcatacatgtgacagggcctggcaagcagattctcacagttccctgctaagatgccctttcccattgttcaacccaagatgctaggtggtgctgtcacaggactttgctgatagaatcaaggttatgaaccagctggctttaaaatgaggatgatcctggattatctgggtgtgcccccacatagtcacatgaaccgtcaaaggcagcaacagagaatggaagagtcaggtagagagactgggtagaagagataccgcggggagaccaggcagaagggaagctggagaggtttgcagtgtgcaagggacctgacctaccctggctggctttgaaggagccatgtgcgggagagtgttggcagcctctggaagctgagaatggctccctgctgagagcctgtaaggagacctcagtcctgcagcctcagggaactgaattttgctgtcatcctgaatcatcctctgaagaaaggaacacagccctgctgacaccttgatttctgcctgggggcaggcagagctgagaaccagctgagccatactgtgcccggtcctgtagacctgtcagatcggatcgtgaatggatattttttgagcctctaaatttgattaggcagcaatagaaaactactgtgaggacttagcacagcactgggccctcatttcactaagtgctgcccaaattataccttttttttttttttttttttttttttttttgagacggagtctctctctgttgcccaggctggagtgcagtggcacgatctcagctcattgcaagctctgcctcccgggttcacgccattctcctgcctcagcctcctgagtagctgggactacaggcacttgccaccatgctgggctgattttttgtattttttagtagagacggggtttcaccctgttagccaggatggtctccatctcctgccctcatgatccgcccaccttgacctcccccaaatgatacctattaatattactactctcttctcttttttagcacatggcaagaaacatttattttatgacactaytgtttatataatttcagtaccactgagaagccagaacttagtaaaaatggtgttttaataagtaaattatcttctttaactgcgagctttgataccaaagctgctctaggccatttctgccaattctgtgactgtgtgtaggacacacacacacacacacacacatacatgcaaacacacacacccacacacccacacattgaatgaagtcatacaataaatgactggtgctttgtcctttgctcagagtattgcgttccctcagttggcatttatgttgggagagcataagatgcttctctgcctctgtggtttgaagcctgtttttcactttctccttcagcgggtcctcaaccttggcatcaggtcttctgtgcccttgataatttcccccttgctgccctccatctcttcactctttctgccctcacaatgcccacttcatccaacaatgccagaatgcaccttcctttgaagcccacatggaacattctccaagactgatcatattctcagccataaaagacacctcagccaacctgaaagaatagagtgctataaagtgtcctctcagaccagagtggaattacactagaaattagtaacagaaagatatctggaaaattacaaaaatatttagtgatgaaacaacaaacttctacataagatatgagacaaaggaaaaatctcaagagagattaaacatactttgaactaaatgaaagaattaggtttcttgtttatatatttgataaagaatgagatggaagagaatctgaaatatttttctcttttcaaaagaaacttttttcctgatgatgaaaataatacatacatgttaaagaaaatatagaaaggtattttacaaagcaaatagaaaattatttttaatctttctataaactgttgaggaagytggctgggcacggtggmtcacacctataatcccagcactttgggaggccaaggagggtggatcatttgagctcaggagtttcagtccagcctgggcaacgcggtgaaacccagtctctaccaaaaatacaaaaagttagctgggcatgcttgtgcatgtctgtggtcgcagctattcaggaggctgaggcatgagaatcgctagaacccagaatgtggaggttgcagtgagccaagatagtgccgttgcactccagcctgggtgacagaataagacctcatctcaaaaaaaaaaaccaaaaaaaaaacactgaagctaacatccagttgttttcctaaatgtgattttttttccaattaaaaacatgcttaataggtaatatggttatatggttcaattattttaaaaaataaatggaaaagatggccgggcacagtggatcatgtctgtaatcccagtactttgggaggctgaggcaggcagatcgcttgagcctaggagttccagaccagcctgggcaacatggcgaaaccctgtctctacaaaaattacccaggcatggtgrcatgcacctgtggtcccagctacccaggaggctgaggtgggaggattacttgagcccaggaagttgaggctgcagtgagccatgactgcaccgcactccagcctgggtgacagagtaagaccctgtctcaaaaataaataaataaacataaaaatggaaaagataaaactgtaaagttaaagtcttcctcttgccagttctcagctctcctcaggaaacagctgttgatcctttctttgtattcatctgcagtgtttgtatgtgacccagctaacacaaataggtatttatagttctccctttttatataacctattatgtattgtcctgaatcttattttcttccacttactgtgtcctggtgatctttctatatcatatatagagaccttttttggcagctgcttagtgttccattttgtggctatactagctagatctctttaccaagacacgggttttcccttcagcattacttgttagcaagtcgtcttcttatgaatatgttgtaatttccttagtcctgtgttgttggatctttaggttgattgcagtttggggccatcataaaccatgcttcagaaagccacacatctgtgtctctgtcatcattttcatggtacactggctttcccagggtcctgctacagagcacctgtgcttccctgaaatgctgtcccaatttacttttccaccgtctgtataaacagggatcttgagaccagcttttccatggggaacaggaaaaggcagaaatgtgcattgtgtcgtgggaagaccagtaccgggaacttgtagtatctctgttgaagaggtccaggaaaataaaagaagaaagtgaccatagctaacacttaactatattccaaatgctattctaatcgctgtttatggttggcaagtttaattatgtcaatacccgtgcgaagtaggcagctattttcttcattttataggtgaggaaaccaaggcatggagccctttccattacctgccttttacctggatgctcagttgctatggagggccgggggtgggggcaccaggagagggaagatgggagagccaagccatcaaccctgggcacccaccctaaagaggaggggtggaaacagtgtttgccaaggggattgagtccatgtttatgtagacatttaaagcatgcagctctgattagaatatttttgttgaagtatcatttagaaatttttttctcagctttcagtttatattgcaaatgtaaataaaactgcagtggtggctcttagagatcgccctctgtttaatttggagctgttggaggcttcctatggagcagcctaggacactgaaaattctttcccctgcggtggcttcacagggaaggtgagcccctcgctcagaacagtcgacagcactggcgggcaaccccagctcccgggggctgagccagtctctagtgtgtgcagcctttgccctaagtaaatacatttgacatgaaatgaagggaaaatcttgctgttctgcttctttgtgccgagagaaatttggtctttatactttgagaagttctgtatcttcttcattcctgttttccatcctaaatactggttctagagacaaagactagggccatgctgtgagacttcacattgcagagagggacatctcgttggggagtatttctgtaagacctctgactcaagtgtagaaaaagagaattctactgtaagtatcttttatgatgggaatttagtatgtgctaaataatcgcgtgagttatcacagaaagaactaacccactgttttgcgttttagtgtttctatagtctttagtttcatggtacaaatcctgaactggtccttggcagtttcatacagcatgggtgtggcacagaatgaggcttgacacagactatgtcactaacttaagacaaaattaaaaaagaaaatcaacaaaggagtggaagctacagtcagtttttatgtggatttcccctttggtagaagaaaatgtcgatttctccgatgtgttctgaacagtggtttcaggttatcccgagttgttctcctcctatggtgatttttttcttccctatgtatgtgtcatttatgtgggttttgggcacagtgaaattcaacctaagaccctttagggagttcatttgtggtttgactggttgagtttccccagtcaggattcatagaagggccgagtaagtcgcagctgtgccctcacccagccacttcccaacataagattaccctgcatgctctctggtaggaatgctgctgatcattaattggagctcttttaggctcatttcttgagacttctatttttctagctgagctcccagcacgtggccttgtaaatgtgaaaggtcstggcagggtctctagcggtctctggagcaactgtgggcacccatgaatgggctgcctttctgtccccctttgacttcctctccccacctcagcttggattttggaacgtcaggctcatgcttggtgtactctgaactgtgcagttgacatgttcccagggcctttgtcctgggctgtgagggttaaccttgctgctttatttatattccgaagccggttgttattaatgttacttactgtttacctagcacctctcattgctggttatttgtccctgctctgaatttcccctcttctctccccttcagaatttctcaccagattatttaaccaacagactctgctgcagtgccctttttaggataggaactggagttattgttaatgttacaggaagaacacattctcaaaggagaggggggtggtgggaaactttgattttcatagggttttcagtttcctctcaaatgggaggatgcagcagtgccgctacttaactgaacgtctcgacagtctgatggggcggccctcagccttccggagcagcagtgggactgacctgtccagtgaggaagaaacactgaaccagatggaatggcctttggggatggaaaaaccccagtttacgctcatctcttctctcagctaacttttgtggagccctgttcccaaactggcctgggccagagcaccgtggaggggtatttgttgtaaatggaaggtttccaggcccgcctggaaatcctgaagggtgagacctgcagtgggctcaggagtctgcatttgtgggtgaccgagggggcctcccctccctctagagtccacactgtggagagcatcaggaagggaarggcctgcatcttgtgctcagtgagctcatcgtctagtgaggaaggcatgtgtgaatctctggacaaggcagcgctgagctgttgtggactagtggtgcaggcaagggattayttctgaccaaggatrgtgagaaggtttcccatacagactgaygtctggattgagctttgaagaagaaagccaggactggagcagacgacgaggagggaagagtgtgaggttaatgatagtggctttctgtttgatgtcggagaggcttcctgtactctcaaggcacacttcttccctcttagcctttaatgcagtttcctgtctttccctgcataccttgtcacctcaagagtaaagataatgatgaataatttgttgtgtaagatcacagcccatacagagttgtttatactctctttgaggaatgtagggtgaccctgtctgtgtaagcagaaatgcccgtgagtataagtcaggtggcagcaggctccaggtctagcacacctgagcrggctctgtggtgtcgtactcggctctgaaggtctggccaggttcattttttaaaattttaattttaatttttaaattttatttatttttttgagacggagttttgctcttgttgtccatgctgcggtgcaatggtgccatcttggttcactgcaacctctgcctcccaggttcaagtgattctcctgcctcaccttcccaagtagctgggattacaggtgcctgccaccacacctagctatttttttttttttatatttttagtagagacgggtttcaccatgttggccaggctggattcgaactcctgacctcaggtgatccacccacctcggcctcccaaagtgctaggattacaggtgtgagccattgtgcctggccctcatttggttttcaacttggcacagtcctgctccaaagtggcagtgggtatgaggaggaatcttcagaggaggcagcacagtgcctgtttctggggctaatggtctgctgcttctacctgcagccctggagcttggaagtaggtgtagcaggaactgacccggtctgtgctgatcctagctggaaactgcaaaagatagcttggccttagaattatgggactttgtgagaactgatttttaaaaggtatcttgttaaattacaatttgtataatacaatattagtttgtcttttatttttagctgtttttcagctcagaataacttgtgggggtgggaacagcagtcgcaggatttccttttacttggacagatcctctcagcgaacttgcattttgacagaccatcaataattttaaagattttgtgttttgttagttctctttacaaaaagattattcttcccataagcattggttctatttctaaattaactcactggttttcagacttggctttctttttttttttttttttttttgtgtgtgttcttgacttctccattctttttttttttctttttttattattattattatactttaagttttagggtacatgtgcacattgtgcaggttagttacatatgtatacatgtgccatgctggtgcgctgcacccactaacgtgtcatctagcattaggtatatctcccaatgctatccctcccccctcccccgaccccaccacagtccccagagtgtgatattccccttcctgtgtccatgtgatctcattgttcaattcccacctatgagtgagaatatgcggtgtttggttttttgttcttgcgatagtttactgagaatgatggtttccaatttcatccatgtccctacaaaggacatgaactcatcattttttatggctgcatagtattccatggtgtatatgtgccacattttcttaatccagtctatcattgttggacatttgggttggttccaagtctttgctattgtgaataatgccgcaataaacatacgtgtgcatgtgtctttatagcagcatgatttatagtcatttgggtatatacccagtaatgggatggctgggtcaaatggtgtttctagttctagatccctgaggaatcgccacactgacttccaccatggttgaactagtttacagtcccaccaacagtgtaaaagtgttcctatttctccacatcctctccagcacctgttgtttcctgactttttaatgattgccattctaactggtgtgagatgatatctcatagtggttttgatttgcatttctctgatggccagtgatgatgagcattttttcatgtgttttttggctgcataaatgtcttcttttgagaagtgtctgttcatgtccttcgcccactttttgatggggttgtttgtttttttcttgtaaatttgtttgagttcactgtagattctggatattagccctttgtcagatgagtaggttgcgaaaattttctcccatgttgtaagttgcctgttcactctgatggtagtttcttttgctgtgcagaagctctttagtttaattagatcccatttgtcaattttggcttttgttgccattgcttttggtgttttggacatgaagtccttgcccacgcctatgtcctgaatggtaatgcctaggttttcttctagggtttttatggttttaggtctaacgtttaaatctttaatccatcttgaattgatttttgtataaggtgtaaggaagggatccagtttcagctttctacatatggctagccagttttcccagcaccatttattaaatagggaatcctttccccattgcttgtttttctcaggtttgtcaaagatcagatagttgtagatatgcggcattatttctgagggctctgttctgttccattgatctatatctctgttttggtaccagtaccatgctgttttggttactgtagccttgtagtatagtttgaagtcaggtagtgtgatgcctccagctttgttcttttggcttaggattgacttggcgatgtgggctcttttttggttccatatgaactttaaagtagttttttccaattctgtgaagaaagtcattggtagcttgatggggatggcattgaatctgtaaattaccttgggcagtatggccattttcacgatattgattcttcctacccatgagcatggaatgttcttccatttgtttgtgtcctcttttatttccttgagcagtggtttgtagttctccttgaagaggtccttcacatcccttgtaagttggattcctaggtattttattctctttgaagcaattgtgaatgggagttcactcatgatttggctctctgtttgtctgttgttggtgtataagaatgcttgtgatttttgtacattgattttgtatcctgagactttgctgaagttgcttatcagcttaaggagattttgggctgagacgatggggttttctagataaacaatcatgtcgtctgcaaacagggacaatttgacttcctcttttcctaattgaataccctttatttccttctcctgcctgattgccctggccagaacttccaacactatgttgaataggagcggtgagagagggcatccctgtcttgtgccagttttcaaagggaatgcttccagtttttgcccattcagtatgatattggctgtgggtttgtcatagatagctcttattattttgaaatacgtcccatcaatacctaatttaatgagagtttttagcatgaagggttgttgaattttgtcaaaggctttttctgcatctattgagataatcatgtggtttttgtctttggctctgtttatatgctggattacatttattgatttgcgtatattgaaccagccttgcatcgcagggatgaagcccacttgatcatggtggataagctttttgatgtgctgctggattcggtttgccagtattttattgaggatttttgcatcaatgttcatcaaggatattggtctaaaattctcttttttggttgtgtctctgcccggctttggtatcagaatgatgctggcctcataaaatgagttagggaggattccctctttttctattgattggaatagtttcagaaggaatggtaccagttcctccttgtacctctggtagaattcagctgtgaatccatctggtcctggactctttttggttggtaaactattgattattgccacaatttcagaacctgttattggtctattcagagattcaacttcttcctggtttagtcttgggagagtgtatgtgtcgaggaatgtatccatttcttctagattttctagtttatttgcgtagaggtgtttgtagtattctctgatggtagtttgtatttctgtgggatcggtggtgatatcccctttatcattttttattgtgtctatttgattcttctctctttttttctttattagtcttgctagcggtctatcaattttgttgatcctttcaaaaaaaccagctcctggattcattgattttttgaagggttttttgtgtctctatttccttcagttctgctctgattttagttatttcttgccttctgctagcttttgaatatgtttgctcttgcttttctagttcttttaattgtgatgttagggtgtcaattttggatctttcctgctttctcttgtaggcatttagtgctataaatttccctctacacactgctttgaatgcgtcccagagattctggtatgtggtgtctttgttctcgttggtttcaaagaacatctttatttctgccttcatttcgttatgtacccagtagtcattcaggagcaggttgttcagtttccatgtagttgagcggctttgagtgagattcttaatcctgagttctagtttgattgcactgtggtctgagagatagtttgttataatttctgttcttttacatttgctgaggagagctttacttccaactatgtggtcaattttggaataggtgtggtgtggtgctgaaaaaaatgtatattctgttgatttggggtggagagttctgtagatgtctattaggtccgcttggtgcagagctgagttcaattcctgggtatccttgttgactttctgtctcgttgatctgtctaatgttgacagtggggtgttaaagtctcccattattaatgtgtgggagtctaagtctctttgtaggtcactcaggacttgctttatgaatctgggtgctcctgtattgggtgcataaatatttaggatagttagctcctcttgttgaattgatccctttaccattatgtaatggccttctttgtctcttttgatctttgttggtttaaagtctgttttatcagagactaggattgcaacccctgcctttttttgttttccattggcttggtagatcttcctccatccttttattttgagcctatgtgtgtctctgcacgtgagatgggtttcctgaatacagcacactgatgggtcttgactctttatccaacttgccagtctgtgtcttttaattggagcatttagtccatttatatttaaagttaatattgttatgtgtgaatttgatcctgtcattatgatgttagctggtgattttgctcgttagttgatgcagtttcttcctagtctcgatggtctttacattttggcatgattttgcagcggctggtaccggttgttcctttccatgtttagcacttccttcaggagctcttttagggcaggcctggtggtgacaaaatctctcagcatttgcttgtctataaagtattttatttctccttcacttatgaagcttagtttggctggatatgaaattctgggttgaaaattcttttctttaagaatgttgaatattggcccccactctcttctggcttgtagggtttctgccgagagatccgctgttagtctgatgggctttcctttgagggtaacccgacctttctctctggctgcccttaatattttttccttcatttcaactttggtgaatctgacaattatgtgtcttggagttgctcttctcgaggagaatctttgtggcgttctctgtatttcctgaatctgaacgttggcctgccttgctagattggggaagttctcctggataatatcctgcagagtgttttccaacttggttccattctccacatcactttcaggtacaccaatcagacgtagatttggtcttttcacatagtcccatatttcttggaggctttgctcatttctttttattcttttttctctaaacttcccttctcgcttcatttcattcatttcatcttccattgctgataccctttcttccagttgatcgcatcggctcctgaggcttctgcattcttcacgtagttctcgagccttggttttcagctccatcagctcctttaagcacttctctgtattggttattctagttatacattcttctaaatttttttcaaagttttcaacttctttgcctttggtttgaatgtcctcccgtagctcagagtaatttgatcgtctgaagccttcttctctcagctcgtcaaaatcattctccatccagctttgttccgttgctggtgaggaactgcgttcctttggaggaggagaggcgctctgcgttttagagtttccagtttttctgttctgttttttccccatctttgtggttttatctacttttggtctttgatgatggtgatgtacagatgggttttcggtgtagatgtcctttctggttgttagttttccttctaacagacaggaccctcagctgcaggtctgttggaataccctgccgtgtgaggtgtcagtgtgcccctgctggggggtgcctcccagttaggctgctcgggggtcaggggtcagggacccacttgaggaggcagtctgcccgttctcagatctccagctgcgtgctgggagaaccactgctctcttcaaagctgtcagacagggacacttaagtctgcagaggttactgctgtctttttgtttgtctgtgccctgcccccagaggtggagcctacagaggcaggcaggcctccttgagctgtggtgggctccacccagttcgagcttcccggctgctttgtttacctaagcaagcctgggcaatggcggccgcccctcccccagcctcgttgccgccttgcagtttgatctcagactgctgtgctagcaatcagcgagattccatgggcgtaggaccctctcagccaggtgtgggatatagtctcgtggtgcgccgttttttaagccggtctgaaaagcgcaatattcgggtgggagtgacccgattttccaggtgcgtccgtcacccctttctttgactcggaaagggaactccctgaccccttgcgcttcccaggtgaggcaatgcctcgccctgcttcggctcgcgcacggtgcgcgcacacactggcctgcgcccactgtctggcactccctagtgagatgaacccggaacctcagatggaaatgcagaaatcacccgtcttctgcgtcgctcacgctgggagctgtagactggagctgttcctattcggccatcttggctcctcccccccagacttggctttcaaatgttaaaaaaaatatatatatatgaatgaaggtctagagtctcccagcctgcttcagggtgttggggacccaggcatcacctcactgggtgactagtgcacagtcaggattgattgagaacctccagactgacctgctgtggctcaaggcttgatcttcagctcttccattcccggcactgggaaaggaaagacagcagcagttccctggtcaggggagcccggaaggcccgggcagaggggcccctgcaggtattcttacacatccatgtgcaagggaggactcattttggcagcagagctttcagatccctgttcttcastcctgtggatggtggatgtgtttcctcaccattggctaaaagtagaatggcatgacatggactttgtctggaaggatggcattcctcctgtgtgtgtgtgtctgttgctgccattccacagggagaggttggtccccgaggacttctctgctatgtgcagatgttacctgacttggttctgtgctggaacgctgtgggtagtgacgttaaagtgaatgcctttccaggaggggcaggggttgcatggaatctgaattgctttgccattcatggctttaaaaacctccctccctccctcgccatggtctcagggtctggttttatgtatacaggatgcataaaaacaaacgagaggctactttctcccatagttctgtgtctttggtttaagtcatatttgcctcacaaactaaaaaaaaaaaaaattcatgattaattctgtgtctgaaaaaaatcagtcttccttctgatttgaatgctctatctgggacaaatatttcagaaaacaatcaactcagtaatcgaattgactctggttacacgagaacagactcagctgacccagcacatgtttttgtttccaaataattagactttctatttttgtttaacattttcctaattacaaatgtaaattagtttatatgaagaataaaataacttgatttcagtgaaagatatactaatacgtttattatacagtatatatcctaggaggtcagtatttttttggtgcttttttgaagtaataggcttctgttttgtctcctttagttgaccagatataccatctggcatctccagcctcccctccaaactacatgtataatcctatcaagacattaaagaccaatacgattgggacattaaacatgttgggtaagttgtcattttcttgtttttttggctgttgctgggaatattttagatgattacaagcayaggtcattgaatcttctactagagtttgatctgagtgtgttccctcgtcccttattgccctgcttgtggtatttggcagttttgcagtgttatttcagtgtgacttttatttgtcatcagagtatgtcatggaggagatggtctaacttaacttttcatgcattgtagtaatcaggctgcagcaccctggtgcagatcccctgggagtgaccacaggcgcttcatgtgaccaaccacccagcctgcccccctcccctcctctgaaaccagttgatgaatgctgaggataagtggcatgcctcatgctggaaagaggcagtggtggctctgatccccaggttgggttgacatggccttacacacgggggtgattcagtagcactccttgaaggaatggatggagacatctgtatggggtgttatcaagactgagtacctgccctagattggacttcagggttcgcattagtaaaagatggacgagagagcattgttaatggtggtcatatgtgtatattcacaaatgacatgccttagatttatagcagtgggtaatgtgcacatattaatgtttaaaattagaggcatgcttaaatttggcacagttttttcaaaaaactccaggggttttgattatttgcaaagtggaagaaaggaaccacttttaaaaatggcaagtaaatgatggatttaagtataggaacatttaatacaggttctgcaaatagacttgggacatacagcactaaattttaatttgaacaaagcgtggagtcgagaatgaaaggacagccagagattggtttatctcttagatgcaatattttagggggtggtactagtcaaggttctacagaagaacagaaccaataggatgtgtagagatttagagaaagagatttgttacgagagattggctcacatgattatggaggtcaagaagtcccaccgtctgccttctgcaagcaagaaagagaaccaagaaagccaggggtgtagttccaaggcctgagaaccagagarccgagggcagatcgatgttctgtgtaagcagttgaccttcctccatctttgtgttctagtcaagcctgtaagggactggatgatacatccacgttggggagggccatgtgttctacgcagtctacacattcaaattatcctctcttccggaaacaccttcacagatacccccggacataatgttcaaccagatacctgggcatcctgtggcctaagttgacacataaaatgaaccatcacaggggacaggttgtttggagtaagatgattcattcttcctatctggaaagagctttatcttctttgttaccgtctcctgctctggtcaccagacagaacagggtgctgctgcttctgcttagaggtgtgcgtgatgccctcttcttgccatcacaagcgcctacccctcctacactctctctgtcccgcccccctccatcrtaccagaactagaccatagaggaaaagatcatgcacttggtgtttagggagattccgtttattcttcctactcgggggatgcagtcactgtgcccgtgggtcctgtcactggggcagattcagatggggttaccctcaggctcttctgcacttggtgccctatgggggttgggggctgctgaacgggcacaagcgtcgatgatacctagtaggaaaggaaagtctcccaaagagaggcctcagcaaagtgctgttagagttaaaggcaaaartgactcgagctagggcttgagctatgactgagattgaatgtggaggccttgcaggaatggtaaagagtcttccaggagagatacaaaaggcaaagggagaccattggtaggctggaaagaaacccaaattggactttgtattctgaaccgagaggcgctgtcattagccatcttgcacttgagacaagatgccatgaactttgcctggctttttcctggtgaggccctttcctctatgtaacttgcccacctcccagaccctgtgctagagttctttctctgatgaaagtttttcgtaacccccagacactacagcagcaggatagctcccttggcttcactccctgacagttgtctctgtagatcctgcgtgagtcattccatgaaagtgctacagaaatagtcttagtttcaaaatctttaaactcagttgtttttgaaatataacacattgcatttgtgatgtgtgtttgtgaccaaagttcagagaaaactataaactagaaagaactcaggtaggggggaatataaaatgtatagttactctggaaaacagtttgacgctttcttaaaaaactaagtatgcatctactgtaagactcagtaattgtattcttgggcatttctcccagagaaatgaaaatttatgttcacatgaaaacctgtgtgaatgttcatagcagctttacttgtagaggtcaaaaatgagaagcaaccagaatgtcctatcataggtgaatgattaacggcagtgcatacatatatccccgggaattctacacagcaatagattaggaaggaactttgatacacactgcagcttggatagattttgagggaaatatgctccatgaaaaaattcagtcctaagaggccgtgttccatttgtgtatcatccttgaaatgacacaattatagacatggagaattggttagtggttgccaggggtcagcaggtgggagggagcgaggagaggctgtagaagggccctgtgagggatcctggtggagatggaaatgctctatcacttttatcaatggaatgtccgtttcagtggaaatagtcactgatcatatcaatgtcaatgtcctgattgtggcacaatctagttttgcaaattttagcattgggggaatctgggtaaaagatacataaggtccctatactactttgtacaattgaatttgaatgtacaaatatctcaaaaaatttaatcaggaagaaaaagatctcagagtccttcattttgaagctactacattgtctgacacactgatacccctggctgctgcacgctagaatcctaccaccccacccagcctcacccagaagcgcacataggttgcatgtgcctggctcgtctcaccctcctagcagtgcttcgtgggcatgtgttggcccctgctgttggtgggggggcagagctgaggggtgtccagcacagcccccctctagtgtagtggcgattgggggtgggtatgtcgcctgtcttaagtacagggttagtgacggtcaggggggttcttggatcctgtagtgaaccactgtacactgggactctgtgaatgagtttggaagactttccatacttacttgaccaccatagataatgatgttctggtcagttacatgtgagtggtcagtccaggaaaggggttcagagcagaaytgaggaatgtgacagttgctttggaaaaggtgctgtgtaagctgaaccgcataggaggaagaagaatgagtggagagttacccagacagggtggcatgggcagttagaagagcccaggagatgttcaggaagtggcaagctgaccattgtggaagttaaggagaaaagggccttgccttctgccaaccaagggaaagttacccagtaaaatatggggtaatatttgggggcagaggagtcttcacgaaactcctcaaatcacactttatcaaactaacagattctgcgtttggccctgcttatracaagtattcaacaaaatactggccttctgagaatccatttatgtttttcttactgtatttgttttgtttattttggtgccaaagcagacgcagtaagggtagataattggatagataattaaatgtctttaatactaaaacattgcttaaattggccagcaaaaaatgtgcctgcacwtgtaaattcagtctcttttatcatgtcattgctttctrtagggctggcaaaacgagtcggtgcccgtctgctcctggcctccacatcggaggtgtatggaggtgagtaggaggctctctcaggagatgttcactccagcccttggactgttttcatcctgtctcagaagagtccagtgttcttttctgaggaggcccagcctgcccatgctcctcttgtgcacaggaggctacctgtcggcctcccgggtcgccaagctcctcttccttgtgggacagcctctcttgtttgatcacacatcactggaggtctgcaccctgtcacctggccagtaaagacccaccatttatgattccacagaagtgtttctgccattctgctctgaaaacaccccacaaatcacactatctttttacctgtttgtctagcacatgtcattcttctatgtgagtcatgcatgctgcatgcctgacctcccaagagctcatgggctggcctttaaagcttgctgggagaagagacatgcgctgactgcctcccctgttgtataacgagttctggaagaaccttaagcaggtagtgtcagaacacccacgagcttgttttaccaagctacagccttcctctccttcactgcctgagaaggagttgaggagtggggaccaggagctgtgttttcaatgtgtgttgatttctcttcagccccaaaccagctgggtgtgcaaggttcaggagaactgcttagctgatacagcggaagccaggttttagtatgatgtaatttttctattttacattattattgtggacaagagaaggaagtaagagggtaaaatcagaagagacttttttttaattaaggaaaccaaatgaaaaaaatcatagcaacagagaaattcttctaaatgcagtgatattctttgtaatctctatgaaaaggtagttcattgtctacttttttgaagtcctgggcagttattaataaaagagcagagtgtgtccctccctacctatggggtatggtatctgtccagaggggaacagtgacatctttcccacagccatcctgcttcccctactcatctcatttattatctgcatgtctgacaggagcctgtgttccttaggcttcctaaataattggagagtgtaatttatggaagtcaccaggtgctctcctctgaccttgaataaccaaagtaaacttttgtggagtatttgcttagtgtcttagcctcacagaatgctggaaaggggagatgattggaaattatttttgactctaggtctttacttttgtattaacaatgtaagctgtccctgttttwttccacggtgattttgtgaggggacttatttagaagcttggcatcctgggcatttcagtccagacggtgccagtccagggacagatgggcgtacccagccttttctttcttgtcctttgtcaaatttatgaccatcttttttggagggtagcttgcccagctcttgttaaagatccccagaaaaaggtctgggatcaatcatctggtacattctgtsaatttaagtcaatggttcctttctctcaggaagtattttccttagaacttttctctcactgagtagtgagaagtttgctctttgaaagggaattttaaaccacagcagcagatacatagacctttctttgcagcacacttctgcattgctgcggaggctgtgctgacccagagggatcggctgagcagacaagtggcaggatacctgtctgtttacctccctgcacctgctcaggcccactgagtcccaagtcagacttcaggggtaagataaacaagatgggaatttataacaatgcatctttttgtccagatttcgtggcaaagacttatacattttatatcatagttgtactcaagtatgtataaaattcttggtgtactaaataaattaggtgtatattcatattccagaaatatacttgtgtgaataaaagaatttgttacgtgttttcttccaatagtctcttcccctggtatgtcttaaagtgtgattgatttatacgctagagaaacaggaattgggagtgtaaaatgagggctagaagaacaggcacccatttgccaggggcaccccgtccctccacctgccctacaggagcctccacgttgacttgtcacgggtcccagatttgttctgctgatggcacatgtcaaagtcatcatgttccagagatgctgcgtttttcattttttttcaataaatacatgatttgctccagttatcaactttataaatataaaacaaaaccacatatctcttcacatagattctatttaattgtaatttgtgtagcactctgaaagttaagaacaatttacggaagagagggaagacttaaaattgggagacctgatctttttctttttttttttyccctgtaagtaaaatattgtcattgcttaatatcatatcctactggaactcaagagaatggactggaaacctgaggttgcctctttaatacatctctccatctctaaatgggtctttccgaagttcccttttgcatcataaatatgcattattgatatgaactggaaaaaggaaagatgaaaacagtctcacttttctcccatcgtagatcctgaagtccaccctcaaagtgaggattactggggccacgtgaatccaataggacctcgggcctgctacgatgaaggcaaacgtgttgcagagaccatgtgctatgcctacatgaagcaggtatttcaccagggtctaggcttgcggtttaggcgtgctgagcaccctgacctcagatgtaaagtgttgtaaaggaatgaatgccatgactgattttgtctggggataggtgtttgggaagctcagtttcccagtattataaattaatggtattatcaacagctttttccatgtatctccttattttaaaaatgatttcctagagatcaattcttgggtttggaatactattttatggctatgaacagaatgcttcttcattgccagttgctcaccagcagctaagaagtacctcttttcctgaagcctccaaatcaatggatcttctttttttacttttctatcaattaagtataaaaatggatgcgttattgctgtaatttgaacctctttattgttattgatatttatttactgttatttcatgctttcttcattagtcattgttgtgctgatgatattttatgtgacagatttggtcacctgcatgttatagcagaaattgctcacagaccaagaggccgaggttgccacactggctgtgctgctgtgtgactccaagatttaagccgtcattctctcagttcttatctctgacacagggtttgtgaagcctgccctgcccatctcagggtggtgcaggagccaatgaactgtgcagagaaggtggaggcctgggcacaggatatcccattcatgttctcactgagtgtgtccttgggcttgggtctgaattttcacatcctcatgaaaatgccctctggtatagtgggacatgcaggtaaatcaacatggctgtgraacgttggtccaggacaggctgttggtagatgcagtgtctgtttctgggagcaaygctgtcaggcccagggcccagtctgcaggtgagcctggggaactgtcggctatgtgctctgtaggaggggcaagtgtcatcagcatggccagcatccaggagttttcctgactgtctgtctcaggccccggcagagccccagtcaagcatgtgccaagggccaggtctcctgttcctgaccttgggatgagagtttaatcgacttcccttcccgtggtaccacagaggacagggcaatgtaaagccaggtaggctctctgaggggtaggagagaatgtcgaggactctctttctcatcatgtgtttaatgaaatgccagcattaaagatgcataaattaaccttatgctattgtttatatttaaacttttctgctttatttcttggccagaagcagaactaattgccttctaagcgactttagtctgttggcttacattatccacttcctctatgaaatgccgatcagttttagtaggaacatactttcatcattttggggcccagaatatcttgactcaaaagtttcagatgatcttccagacacacaggaccactctgtgtgcatgggtacttaggagtactgactagagtgtcaggggtacatcattgcattttattctagaatgtgttccaggagtgatatgattctcaactgttttcttttgctttcagtcctatgattgtatttcttacctagtgaatttttatataggtaaagctggtggacaaatgggacattttgattgagcttttagttttcattaaatgattattcggctaatgtagttgataactttatgggtatacctattgccttaagtataagcttgcgataattatggtatttggcaataatagaagcagcacttcttgagcaccgactgtatgctaggtactgttctaggtatttggcaataatagaagcagcacttcttgagcaccgactgtatgctaggtactgttctaggggcctgggctccagccaggatctgcatttcacacaaatgctaacattggacccgttcgtgtcatctgtgcctgggggttccggaaggtagcacctagtaactctggaacatcagcatttaaattcctgctcacataggtctcgggagcttaatggcgtgggcagcgttgccctgaaaactgtgagtaatatacctgttagaagccccccgtgtggtcagctggttcctcctgctcaaggtagcatccctgacgtgaaccctgtcrggaaggtgtccctgtcactccgttggcatgatacgccttctatggagtcaccaggcatgtgccttccaccctggagtccctaacagacagttgcagaatggctgcaagagtcacttctgtggccaggttcacagtgtacttcacacaggggtgtcgtgggttcttcatgtgggaaccacgcttgctgctttccgtcacactgggaggcttgagaattggcccatggaagacaggtgcagcactttctaggaaggagagtgtggaacttgggctcttggccaacaggtcagtaaactgtagtttcattggggctcacactctacttagcacatgtgctgagggtttgcatctgcccaggtgagaaatggcaccgaggaaggcccacctctgggggcacgttgagggaggcatgtaagcaggtgtgatattgccaccctttcccacggaccctacccgttcccactgtgcagtcattatgtcagggaggaccgtgcccttgaccctaggggtcctggggccctgtccaattctggtggctgcgaggcagacaggaggaggttgtagtttcctgatgaggaaggaatgacgtgactaagagcagtgagcctgtgagggtcactgtggtattgcctgagctccaggaggcctgtgaagaaggtgcagtgtgttcttcccaccttccgtcccgttattcatgttgtaaatattgtgctcccttgtaggaagagccatgggtccaaggccacaagcccctctgggccctaaaattggtacctgaatactcattcccacttttttctgaatgggtgctgaggagggaggaaaatggtgcctttcctctctgcgcaaaggagcagacacctcacagctgagacaggtttcagttcctgctatggcaggatattttgccaggtatagaaaaataagacaatactgattaagcaagaaaaaagaaaaattgctatgcataatcccatctagagacaaacataagggggaaaaataaaataaaacaaacaccrctatataaagattgtgagagatataaaacgttgaaatgaagacgttgagatgattctttaacccaggattttgtgacagctggcagcaagggtgggtccaagcacctcctgccacattgggtctgccctctacctgtggcttgatctggggcaaatcactggacctctttggggcaacaactccaaagtgattgttattttctgggactatgactgtgttctgagcacagcggcctgcaggatgttgtgcctttctggatgtgtcactgtctggaggtgacattgtttgaggatgctctgcgtgcctgctgtgggtgttgcgagagagcaggaactgggggctggaatgcctgctgcgtgctcagcctctgttagggctcagtccgtttaatctcagttaattccccgcagccccctcaggtgggagtggtcagcccatctcacagatgggaggatgggctccaaaactggtttccaggtccctagcccataagtggggttggaaccttcagctggctacctgtggggcctgctcctccccacactccctggctgtccctgcaggctgaagcaggtaaagaagcgtgagtgagcaagaggagaccatgcagctccaagtccaaaggcgccaaggctcctttgcagctcgcacagttgtgggacagtgcccagaatgagtggttcatgcgcctgcagtagcatcacccctgcacctctcagctgggagattcagcaacaggagctgcactgtgaccttgtcagtttatagttctaaatgtgtgatcttttgagatagtttggggagaaaatttaaaactttgtktgttaggatttatgctatctggagacaaataaaatcaaggaggatgaaccaggtggaatagtacgtctggcatatttttaattcattattttaacamctttaattaattccttatacataataacatatcccccttaagtataaattgtgattttattgtcaagatcctatatagtatgtggatatgtcttactctgaataatatgtaaagattgaaaatataaacaagatagatgtaggaataatttttttatagaaaaatttctcttttcctaaggattctcttctgagtttctttaatgaatgaaatgtcctaatgtagtcaaaatagaattttactttccagaaaaatctaccacacaccccttagaaaaagagaagctccctggaattttttttcgtgggatggagtgagatggaggttgagatcaaagggcagagcctttcccgaatagttagaacttgccagggaggaattaaattgccgcctctgtgtgcatttggactcagtggcttgataaatgtgggggcctctcccgtaggctgcggtcagtgcttagtgtgcatttgagttcgccccctcatgagtctgactctgaggtctgtggcccacccactgggctggatctgcaaaacaagcctccattcataaaaccagcaaatggcagagtggaaagaaagcaaactcagaaatcacctagtctaatggccctgaaggtatggttttgttttagttcctggcatcaaagtacttttgaaaaagtcggagttggtatatatattctacctgagttggaaaaaaaaaaaaaagtaagcagccaaaccaggtgcagtgttccatggctaggactcacaccccaggaggcccgtcctgtcctctggacctgcccagtagcagcttggcttcctggccctgtgactcactgggtgcctgctggccacatcccaggtgtcccacctagacactggcagagtgatatccacccctcctggcctgctgcagagcaaacctcaggaaggtcagctgattgttgatgctgaagcaggagtgctgaggaagatggccaaacagatgcagacacacccctcctggacccccttcctcagccaacccctcgagtcaacttgaaccttttagcacctttgagaatcgtgcttcagcacagtgagctgtgcattctgcagtcgccttagttttatccacaggtagggagcagaacccatcgagatgtatgcatgacaggccctaggggagttagggggttcagccctcacagcctgactccgttgctttagggatgtgcatatacttctctgagagaagcgtcagagagagcctgggctgctgtaccttggtgcacttcctggcatttctccattccattccctacaggtgaatatgcccaggcacctccttcaggacctgctcccactatgcagggctctgttccaccttctatcaatagaaccttccgtcagcgaatatagtgatcacgttacagtgttcggtggcttgatatagcacagtaagtcatcacttaacaccatcagcaggttcttggaaactgctactttaagcagaaggacatagaacaaaatcagcagtaccacaggctaattgctataacaagagttaagttcccaggcatatttctggtcacaaaaacatcaccaaaattctaaataaagactaaaacacttctaatattaaggatttgaaataaatgtgagctatccacctaaggaagattaataaaagcaagataattattgacaggctctcaggtggccagagcctatcgcagcagctccaggttccaggcagcagcctgccctggacagtatgccaacctctcacagggcgtactcactcacactgggaccactggaacagcccacttgtctgacatgcacagctttgggatgtgagaggaraccagaatacctggagaaaacccacacagacgtggggagaggagaacatgccagctgcgtgcagacagtagccccagccaggaggtgattttttttctcatcagtattatcatgaaatgatattatttggggacctgttgtactctccactgaatggttgcattttaaaagaaattttgagggagaacccatgtgtcgtgagcagggcaaggtcagacataaccaggtccatgaacgtttgtgtctttccacaaggtcaggcttttattgatactatttccatcataaaatccatgtgctccatgcagtttcccagaaggaacttcttagtgttttccattcactcggtaatcagagctgtggtcacacaggctcaagccactccacagctcagtcagtactgcaaaccatacctagtagtgtacttaatatataaatgtttagattaagcagtccacatcaaacagagtaacatttaacatcaagagacacggggagaggaaaaggggttaatgaactagtccaaggacagtgacatggacaaagagagggtcctgggcttatctggacaggcagcatcatcttgcatggaagagcccttgatttgggcagtctttggcggcagatgctgggtgctgatcatgagtgacagcaagatggagtctgtcaagatggccatctcgagttgtagaagtcctgctcattaccgcccttgagtcctttggtgaggactgacagtaaagggttatgcccttaatctggttgggtgttgtctctgttgattatgcaaatatctggaccgtgttggctggatgccttttgaaatgtgaaatggagtcattttctaagataaaatcacttctgtcagaggtgctctgtacaccgtgtaatccctgctggtaacatttctgtccttgggagatatctggggagggaggaatccctgtaccttcattactcctcttgggtcacctcttgcctgtcaggcctgctgttagttggctccacrtctcaggacctgcatacccaagccctcacccctctctcagctgctacgaatgaggcaaggaggcgtttgatgccagttacactgttccagcctagttcgtgtttccaaagggcctttgggagcctcagcctgttccttgcaatcctagtgtccttgtggcaatgtttgtgagctattccacacgtggtcactgtcacttcaaagtaaattagtgtcatcagaaaactggggacagaggtcaagggcaattactgggttgagaaccatcccttggaggtagataataatgatggcagttttcaaaatagtttcagtgttttaacccctgtgttgtaggtggaatggatattattgtcctcatctcaaagattaggatcttaagtcttagaaactgaagtgacttccttgggataatgaatcccaggatgagacgaggccatccaggcattccagcctccaccctttgcaggtccctcagcatccatcctaagtttccattggttctatgttggtgcagctcaggcttgtaggagttgtcttgaccttcctgatgcttggagctgtccatgactcatgggccaccataggggacaaaaccacagagcataaagtgaaatccagccatgcctaggatgaatcagcagttagctttctgactgacagctttgtctatgctcaaaggcaccagctcagtgtcagcagggcctgaccactcgcaggcagaacattgtgtgggagtcaggggttcatgaatgtgtttgcttcttggtccttcagaggtgggctcttccttaaatgagacagcgttgcctggtgtgtacttcctgggttttcagcctggttcttcccttcttaggaaggtggctttgggtcagaccctggaccttgcctcagatctgagatgaggaatacctttctccaatccatgcatgtgggtggcaactgaactgccaccatcaacagtggtgtcagcatccatcgactgtccccctgcctgcccacatggtcccaccgtgaggaccagtgagaatgaggattcagcagcaagtggactatacatattgactgggggtcgcctttgtgtgaaggccaagggttccctgatgctacctagaaagggatagatgggcatacaaactccagaagacaccatcatcccagaggagagcagggcttaactggagtgagcctcgggttcctgtctatttcatgtaaggagtttaggcttcatgagtagcttgtcttattggtgtagaccagccttgagagctcgtgttcttggaagtgttgttgcactcaacggctgttgcacctgtatagaagggctgccctctgttgctgaaccattacaggcccaaatagaaaagccacagcaagcaagcctgtttatgggttggacacttaatgtctgctgatcctaatgaggccatgttccggaatattgttttgtggaaagggaacgtcaagaagataaaagcatttgatttgctgcaaattttgcctaacccattgagcttttcccctgccaggcacattgcgttgattattgtaaatttgctgaggtttttccagtcttttcctagaataaagccacatccattcactttctttcctcatcttatcaattaaatgcaagtgggtacttctgagtcattttctgttgagagcagcatctctgctccccaccctttttaatacactcattagttcggtggagaaaagggttgatttattcttggacttagctcatatctttgtcctgagtatctgagtggctcacgtgaagtattacagtgtattactaggaagaattagcacaaataaagcactctggcttctaaaagttaactgtgtgcttccatgcctctcaccctttttcatatcacagcacacttaaaaacccgcctgggtttgtggaacaccctagggaaattgacaagcctgctgtgggccgaggtggcggccgtgacactccagccactgagagggctgatggggcctctggggctcgtggttcatgccctttaactcgctatactggtggagaaattctgtgctaagtaagccttgttagctaagggttcattggattcccattcccaacccatgccagcctaaggtgttggccgaaattgaaaaaagaactgtttcagctggtagtgataactggcaccaaatacagccactgggcctgtgcttcagtcttagaacactgaggcggtcaggtgagtactgcttctttcccagtcttgctgcgaccgagtcagtggcaggcctgggcagtgagcggtggagcgggaacggcggacacatgggcgcagtgagaagcagagcccaggtcctcacgccccaggctccctgccctcaggtgcccagaaagtgcacgtttgttctgcaatggatcaaacattagatacgtatacactgtaaaagcccactaattcagagtttgtgataaaaacatttaatttttccatccatggcaaagcagtctgtgaagttaataattaacacgatcacttagagcaggcttttgttattcaagtatgcacttccatgattgcatatttgaaaacaggcttttctggattacaaaagtaatacatgttcattgtagtaaaaatagaagcattaaaaatacttgaaaatgaacatagaggtgaaaatgaacaggagggatgactatttaaacagtgtcagtatgtttctctttccaggccattagctaataacctatactgggcactaagttgtatttagtttctcactaaaacagatgttttttagtaaaatagattgggagtgtagatgcaagctcactcagtaagaacgtttctgtgtccccttttcctaagatagagagctttcttgtatttctccctagctattaaatattcattgacatctaaatctctattgagtgattaatttgcmcaatatattatgtgaaaaagattagaaaagcatattcataacatgatcccattttggaaaatatatatttaactgggaaaaaaaattatataaatacacgtttttcctccttgtactgtttggctggttttctaccaaaatattaatgctggtggcctttcagtggcgagatctgggacagctttgactctctttggtatagccctgtgtagtctccygattggtctataatgagcacattatggaatcagaacaaaaaagccatttccattttggaatggaaagcagaacgtttccattctgcattgcatgcagggcactggaaatgcaaagtggatgcgtggaccacacargggagcacacctgacctcctcttctctctgttccaggaaggcgtggaagtgcgagtggccagaatcttcaacacctttgggccacgcatgcacatgaacgatgggcgagtagtcagcaacttcatcctgcaggcgctccagggggagccactcacggtaggtgctggcctcggctcagggagcaccttgcaacccaaatcgaagtcagctcacaaaggatgagggataagtgcatcttggttcagggagtgacacttctgaagctgccatgtatacccgctaccctccactaaggggaaggcaggcacggggacataacccagatgcatggctgctccacgaaactagagtcaccttgccctccatggccactggggtccctgcccatgcctccaggtctgcctgcctgtaccagccggcctgtgaagaccttctccgacatacttttggcctgctggctgtmgccaggggtgtgcctgtactgggtgtcctcggatggctgagaagcctggacaggtagggtggggaggtgagccacatctggtcaggctgggccgtcaccttgacaatgccggcaggccctcggtaccatcctccactggccaccctcaacccagggagacttctggagccagcagaggtcccagtgatctgtggtcggtggtccaagtgtgtggcaaagatgtctgtgccgacactgactgcttggtaccctcagataccatctggggtcagggtgggtttgctgattccacacctgtycccacagccctctggcctcccttgggaggagcaccccaggcctgcctggtgagaggctctgccggcatctttggttttgctaatcctccctcccacccccagctccccggtcactcctcttcgtggttgtctgcccaggctgctttgctcttctgatctgtagcctcctagagcactttccagcatggcattttgtgggactcgagtcgatttgcatcctgttactctgaaaatcctgtggcatggtttgttatcaattgagtgtattccagggggaagaattatagctctgtgtatttctgtgtagtacatatgcatctacccattgattggttgatcacgttagctcactcttctgtcctatgatctgcaggtgacattattcccctcctttttcaggcaaggatgctggagcgcagaggttatatgagttgcccaagcttaggtggccacacagtggtagcctgggttttgaagccagagcccccgctcttcatgagcattctccgtggtgtgtgtctccttgtctgtgttggctgctccgctaccaacgtagaaccaaaagcctagcctgttacacagtgggatgactctccaagggcaactgcattgtatagctgagtttcgctgagtgcattcctggggagaggtgagtccaaactcagctttaggctcccaacagcccatgccagctctcccacctccccctgtcactaagtggtatcttggtgcccctaaatggaggctctgtgactacacatggctcttctccttccttcactgcacagatccaccagcacatcctaatggccgtgccctccctaggtagatccagactccagtccctggtctacactgctgccgccccacccctatttattgccgtagccttggagccactctcattctccctgtcctgtgtactctcaaccccgcagctggagggagccttgtaaagaggggtcggaagctcaagtggctctgcagctccagcagagcacgggacacagccctgttgcctccgcaccttccctcaggcygggcttccttgctcccttgctcctgcctgtcccagcagcgtcttgcttttcttccaggcattcttgttcattcatcctctccttaagggaaccttcttgatgcttctctgcattatggcaccaggctagttaccataaccatgttagttgtcttcagtgcccttgtaaccaactgaaatacgaatttttcagccccaatctctgttagtacagtgtatgctcttcaaaaccagggactttgtttcattcatggttgcgtccccagcttccagaagaccaccaggtacgtgggcgcaggagagaaatgttgagtggactaattattggrtttgtagtggccgctttcctttatggtaagtgaaagtggtgaaacttactatcatctcatgtaaccctcttgctgctacttggggttcctaggagctygtgccgtgacctgcgaaccccttagtccacctgctcagttgagaattccacatctcgaggacagcctggtgcctttttagcaactgtgttcagaaactccttcatgctgtgagatgagagctgctttgtttagaggaaaccatgaaagcctccaagaagcagcttgatttagtgcctccttggccacagccagggctcccagtgtcccctagcctccccaagaatgcatgcattgttggcagaggtgataactcatgtgttgtcttcacaccgagcaagcttttgtgccagagacaaaagggagaagatctctggagccgtccatgactgcagttaatcgagaacgtggygggcttcagtctctgtaggcagcttctggtggcaggaggcagaagtcccgagggaggcctttcagaatgtgttttgtttcctttgtcacacagaattctatttcccagcaagaatttgatgaagtcactgacttcattcttttctgtccaattgagatatcatgccttgctcttgtcagatggctctgtggagcagtctagggagagactcgcaggcctgcctgagccagcctgtctttagaaacactcggcttactgaggaagggaaataaggaggtgtgtccacctatttccttttctgctacatttccgacaagtcacttctgaggtgaagacctctttgagggtggccagaaacagctcagcgtctcgttctccctttccaagctggatgggtatgattgcttaccttgcagccgtgtttttgagcagattcctcatgcctgtcttagcatctcactcgttgctgtaccagatgcctgtgatgaggactcagggagtatgtcgctgggttaagtgcatcatacatcaaagctatattttaagtggaatcatgttcagcaaagtttgcatctcagattagaaaatagatgagtatggttcaggtagagctattgtcctaagtttattttcgaagaggctttggtccacagttcagttatggcactcaccttcacaggaggggtcattctgctttccaccttatgtgatttatcccaggtttggatttgcccaggacaggtcagatgtggtagaattggggtttgaatccagtgctatatcattttaaaagccttgctattcttccaaagggaaattgtggaaaaatcatacttctaagaccaattcaaagctggtatgatgtttagcctttttattgatactgtggtatgttaagtgattcttacattgggccttcgtttgtggcggaaagccataggatttgttaaacagttattcaatggtactaaagtatggtgaggaagactttattcaggaccatcatgacaggaatacggatcactgcagtgggatttttcgggggggaaagactgggatcaactccaaatacagcacaggcaagcagaatttacagccaaggagcagggaggaggtgagtggatggaaaattattaagaggaagcatcagaggtaaggcggattctagctaaaccaacctaacaggattcttgctgacaacaggccagggtggtcggacacactctaggggatatggggggtgaggaatgtcagatgtcgagggtgatcagatatcgagggtaagggtttcttgtgaaactgacttagcagggttcttgtcaaaactacattttacaaggaagtgcacaaatgggcctaggagaaggtactcgaggctgaacgaagtttggccaagcaaagaatctttgttacatcttaaacacataaagcacagcggctggggacattgctaagtgatcatgagagctcctcgctgcccctcacccccggccggtcctctcccctgttggttactccttgatcatcatgctgctttgacctgcacacagcccttcgttccccggcccccagtagcagccttgactcttgcacgaatctcctggcatctctcctgttctgtgaaatgaagccagagggaccgaatctcacactgtcttctgttagaagaacaatgagaaggctgagggagctctgctgccatcagctgtccacaccagatccctgtgatactcatgccctggattttgctgcacactcaatttgtgccaagtccctgcaggccttatcttgaagtgggggagatggaaggcctcagaccatgctgggagggctgtacacagggtctgcagttgcattctagagcccagggaagacagatattttggatggggcataattgcatagcatcttctctcttgcacacacacccctttcttttactttacattttcacattagcgcacacagtgaatatttcacacatgaattacaaatcctcatgttgcaaagtactgtgttagtgaaataggtaggctaatttaaaccaaagtacagatgatggatgtgatatgctatagaaactgaaatccagcaggactcttaaggacatgaggaaggaagtattccaggctgccactgacattgcatcttagcctaatgcacacactggagcatacaaactttcaggactgtgtcagcaaggtctgtgggggtatgcagtgggcgtcccacgggatccacgcctttccactgcagcccaggcagaacagcctcctcttgtactakggactatttccttgaggcccagttgggcctcaggtgggacctcagagggagtgctgctgagcaccttttgtcaccgtacctgaaggcagcatagcttacccggtgaccgtggtgcctgcagatgaaccttgtgtcggtgctggctgggtggggagctgcccctggcgagtcacgcagggaaatgcacccacagtcgtaactctccttccagtgcacttatgaatgagtcaacggtgggaaatacccagcagactgcaggttattttgggagccttttggacttcccaggctgcagccctttgggattaagtgatattcaagctgctgaatgtctccaccacaagtcccttgtttggttgagcaggtacctggcgtggttcttcacatcctgaccctggcagcctagttaacccatcccggtcggggggcttacccagcatgtattgccctggattgtgttcctccagggcttggggtcagcatgtttcggtggaatggaaagctgccactgtgctcttccatggctcctctctgagagacggtgtgtgagtggacaccgctgctctgatgagtgagcctgggctttagatcagactgaagactggcctcggctggcttgttgaaggccactgccgctctggacaaaggtgggctttctgtgaatgtggctggaatgcactagcagactggtgagcccaccatcacagtggccctgactgagtgtggtgggaaggtgcaaaacaagcagcagaggtgcatctgtgcgctcagctttgagagcagagccccggatgcagacagaggcaatgggcaggacagcagcacagccccaaacccacctgtggaggagcctgtgacgcgggagttgcctaaatccgatactcactacagtgaggttggagaatggcctggtgccagcctgagagccacagtttgaaaaaagaaaaaaaaatctacaggtagttctgaaattatgaacacaatagggcaggaaaaagaattctgaacttggagtcaagataaatttcactctgctgaatgcaggtcactccagcgctttgaccttccattacctcatctccaaaataaggttgtaaaaaacaaaaagagttacacctacggcactggtgtagaggggagtttccaggctgagggagctggcagtgggtggacctcctgtcctaccaactcaggcccactgcttcctaccttcctcacatgtatcagaagtatcagccaggccagagaatcaggttcaggcagaactgtcaaggaattcccctctgcttccaagaggcccatgcccatccttcctcaatgttcctttactgagatttgttgcagctgtagtttctgtgttgacaggaatccccattcctcagtatccccagccttttctcagtgtaaggccttccccccaagaacagaacctacatagatagaactgatacacctgtggaattggcatataaatgtttattaagaaaacagagatagcctttgaacctgctttttaaataaataaataaggctttcagggggtttgatgcatgtgctttttttttttttttttgagacggagtttcactcttgttgcccaggctggagtgcaatggcacgatctcggctcactgcaacctccgcctcccaggttcaagcaattctcctgcctcagcctccctagtagctgggattacaggcgcccaccaccacacccagctaattttgtaattttagcagagacagggtttctccatgttggtcaggctggtgtcgaactcccgacctccggtgatctgcccatctcggcctcccaaggtgctgggattacaggcttgagccaccgcgccmggccatgcgtgtgcttttcttctccacctgatccttccccttttccttctcagagctggagcggggagctctgggaaagccaggctgagtgtctggtgctgagggggctggtgctgttcacagagctgctggcaggggctcttttttgctgtcaggcgggaagagaccccagggttgttataatcaagcttgttcccaaaggcagtcccttcttcccagctgcctgctttccaccacagggaggtacacaagcaaacaaaacccccgagggcactcttgttcctgtgatgccrcgcttaggagatctccccaagcacctctgttgccgtctccgcctcagtgagtggcgtgatccgtggcgctccgcaggtcattcagcagatgctcatcccatgctggtatcgcacctcrcatcgtgctgggctccagcagggcaaagggggttcggacaccagtccttctggggagttcacagttgggggcagttggcaaagggctttccctgggcaatgagccagagaagcttctccaggaggtggcatcagagcttgtccctaaaggatgagtagcactctgccaggtggaaagtagacaagayggtctcagctggcagagcaaagaacacaagccaagctatggaagtgtggagcaaatgtgcagtggaaacaaaggggaatgtgaccctcctcctgccacctccgcatcactttcagagtctcctgcatgcctctccaccttggccttatattagaatctcctggggagctagctgtaacaataccaggagatgccggcctcatcccaaacagtctgtgaaccagcctgggcggcatccccagctctgctgttgggcagtcagtgtgaggaaccccagttaaatgcatgtattaatgtttgtgtgtagatctgtcacctagctggactctgaggtcacagccccccagagcctcacatgatgcctgacacatcgtaagactccagcagaagygaattccttcaggcactgtcttttgagggaaaactttacacagctataccaggtgcacactttaggtattgctgccaccatctcactgtcaaggcatggtctcgaagtagagtgcgggatgtggtgctagatgctttgagtcagcatcactgccccctgggatcagtttcaaggtcggactgtgtcccctggagtttcaaggacacctacgcaggacgggtgtggttttatcaggaggcctaactgttggtttccttccaggtatacggatccgggtctcagacaagggcgttccagtacgtcaggtaagactgtcctgccctgccccagccttagcagtgctttggagcaggggtcatgccaacttgacagacagttcagtgtcttgtatatgttaaccatttccacaacgctaacactatatattgattaaaaatttttaattttatgatgggaaaacttgctgttctctgtttaaaagttaaaatttgcattcatctccatgactatcgtgactcatgtgctaatcttttactgccacctagcggtgtgtgggtgmagttgcccagctctgagggtgacttgggtgatttcagcgcaggtggagttaagagatggccttttgcatccagcagacctgtgaatgccagaatctgacccattgcaaacatggctcgcggggtggaggagatagtccttgtggagggcacaaggtagatagtgttcttaygttgaatttcacgctgaaactaaatgcagataaaaatatattttttgaatagattcacgtggtgatttttattgctttcttggcagcccttataaacccactgttctgttgttccattccgttggtgattaattttagaaggcagtgtggattctcagagtagttaggatagaagcagttgtgtatgccaaagtgcatccaccagtatgtggctattgtaaattctgtgaaagtttctggtatcctgaattgttgtraaacccagttctatattttgaacccacatattttcactcttcattgcaaataccccagtatgcctgtcaatcaggaagtgttattcctgctgtcttagggccatcccaggggcactagggtgagatggtggctgttgtgcaggtcggggcagcccccaagtcccacctcagccaaagcaaccacataaaattgtacctacccaggacccttaggtaggggtcctgggtaggagtcccgtggagaaatggaactggtagtaaaataaaattttaaaaagaaatcaaaataaccactgtagatttttgctgaaagtatttgtgaatttccatttactccaaaagaaagctgtgagtaaacatttacacagccagtagttttttcctccccacccattaatatcttgcctcaaggggcaaaagcccagaagtgtactataaccaactttgtggcccaaatgggcatgcatattctaaaaagcgatttaacagggaaatggcagctgcccccgctttgggactgtgttcatttcaaagcacttaacgtaggcactatgtccctggaggaaactatcatggcacacttctgtatggggaccaaattgtgggcctcccttggattgagtaccgtctttccatagtgacgcgttcttatcccatcctcctccactcacccagctgtgcccttttctgagggagtcttgctgtcctcggttatgtgtgcctgcctcgggctgyctcaccagtggcgcccaggcttctccagcccccacaccacatggaatatcaatgagatgttgtgcggtaaraggaaaccagtcaggacccattcttctttctgctctcattatctcaagggcattgtgtgcaaaattcatttaaaatagcctcagagacttttctttttgctaggactaaaatattttgagcattcagtgatgcctgtgctatgtgctgtcccagckcaggacaaaatgcaccctggcccgctctgatggcctggtcactgtcctgtgcctgctttgatggtcgtggctcatgctcctagctgccatcacatgcatcgtcctctcccacaccacttgactacttgaaaagagggcatgagcagtttccctagacacatggttgttaacccttttagaaaacccatttcataacacttcagtagtatttatttactccccactctggtgatcctctctggtttcacattagcagagtctgagatgatgaggcttcagggactttgccatacttgggcaagggtttcctgacttaaactttttagttattgaggactcagmtgagttcattaactgaccaaagttttgatgtttttcacaagcaattttttaggaactgagcgtcttttagtaatgcacgatgtctgggtccatatagttactgtaytaaattaaccattccccaaacccatgattgcctcgaaacaacagtgcagggagtctgaggtctaggtggccatccgcatcggcattttggcatgactctgtttaatattctcatggccggttttgtcctcatttacataacaaaggcatgctatattttttaaaagtcactttgtcaaaatgacacttgtaaagagcttcaggttaaagaatgtgatctatgcaattttgaccttaaaagttgccagtttgtcatgtaaaaggcccatggctctcccgtctgccccactgaggatgactgcctgagagtcacccttcttccaactcagataaaccccaccccccagtttcaatattaaatcatattgtggatgcaatggaatggcagcttttaatgtctttttataaacstgcacagatgtatgtcatgagtgcactattgtaatgtagcaatactgccatagtgatgaagtgactttttgctagtttctataaaggagaaatcatccaaggttagcagggatttgcatttgtgcttgatccttgagaatagaacattttaagcatgttcatatgaaatacgcatttgtcgtaaaggaaaacgcagaaatatctgatttacgaaataccccaataggttttttcaattgaaagcaaaacctatctgcggttttcttttggaagtttatcctgacccagagtgacctgctcctcactggtaacgatggaggaggagaaggagaagggtcagagctttaaaagtcttctaagaattgtagctcatggaaaattggcgtagaaaaagtgcttgtgcttagcagtgaggtgtcatttttacgaagtaactttgttttaacagagccacactttaaagcttctgaaaataagaaccaaaccttggtaagcgaaagtttgcttacttatcttcaccttcatggcctagttgatcacaatccatttgaaacatccaaatatccctgaccgtttcatacgaggtgttttggggggtggcgactttaaggttgggggagtagggagtgacgtttctgtttatttcaaccctcagtattgtttgcctttatctgtgatttgccagtatggggatcacatactggagttcgttcatttccgtggatcttgtttttaaaagtaatcatgtgctttcgtacaggtcaactactgggttcacattaaacatgaattttctttggaaacttatgtaaactccatcttttttgagtgtatgcctgttttaacttatgcttagtttttaattgttaaaggacttcagaaatgcagtggcgaactcagccccatcactcagcttccatcctatttaactatctccaccacacccaaaaaaagcaaatcccagacatcaaatatatcatttcatccataaatactttcgcattrtaaacaccatcttagtttgtaggattttgtttcgacattcaattttccatttgggtttttgttttctcctgggggtggtaatttttcttctgggagggcttctatgtggtgcgtggcactagcatattccagcaggcagagcctcacctgcctcccctttttttccagcgatctagtgaatggcctcgtggctctcatgaacagcaacgtcagcagcccggtcaacctggtgagtgctcctctccctccactctgcaggacagctcagactttcgttcatttgtgaaaccatgagcagcaccaggctttgcttcatttgccatcggcacacttaggacatttgtgtttgttgcttgctaaatactagaggaaaaacaaacaaacacaaagtaagagtatacaaagaagtaaaacatctgcaaggcacgggtgagtgatgtaatcagtccctccaccttctgaagggccygggtctaagattgtgtgaagccttttggtggtagtaggtggacgtgtgtgtgcatctcgttctctatttaacaggcgggtcatcattataaggcctgattgcrtttttagaagatggaggttgttcagagggaaaattttccggttgctgatgatgtctgtcatttagccggacagaccaccttcatggcttctcgccttccctgcatgcctgcccacagccccagaacctccctgttggagggatcatccagccttgagcagtttcagtgctggtgaacttgcttctgctcagagaaattcaccctgtctttggacagttctggccggcagaaagctcttcctcatattggaccagaaatctcactttctgcacacctgtccactgacctcacttctccacctggggccattcatggctagtgtgatgcctctacagtgtggtaactctccaaggatttgaaggagatggtcctacccccyaagctgcctcctccttggtgcatcagccaaggtcatggtaggacctcttaccctttctgtcactgagtgattttctgagcagttttgttccatctcatttaaaatgcaaggtttccaatgtggactgtccagcattcaagatgttctgcttctgttgatggcagtggacacaagaacctcttagctcacagagacctcccccttaaccctaccttggggtcatttcaggtgcttctcccaaattacctctcctggttcctacrcaacactctaaagttcagggaactctaaaatgttggccatgtgacctatttcttgcaaaccatgtcacctttgcttatgcatgtctttgtaaccagccatctcaaatacattgcagaccatgcatttttccctgaggtgaaagggaattctcatcacgtaggaaagaattgccctggagtgctgactccattctgggactgttgctgattcatgggtacagtgtgccacttttgaaaaaaattcacttaaaacagaccagaacgtgcctcacactgtaagcctcattttgcttgcagcatttgcctgtgtacactggagaggcccgaggcgcccctgctctgcgtttttgttgcaggttctttagcaagggtgttgtcagtgacttccctgggcagccaggctcttctctgtagataccatgttcctccttccctctttggggagggcctttgcacagggacaattcctaaaattggaatcgtgtgtctgccaggagaaaggcagaatcactttcttgcaaatttccgtcactccacttcgctagtcatcccctctgtgctccattgaggcccagggtctctccctccacatttaccatctagcttcaggctaaccgaggacctgggcatgaagaggctttagggtatagaattatcagactttatggtggtctcttatgatgagggcagtggtggcagagtaagagtaacaggtgctctgatgtgtgatgggagggagaaaaagagcaaatggttttccttaaagcccccacacaagtattctctcttcatgaaatgcatggagtttgtcctctggcttgccggggacactcgcctgtgagcctactcatttctgccttagcttttgggtgtgagattacaagtccttcatcactgacatggttaacacagctcacccagaggggaatagatagtgttaggagagctaattttgtaaacccaagcttttataaaagtgacattgaagttatgttagatatggaaattgtctgatactcagtgagtgtgtgccttcatcagaaactcttgacctatccaaagcccagccttgtacacagcagcctagaggctgaaggtatagatggtgcagtttagcactgccaggtgagtaactgtcatcttggaagcggagtaccctctggcacacggagctctgctgaagcagwgcagggaggtcagactcggccagtagacgtctctgcagacacgcctgtggtctgggtggtggattgctgctgttgtcatgacgcttataactggaaaccgtttctttcttaggggaacccagaagaacacacaatcctagaatttgctcagttaattaaaaaccttgttggtaagtaggataagtcatttcctgagtaaaatygactgtgcctgccctatctgttaataacaccttgactagaaagtgggtaattaatacaagctaattgaattggatcaaagcagaactttttatcaggaatacttaagtgttttctaatttttaaggaatagaaagataaaggagggcaggattggtttctcctcagttttcgttgcaggtttgcakgaagtgggagggaggaggagatttgctcccagtgtttgaggcaygattgtattagatcatcctacatgggtgacaactattggatttccgaactggtcatgtcaagcatagaatttcagacagcaagagacagcaaccaccagctgcgtgcttcaggcaggtttgaaattctgtttgcaattctggttatcctggctgccacccactgggggcagtgtagcattgggagcaccccatsaaggtggactcttaggccatgagaaggtcaggtcttccagaccagccctggattgcagacatagagtggatgagcccttggcctcatcttcagacttcctggagctctgaggagtcagactcttggagggtgtctgttgtctggggttgatcctgaaatttgagtgaagtcacaaccagactagactggcaggtaggccaaggaggagtatgccacagtgtgtcctgaggtgaccattcagaccccgcttggctgggttaattcctccagtgtgcccttcctggcatcaggctgccattcatcggcattggtctaatcgacccggatggctggaatcctcccgttgctcgtggcagtagaagcagcggtcttcctcagacatagcctgcatcatctgtggctcccacagctgctccgatgcacttcccagcttttccatcctgaatctgtgtgttcctcctgcgtgaggaaggggcaggctcagatcacagctctgtgccatccactccttcacaccctcactgcacagagtgaggcccgtgggccaacgcagcagcagcatcatcagatgcrtgttagaaattcagactctcatgccctagcccaggcccccagatcaggatctgcctgttgacaggctcttcaggtgatccgtgcgtgctgacgcttgagaaacrctatttgaaacctaaggctggggggaggggcgtgcagcttccctgctgtgcttctgtatatagctttgtgacagaccatcctgaaccacctgtggtggtgattcgctgcagagtctgcaatgtggcctccatgacacggaggcagggaaagcctccacaggctttcttctgcaggtctggcccacagtcactggtggggctgtrtactgctggccagtggggcctgggcccagcaaggatgtggaacaggccagcctttgccgtcctccgagaggtccctccagctgggtggctgcacatcttgggtctcagggctgtctaggctccgagcacccaggtatggcccacttggggcatccacctcagggatggccccacaccacgtttgtggtctcacaccggggtcatgctcggtgggcacgtctgcacttgttacctggtgtgggtggtctgccttggagcaaccctcttgtagtgggcggtaactcaggcctgttgagacagaataacctgccccccaccgagctcttgctgggcgcctgcacacagtcagcttggccacagcagttgcaggagcactccctggacttccacgcagaacagtccctcgggagctccggggcttctcagagaactgcatttccaccgcctgcaccctattcacaccacatatggggtttgcctttgatgtggatggtaaggctgtgcttacccatgctttgtgattctctcctaccttttttttctttaaacatctcaggtagcggaagtgaaattcagtttctctccgaagcccaggatgacccacagaaaagaaaaccagacatcaaaaaagcaaagctgatgctggggtgggagcccgtggtaagtgcagggagttaatgctgccttgtggggaggggcctcccgtgtcctgtgtctgctgtcctgtaggcactgacccttgtcagacagcccccggaggagcaaggtgggctcggcatccaggcagatagagggttttctccaagtggtaaacagcctctcctgtatcaggagtctcagagaatgttacctgggaagcggctggaagcccctgctctgggctctgttttcgtaaaatctctcatgcacacacacattcttacattctctcatacacatacactgccatacaaacacttgtacacacatatactcacactgtctcccacacactcacactgtcatatatacactgtcatacaaacacacttaatacaagtatactcacacacactcattttcacacatacrtatacattcacactatcatacacattctcacattcactcacatgcgcacactcactgatccacactcacattcacacatacactccctctcccacatacatacmcacacacacacacacacccctgactgtgaacgctgtgccaagggcgctggcagcacacgctcagagccctgcgtagccccagttgcctgcctattgagtgtgcggggccaggtcaggggcaagtggtccccatcagccccgcagtggagcccctggttggaagcgtgcgagactgaagggtgtggaggaaggggaactgcatgccttcctgttgtcttcagtgtgtctactgaagggggcagggtggggcggctgctgcctccctggggctgagcctgaaccccgcctgcttctgctctgccgcctgctgtgcccttcctgccttgggtgactgcaggctcctccccgccagagaacgctcgtcctcagggctgcctgtgtccttcagagaccacctgtgtagggaggttggctgggttggccccatctatagaagcaagcccacctcatttactgtcacctctgcctggctgttccctctttgcccaccctcatgtgccccactgaaattcgggctcccctcgggcagaggcgtgtagtgtagccctgtgtccagcaggagcccggcacctgtcagacctgacacacactgggtgctcaacaaatgtaggagcatcttggcatggcccttgggttgtggcgcagtcagagagtcagggacgcagttgagagctcagtttacctttttaaaatgtgcatagtcagagctgagtgagtagaatcctagaatattgaacttcaaagggacatgagagttccagcctgatccttatttcattctgtcatgtacaagtctacgtaatctgctaaaaactgcagaaatttgttgagtgaaataaaaatacaattacacccagacttcacaaaatcgaataatcccaagctgtgcaaaacaggttatagcagcctaggtttcttgtttttttgaagctttgtaaggggccattggtccctttgtaaggagagcctatatttttaaacaaaatattttttgaagatttaaatatacattcactatgtattaactattgctttttatgtgaggtgtgtgtatgctcagtatctttatctttctggaatttagacctataatattctaacattcttggaatgtgagccatctaccactggtttctcttctagtagtagttttaatttataataaatttttgagggatatgatccaaagaaacttacaggcattatccatcttaattgtcccaagtgtgtgtgtttaacagcttgttgagatataaytggcaaactgcacactgcccatatttagaagatacaatttgataagttttcatctattttgacacctgtgaaaccatcgctgcagtcaagctgacagaccttctcccccagtggtgccccagcaccccttagcagtgcctcccttcaccttttctctttctgctgttaatcagcagttgatctggctggtttcctgttggctgcaaagcagcttcagatgaaggttgctttctgtggtgtgggctgccgtgggtcccctctcagactcagcctcttagtatggtgggggtgcaagtgggccatgatccgctaggcagtgcaaagggttgatgtcacgtgggagaatcaggcgtgttgatcagatgcagatcaccttcccaaagcatcttcccgccactccaaggtggatttcttctgaaagaatggggcacatgggcattatctgaaaaacaatcttgccagccgattcaaactggagtagacattataccagcaagaggtagtcggggtcttttgtgaggtggagctcactttacgtcagtaagagtgacacttgtcagctccacagtacattctgaaagcrgccctgaaggacttctggcttctctcggtgggccgtgatgctggatgctgtcacaaccaaagcatggttctgtgagtgttcctctgaaggaggcctgactggctgcaaggtggcacttccttcctgcaaggtggcacttccttcctgcgatrcccttctgtcaatgtgaccttgtctccctttcttgctttccctttaaacaggtcccgctggaggaaggtttaaacaaagcaattcactacttccgtaaagaactcgagtaccaggcaaataatcrgtacatccccaaaccaaagcctgccagaataaagaaaggacggactcgccacagctgaactcctcacttttaggacacaagactaccattgtacacttgatgggatgtatttttggcttttttttgttgtcgtttaaagaaagactttaacaggtgtcatgaagaacaaactggaatttcattctgaagcttgctttaatgaaatggatgtgcctaaaagctcccctcaaaaaactgcagattttgccttgcactttttgaatctctctttttatgtaaaatagcgtagatgcatctctgcgtattttcaagtttttttatcttgctgtgagagcatatgytgtgactgtcgttgacagttttatttactggtttctttgtgaagctgaaaaggaacattaagcgggacaaaaaatgccgattttatttataaaagtgggtacttaataaatgagtcgttatactatgcataaagaaaaatcctagcagtattgtcaggtggtggtgcgccggcattgattttagggcagataaaagaattctgtgtgagagctttatgtttctcttttaattcagagtttytccaaggtctacttttgagttgcaaacttgactttgaaatattcctgttggtcatgatcaaggatatttgaaatcactactgtgttttgctgcgtatctggggcgggggcaggttggggggcacaaagttaacatattcttggttaaccatggttaaatatgctattttaataaaatattgaaactcaccagtcatggacttccagttttaaaggttgtctttctgcttcggcatggcacttgttggagtgctaaggaaaatattggagaatttattttaaaagaaaattctgaaaacattcaggtttgtgcactatataatttgatatgtagctattgaaagcatttatatgctacttgggctgagtgtatgcatataattttcactgccatgtaaagttttcagatcttagccagggttagaatcagttttgtgcccttccttggcaacacagaccagatggagaaaaaaaaggtgcaaattgtcccctctggagagatctgtgaactaggcttattgagtgaaaactctgagagcttttgttttcaataagaaccctttcaaggtttagtgttagcattttgtttttcctcttaataaatggaagaacaatgcggtaagttaaagctccacattttccaagtagattggctccgcgtgacaacacaaacctgagcaggcgctgaagattggctccgcgtgacaacaacacaaacctgagcaggcgctgagaggataaagatttctatgtatcagaagcatttaaaaatgagagatcctaagatacctaaccagtgtaagctagacttgcctgtgcttgtacaaccaccttgggattcttcttaattggacatatttttggaatcccagtcttgggcagggcagaggacgatgtggttttgtttctttgtcatgctaaattctccagaacattctggaactagggtcaatgctagattggttgtggtgtgagagagaaagaggaatcaaagatggtttcttatttataattttaattattttgaccagaaggaagtgatataccatgtaccgagatgggattaacagagctgcaagctcatttgggaactactaatggtaaccaagacattgaaaaaggagtgtagacagggaaagctgagaatttgcggggactaagttctgcagtgcaatttgggagaacataaaggccccagggtccagaattctcttacctagttacttgctagttagtatctggaattcttccatgggattcattctttggttttcttgtctgtgatattcataaaatattttcaggggagagaggaggaagggaaagaggagttctatctaattcatcctaaagaaagaagtaatgcatcaaggatgtagtgtaaggttaatttccatgaatgtcctgggaagagagggaagtggagttgaggggcttggaaagggatgaatgggtagacagagcatggttactgtggtctgaatgtttgtgtccccctataatgcatgagttaaaacctaatccccagtgcaatagcattaagagttggggtgcttaagaggattaggccatgagggcagagccctttagtgcctacaaaaggggcccaagggagcttttttgcatctttgccatgttttaaggacacagcaagaaggtgccatctatgaggaacagcccctcaccagacactaaatctgccggcacctagatcctggacttcccagcttccaaaactaccggcagtaaatttctatttataaattacccaatctgaagtattttgttctagtaccctgaaccaactaacacagtggtgctcctgcatctcaggattggctcccgattgaggcatcactgctattgcttacagggacaacactggtacagctgctcttattaacttcagtgacagtcatagtgggcttaagcaaggtgcagattagagagtgaacacactggatttccactacaccctcttggatactgagcgcagcccactggcccaggtggactcttgtgactcttgtggcattgcctctgctccatccctgacggcatctctgatcacaactctggtgctgcatgggccaccattctggttcatggttcttagttatgtatgagcttgaccttgttctcagtctgaaaggtgtgttgagtgaaatgctggtctggtgataactgagctacagtttggtctcttaagactgggaaatctagaaaatcctcagcagtttgctagggcagaagagttgtgagttttaatgtttcagttcatctgtttaaagtggtttgttgactttatccagatattctcagtggttggttgttacctttgatagggagttgaaaggttatattacccagagaactgataccatagtatctggggtgtgacgcactgagcttcagagacagcagcaagacttggttctaatcaccatgattaacccgcatgttttctctgtattaaaaagccctgattgtgtcctgcttgtaccttggccactttggagaacaagagtcacttttacctaaaactgtactgtgggaaggaaaaaagtaaagatattattatcaaaaacatcaatgtttttaaaaagtcctgctattttggtgctgctgaattttaagtttctgtatttcatatacattttacttgaagtaaaactaatgtgatgtggtacagaattccaggatgtaagagtcagtgtagatggctctaccatgtactaatgaggggaggtcagtttttaaagaaatgaagataaaggaaaatgcaaggaagagactctaccgtttttacaaaatggagtagacatactttccctcatcttcctactaagtacaatttaaaattctggacattatatgtaaaacaagcataatatgctgaaagtagatagaaaaaggtagaccagccagggacctcaggacctgaggaagaatgcagtggtgatatgggctaaaccgtgttgccttaaaatttatgttgaagtcttaacccataggacctcagaaggtaactatagagattaggcctctgaaggtgattacggtagaataaggtctttagggtgagccctaatccagtctgaatggtgtccttgtaagaagagaaaatttagacaacagagatatgcatacacagagagaaggccacgtgagaacacagcaagaaagcagccatctcagcccacgagagaggcctttggagaaaccaaacctgtctacacctattgatcttggacttctagcatccagaactgtgagaaaaatgaatttctgttgtttaagccacccagtctttggtatcttgtcacggctctcctagcaaactaatacaagtagtgagttccctgggttttctttttgccttctatatgccagccttggagctggataagttactaaccaaagagtgccaacagacacagtcaaaaaccccaacagaaacctattcactgctgccagcataccagggaaagggcaacctagtaaaaaggaaaacttttaaacagaaatggctctactgtagccaaacaccacatgaaaaacactacagcccctccccatcccttccagcaaagaccaagtgggacctggagctccaccctcacctaacgttaagaagatgcctcaacctgcccctacccccactctttgctctggtgctgtcagcaaaggcctgtaggggcttgggactagaaggcctgagctgagatttgcatctccactgggtagtaatgaccccaaccccatggcatcaactgcctagtggagagtcagggctttcagcactttcaataatcagcaataataaggcaacctcagtgaaggccacatggggagcagtaacaagctccccacccctgacagcctgagtgttaccagtggaggcctggagggaagcctgggtttccacctgctacctggcagtaaaaaggcaggttccccacttcactccctggagcagtcagagtaggcctgctaaaattcaagatttaaatcagacccagagtcttaacagcactcagaactgatgaggtttaaatcaaaaattattcaccacaccagaaaccaagaagatctcaaggtaaattagaaaagataatgaacagataccagcaccaagatcacacagacattagaattatcagacaaattgttttaaaacagccattgtaaaaatgcttcaattagcaattataaacatggttgaaacatgaatagaaaacttcagcaaagagaagatacgaagaactaaatggaaattttagaactgaaaaagtaacagataaaaagctctgtggataagttcaacagcagagtggagagaacagaagatagaacaatcaaaattacccggtctaaataacaaatagaaaacagactgacaaaaatgaacagagccttggagatatgtggaacaaagcatctgtcatgtcattggggtcatagaaagaagaaagaggatggagttgaagaaaatttaaggaagaagggctgacaatttcccaaatttgaccaaaaaaaaaaaaatcaaaatgctgagtaaccaccaaagaagataagcccaaagaaatacatgccaagatttatcatggttaaactgaaaattaaaggcaaagacatggtccctgaggctgccagagcagaatgacaccttacccctagggccaaagcaattagagtggtagcaggtttctcagtggaaaccaccgaggccagaaataagtgacacaaatgctgaaagaaaactgttaattcagaattctatatccagcaaaaatgtccttcaagaatgaagtggaaatcaagacattctcagatgaaggaaaattatgagaaatgtaaatgagcagacctctaacgacagttaacaggaaacaaaggaatcttgtggcatcaagcaggaagaaagaacatagaatgaaaatatcaataaatgcaataggctttccttttccttgtaagttttctaaattatgtttgaagtttgaagcaaaaattgtaacattctcatgtgactgtctatgtagaggaaatagtcaactatattatacatatcagaaggtaaagggaggtaacatttctatccttcacccaaatgggcaaaagttgacactagtagatttttggtaagtttaatgtaatacctagagcaaccagcaaaaaaagctatacaaagaaatgtactcaaatgcacaaataaaatagaatgccaaaaaagtacaacctgcaggaaggcagggaagagaaaatgaaaatataaaacaaagtaaaacggcagatttaaactttaacataacaataattgcattaaatgtaaatggtctcagcaccaattaagagattggcagagtatatttttaaatggcccaactatatgctatgagaaacttcagtgaaaacaatatatgtgggttgaaagtaaaaggataaaaaaatatatactatgcaaaaatcagaggaaagcaggagtgactacattaatattaaataagataaatttctgagcaaaaagaaaaaaaattgccaaggtcagagaggaacatgacattataataaaaggatcagtccaaccaaaagaccccagcaatcataaaggtgcatgcaacaagtaacacagctgcaaaaaatgtgaggcaaaaactggtagaccttagaagagaaataggtaacccaaaattatagttggagagttaagcaccattctcaataatttatagggtaactagacaggaaatcagcaaggatattgaactcagtaaccaccaacaggatctaatttgcatttatacgacacttcacagaacggtagcagaatacaccttcttttcaagtgcctactgaacatataccaaggtagactatatcctggtcataaaacaaacttcaacacatttaaaagaactggaataaaactgagagaccacaatggggtcaaactagaagtcagtgacagaaaaataacaggaaaatctcctaacacttggaaacagtgcaacgcacttctgaataagccatgagccaaagagggagtctcaataattgttgaaaatatattgaactgaataaaaatgtcaaaatttgtgagatgcagctaaagttgtgctgagaaaaaactttgtggcactaaaattctaatatcagtagaggagaaagaaatctcaataatttgagcttgtact

SEQ ID NO: 94129 - DNA, 25493 bp, Homo sapiens
tgtcacgcttgattcctcaaagggaaacacaccctttcagtcaaagcatatgtaaaataaccagtttttccaattgtgtcctgttgacaaagaaaaatggattattgtcacactgatgcaaacaactatattgccgtaagttaagagtactcatagatagtctcctaattctagaggaaccaggcagagaaaaataaacatgctccaaatttggttcacaatatgtaccttactcaattattaaaagccataaatagttaaaaataagtttacttgatgatacaaaataaaacaagcatcagcaatattccaagcaaaagtttaaaagcttgctttaactttttgggtgcagtccacttagttaactcttgtcttgcttgatatttaaggaacaaagcaagaaaacaattgtctgtgaatgacaaaatttcccggatagttacagttaaaaacatgactgggacaggtcgtggtggctcatgcctgtaatcccagcactttgggaggcccaggtgggtgggtcatgaggtcaggagattgagagcatcctggctaacatggtgaaactccgcctctagtaaaaatacaaaaaataagctgggcatgatggcgggtgcctgtagtcccagctactcaggaggctgaggcaggagaatggcatgagcctgggaggtggagcttggagtgagtagagatggcgccactgcactccagcctgggtgacaaagtgagactccatctcaaaaaaaaaaaaaaaaatcactggaaaacctggttagtaagcgattttaattatataccaggtgtggatcctaggacccagacagaaacgcaaataaagtttgacttttcagtatctaactccatgtgtcccaggccttacttatctgtaaagcaggcaatatacaacctgggaacatttagcaaccctggtatctaagttatatgattcagaccacctatttgcattttgacgacacttgtattctaccaataattcttaagagtatttttaattcttaaagccatgtgaactaaaaacgtatttgatttaagcaattatttttctttaagccaatcaattagagctctttttgcagacattacacacaaaacatatatagcagcacagacagaagattcagcacttgttaagatttttcatttgccagttttttaattggattactggctttagggtggagcccttggaggagcagggtcaggtaccatgcattttttagtgcctaataagcagacacagctgaaggcaattagcccatccccccatagaagtcttattttttagtggagggtggggatgttttcatacctttcaggtggccaagagcatgcttctctgatttattactactcctagccgtcccttacagtgtattttctacctggttattaaacagcaaatctctctcataatgtgaagtaatgtgaaacccccaaaacataaacagtatataacacaatacataacagaacagagtctttgattttgagaggaaactatctacttttaattttgggggtttcgtgggaaaaacagagggctttttattttcccaaaacagggtctgtggcacctcctctgtttttcccaaggagtcccatgctaccagaagttatctttgggcctctcatgcatgcattaggagtggtaagacaaaaaatagagaaaaataattcagtcgactgagaggaaaaaaggctttttccagaaaaacttttaaatatacctataacttgaatatccatttttaattaagctgagcactctttaagaaaatccttttaaatccctttttactcgactttagccatgccaagcagttaagatttttgacttttcaattttacaaaaagtaaccttacaggtgaaaccaatgagccttaattaggttatgatttaaccgtgagtgtgcaaggcattttcaaaggagggtaagcagcttttgaaactatcattgcaaaattgtaactgagacagtgaaagacatctgacccaaacagctccattttgtttccagcgcccgagctgtccttgcccatccctggggacaggcttcaccaactttgggaggaacctggtttacagtttatactttaaaacaaagatggtaacagctccttcttaagatatgtttccagggccgggcgcggtggctcacacctgtaatcccagcactttaggaggccgaggcaggtggatcacgaggtcaggagatcgagaccaccctggctaacacggtgaaaccctgtctctactaaaaatacaaaaaattagccgggagtggtggtgggtgcctgtagtcccagctacttgggaggctgaggcaggagaacagcgtgaacctgggaggtggagcttgcagtgagctgagattgagccactgcactccaggctgggtgacagagcaagactctatctcaaaaaaaaaaaaaaagatatacttccctcttgcctgggaacaagaccaaaaaactagccagaagtcttgaaaccatcccttaggagtcatgcagcaagagactatgagattttgaccctccctaaactgctttcaagatcagtgcttaagatattttgtaaactctacccttgatgaatcagctagcaccacccgattgacaaactggcttatatgattttttggcccttactcaggaactgacttagcacaagaagacagccaccattgtaaaaaggctgagagtaaagtatattattgccatgtagttacaggtcatgtatccagacatgaaacaagatggaggcctgtggccaagtttgttactattatgttgggctggcttgaaccacagacttgtggggtcctgggcctgcatcctaacctaaggtatcttttctttgacagaaccatacagaaagacatgcaaagcacaccaaattgtctacagcttaagatcaacaaaaatcctttttcattaattataaattcacagagaatataaacaatgatccttattatcccctttactggctcacacagggagagagaagccaaaagcccaactggtaagaaatttttacccttttgccagcatatcacacttctgggttcccttccccctagctcaactctaagccaagcatttttaagtttggaaaattaacttttcccaggttaaggggacattataaaagagatagaaccattataaaccataaaagaagaaaaaatactacagaaaggagttccaattacagttgttatgaggtatcgcctctcttcctattgggaatggtgttttgcctatatttttgccttccctatttttttcttttccattttggcacactataggagacatattacttatttccaaaattctcatctgcttgcagagctgcctattttagctacagttagggtttggcttaggagcagcataactttcctccatgagagggaaaataactgagttaaattttggaaagcttctatatagctatcagggtggtcagaaaatcagcctaagtctgcctttacttgtctaaagtcctgcaatgagaagggaacttgaaggcacccccaaataagggaatcctcaggtggtttcccaggaccttgcttttctaattttggggaattattctctttgggcctgcctgatatgattgctaaaagagctgggttgattttgcaacacttgcaaaggtctagtacaaaggccacactcttgtgcaaaagaaaataagccactttttcttcaaagtttcaaggatgaaggagtcccagtgcttcaaaatacactccaggggagtgcatgttgaagatgatctgttacccatctaaaaacagaagtgagaataaaagtgtccttttagtctccttcctttcggtattgtgatcaaggatggagaagaaaacagtagagggcattcctcaactattttctgtctttggctcctgaatcctggcacccatttaaatgtgccacccatgactgcagacatgaccctataagtcatggccccagaggaactaaacttttgggccttagtcatactgtccacaggcagtcttagtcttctgccttttatttccctttgacctcctagacttgtgtggcctgcgtgccttccaaaaaaaaaatgaatttcaagaaaaatcacataattgggcaaggcccctttaagggagggagcatgctagattgaactctatatcctgctatgatggcctatgctaaagcatttacccatagaaaaagggttctggttaacttccagacttagaatccctttactaattaagcactgtctgaataggagacagaataggtgccttaaaggaacacgggaattgaatggccattttctggccaatgggacaatcaaggagtagctaggaagcagggtaacacggttgtagtagctaggaagcagggtaacaagaccctaggctgcacacaacgcggggaccctgggcctagtccacaaaaccattttttcctcccaggcttccgggcctgtgataggagaggctgccatgaagactcctgacaagccctggagacatttttctcattgtcttggagattaacaatcagctcctcattacttatgcaaatttctgcagctggcttgaatttcttccccaaaaatgagattttcttttctattgcattgtcaggctgcaaattttccaaacttttatgctctgcttctcttataaaactgaatgcctttaacagcacccaagtcacctctggaattatttgatgctcagaaatttattccaccagatacaataaatcatctctctcaagttcaaagttccatagatttttagggcaggggcaaaaatgtcaccattctctttgctaaaacatagcaagagtgacctttacttcagttcccaacaagattctcatctccatctgagaccacagtagcctggatttcattgtccatatcattattggcatttttgtcaaggccattcaacaagtctctagaaagttccaaactttcccacattttcctgtcttcttctgttccaatctctgcctgttacccagttccaaagtcaattttacattttcaggtatctgcagtagcaccccactctgctagtacaaatttattgtattagtcccttttcatgctgttaataaagacatacctgagactgggcaatttaaaaaataacgaggtttaacagacttaaagttccacgtatctggggaagcctcacagtcatggtggaaggcaatgaatggcagcaggcaaaggaaaagagagcttgtgcaggggaactcccccttataatgggtggggacacaggcgaaccatatcagaccccaactaaattccaagtttccagagttagtagacatgagagttttcaggtacatgggtacaagagagttttttctgctgtaacccatgactgatatttcaaaaattattccatgaatgaaaaaaaaactacatgaaattatgttttttgaagattttctctgtgaaaactattcaagaaaattgagtatagaatgctccttaaaaccattgttttgaattttcttcaatgtaattgtctcgcttctaattatacaaaataatatcttgaagacaatgaagcaatatatgacacataacccattatattcccgattaacaagtaatatggttgttaggtcatgcagtaggaaaaagactatttgggtataaatctcagccccaacaggtattgattattttacttttatcaaattatttaaacttataatgacttaagtttccacatgtagaaaacagaaaaaactattacctattttatgtggttgctatgaagattaaataattaatgtacatagagtaagttgttagcatgttatatgttagctttcacttattttatgctattctaatcaaaggcagtaagatgataacccatactatgaaccataaaacaacatttttaaaaattttaattagtattgatcttacccatcccagattcccmatggcgaagattgagaaaaacgctcccacgatggaaaaaaagccagaactgtttaacatcatggaagtagatggagtycctacgttgatattatcaaaagaatggtgggaaaaagtmtgtaatttccaagccaagcctgatgatcttattctggcaacttacccaaagtcaggtaagggtagcaaaacataaaaatattcaatattttcacgtgaaattattgcataatctgtattgataaatgaagyatgattgggatttggagagaaacaattcctcattatggagatctgttctttggtgctgcaggacatttagcattcctgatccctaggacaacaatttccaatagcactctctgaagagaacagaaaagatttctaaatgctttggtagtagggcagataatgctcccattccagaacccatagcatacatcaaatataaggtcaacaaattgaaagacctatggcttttttaaacatcaaccctcaagacagccttctaaaagcatgtcctactccaaatattaatctattatctcagatattaaacacaaattgattttctaatcctctaaagctcttggaggatgtcagccatgaattttctgctctgtaccaaattagtctcattcagaaaagcccaatgactgaccttgatttaaaatgccttagatttctaattcttctctaaaaattcctagactggaacacatgctagagtcaatgggcacacctaatgcccagaactcactttcgataggccattctccattaaaatgaaccacagctattaggagaattgatgatcccactcttgggaatagaatatgcaaggggaatgtactacatcttctttttgaaggagtaagtgatcagtatatattcccagaattgtttgtttgtattaaatgtctgtaaaaataaagcacacataataacaaaaaaattgatggggacatgtagaaggatacaagaaccaacgtgaaggggctctcacagtagccacatttgggacagtttgagcatccaaaagaatgatcactaactgattgggagaacattaaataaaaacctcctggtcagccatgccgaagggacaagattggatgtgtactccagccataataaaaaaggaaactggataaaatatatgaaaccactggtttctgaccttggatgacagttgtctcaatcctcagactgaagatgctttctgaatagggtatagttatagggtgcaaaagaaaaagccatagcaaactcattgagttcaagagccaggtgtaggagttctgagaggttgaagtggctgctatttgcaggtaagagtaccagacagaaggaaactacacaaataaatacctttagatatctttagagaggacccttttagtttattgttgaatggtagactgcacttccatagagcctatagctccatgagatcaggcaaggaaccaccagaaaactattagccatataattcctagagattatacaagcatgagagacttttgtgctccaatcaggataggatggacagaattttggtccccatgacattagtcctctgttattacatctgccgttatttcagattacattcccaaaaggattttgcagttgctattaaactatctaatcagctgatattaaaatagggagattattctggactatcttgatggacccagtggaatcatgtgaacaggaagtcagagagatgtggcagaggagaaagtctgagaaatttaaagtataataaaagttcactgcatgattatagatttaatgatgaagagagaaagtatcaacaaaacagttatctcaatactacagccacaagcaactgaattctgttggcatctaggagcttggcaaaacaccctgaagtcccagatgagaatggcagccctagctgataccttgattttagcctagtgagaccctaaacagaggactagccatgttaascccaatttctaatctacagaaactatgaccgaatattcaggtgttgttttaactcatgaagcttgtggtaatttgttaaccacaaagtcttcaacctagaattccatatacccagtaaaaataatatattaaaatattactaaaaataaaggtcaaagactttttctctgacagcgaaaagctgaatgtgttgcccgcacagctgcactaaaaataaataaataaaaagttatattaaagaaatttattcagagtaacagaaaataatagtatacaaaactttattatctttcaacattccagcaacacacagttggaatatgacattttaaaaataccattgataaaataaatagcacctgaaaacatgaaatattcagaaatgaacttaacaaagctgtgcatgatttgaaagtgaaaacactacggagagaaattgtataagacttaaataaataaggaggcataccctatctacggatcaaaaggatcaatatttttaagatatcaactgtttcaaaattaatgtataaattcaatctcaatcacaaactgacaaattgattccaagatttctatgaaaatgtcattaaaagcaaatatttttgatagagtaaagtggcagggtttatattaactgatttcatgacatttaactcagcttcaacattcaaaagactgtgatactgttgatattgttgatagacataaatacttgacccttacttggtgccagatgcaaaaaagtcaaagtgcaatgcatcagacctcaaaaaattaaaattaaatctctaaaactatggaagtatagataggagaatagcttcaaactttaggttaggcaacaataatttggggaaaaaaatggaaagcactaccctttatggtttgcatttaatgtaaattcaatataaattagacttaatcaaattaaaacttctgttcttctaaagacccagttaagaaaataaaaatatgtgacatagatggagagaaaatattcacaatacatatatctggccagaaggtataaagaactgttacaactaagaacaaaaaacaaaaaaaaaatgtattaaagtgggcaaaagatgtaaaaatgtatcaccaaaaaagctttactattaaccaataaacacaagatattcaacatcatttatcatgagaaaatgtaaattagtactataatgaaataccactacacaccacttcaaatggctaaaaacctggaaatactaagtgttgataaggacacagagcaactgaaattctcatgaacttttggggaggacctaacatggtactaatgttgaacagtttgttataaaactaaacatgcacctaccacacaacccagcaactccaatcctagagattcacccccacccccaaaatagaaatctatgttcatataaaaacttgtacacaaacactatagcagacttattcaaaattagcccaacactgaagaaaacctaaattcrtattgtcatataaatgaataaacaaatcactgcttatccatacaattgaactgttctcagcaattaaaaaaaatgaactacagatatatacaagaacataaatgaatcccaaaataatgagggtgtgtgaaaaaattcagacacatgaggacaaactgtatggtttcatttatatgaaattcaacaatgtgtaaaactaatttgtattgacaaaaacatagatcagcagttccgtggagtcggaagtgaggaaaagaattactgatagcaacagacacaacgttctactcttatctatggtaatggctacatacatttgtcaaatttccttaaactacacatttataacaggttcattctattctatgtaatttttaccacactgaagtttatttcaaaaaacgtgattccataatgatgaaaaatacaaaaagaaaawcttatgtattatgattgaagataactgttattcatctcttagactaaaaagaagtaattaagagaaagaatttagaggaattgcagttcttccctgatttatgagggaaagttctttatatgaagatctacctaataaatagagaagtgaggggattagaaaataaacaatttgaagcccacaataaaaattaggtaaagtaggatcattaatgaatgaatcttaaaataattagataaaatatgaggagaactggctggtcacatggtactgaaatgtcaccacatagttttattcctaaaagcaaatggaaatatgggcctttacaatgagcgacctggtggtcacctacaaaactgaatgatgaacagtagtatcactagtagtgaggcaatcagacgtatgtacttcttggcatggtgcaagaagtaccaagcactgcctgagaaatctgccaaaaatgttcgctagaacctaatcaagacctggattccagtttatgggaaatagaggaaatagaggaacaaaaatgtactgtgaagaaataatcagacaaatccagaatgtggggagtactataggacagctggctaattcgttcaaaaaccaatgtcaaagaacaaaaatcagtatcattaagaaaaaatatggaaagatgattctaagctgagacaaaaaggatagcaaaagtaatgcagccaatacatcttaattgggcaaaagtgattaataacattatgatacaatggaaaaaaattaacataggttgagtatctcatgttattaaggatttattataaactagatgtgatgagaaacatttagtaaccatgataagagaatgtcatattggaagatacagcatttttggcatgaagtgtcataatataggaaatgtagaaatggttcactcaaacatgatagttgagagattaaatactaaaagatgatagatagatagacagataataggaagatagtagatacatacatacatacatacttagatacatagatagatacatagatacataaagaaacagatgatagattagatagatagatagatagatagatagatagatagatagatggatagatagatggatagatagatgcaggtataatacaacagttttcatttctgccttggcaacattgatctaattttaaagtgctctcatrttgctgtctttcttcaaaatattcaataacttagaatgaaagttcaattgactaaaattaaagaactatttcaaatattttcaggtacaacatggatgcatgaaattttagacatgattctaaatgatggtgatgtggagaaatgcaaaagagcccagactctagatagacacrctttccttgaactgaaatttccccataaagaaaaaccaggtgagtaatatgcacgaagatagaaaggactttcacttcaggattccagagcaatgtgtactgtctctgatagagcatccgtggtagccagaagtagcctgtatctttcatgaggtctatttgttctcaggccaacaatcaaactctagattgggtcttcagggcttcctcctgttcttagctggtggcctttatctccccaataagattttcattctctttctcatatttctcctacccaatgttacgataaagaagactccctctgctttgtattctccttcatatgtttgaatcagtggaaaggccagaaattagcaatcagctattgtaaaataacaggtgtgatttctgaagaaaaaggaggagaagtaggggggatataccgtggacattcccagaattaattgggggagctraaaaggtttcctcagagtgtaaaacccagtgaataacatgaaataaagacagacctcctagaggtctttctttccaagaatgacaacctattgtaaaaaaatggatgtaatttctgacaaacaaaagagagagagaaaaagagaaaggaaaaaaacaaccagatatataacaaacattcccagaattaatcgagggtgaaaaagagctttcctgaaagtctaaaagctgagagaataagaggaaataagcaaaactctcctagaaggttaggcaggattggatgctttgtatgtccttgtggataaaaaattactatttccaatggatataaaacaaaatataatcactctacagacaaagatataaatggaattcaagtattttggcagagtgccaagaataaacaaagaatataaattgtttcttgctagatttggagttcgttcttgaaatgtcctcaccacaactgataaaaacacatctcccttcacatctgattccaccatctatctggaaagaaaactgcaaggtataaagagggggcttttcaaamttctcttagcttggtgatataaactatacaactgaagatatctttcaaaataatatactttgaaaaatattttccaaaatataatttgctatttttcttagatgaagcacttaaaatcaaggattacataaatttgaaatctgcaaacatccatgttttctaaaattcattttcctctaatcctatttcatgaaaaattcttggtaagattttccaaaattgagtctgtgttgctacaaatcagagagtgtattgggagctagaatggagggaaacacatttaaaaataaaaccctgttgctttgctctgccaaagtactagaagatattctcctggcctcagaagcagaggtatagaatctgctcttgtcaaggcttccacacctccataatctactcaataaactaagctcaaacctgtcctcatttttatccccctcacctctatgtctgatctgtcacaaagtccagttcattcttcccatccttctaatctgtgcactacactgcatcactaccacctgtacccaactcagctcactgctctcttttgcctcccactttgtcagcctgcctctagacctgccccctccaacccctcctccctgtaacctctactcttcctaaaacacaatctgactgaggtatttccccactataaacacttccacaggtggacgaagatgcctccatatcctctatatgacttccatgcccttgacagtctgcaccctgctccatctcctccccagggtcttcccatacctgatcctcactacagtcctcctgaaatcctgcaggtcctttcacacatggagcatccccacaccttccacatgctctcatctgactcaagcatctcctcatctttacttgcataattcctacttgttcttctggtcttttcatagagggcccctacaggaagcttctgtgaccccatggctgagtgagtttcatgtatctatattggggtatctgtgcatgtgtttccccatcattttgttcaccacattgcattataattttctctcttcttacctcactgatcagactgtgagctcctgacaggcagggacttgatcgtgcccaatttgtcaaggtaaacagtgtctggcacgtaggaagagttaacatctctgttctgcatttgttgactgaatgatactgaatttccaatcatcacatcaccatgcccctctgtcctaaccatgtgagatatgtgtgtgtgtgtatatatatatatgtatgtatatatatgtatatatgtatgtatgcatacatatgtatgtatatatgtatgtatgcatatatatgtatatatgtatgtatgcatatatatgtatatatgtgtatatatacacatatatatgtgtgtatatatatagcaaaatcactcaaatctttgagaaccattgtctgaaacattcctcatgtgagtctcatacaaatatcaaggaactagctctggactcagtgtcccaatttttgtgaccaggcatgacccactcgtgtactaagcatggattagtggtagtgcctccaatcctctgaaggtcatttacttcttctgttgaaggataacacctattctctccttacctaactctaatcctaataggagccaaatgagatggtatgcacaaaaatgttttctcactctctagtatttcccctgttgtaggaatctggaaaatttctctcaactcattgagacacagctgaaactcaccatttcatggcccattccctgaatgcccaggaatgctttgtcactggctccatgattactcagcatatcacatcatattccatgattgacagtgctgtcctaataatgtgttcatcttcctgcataaccaggaagagtggttcctcataaccactctgaagtggggcactctcatttgtctttgtgttctccatgggtatgagggttgcagagtcaaaaagactccatttatttaatgttttaattcataactaatgtatctaatgctataaacttataggatatggttaccattgtattgaaacactcacttgagtatttcatgtcagtctatttttctctccatggcttccttccctctccttgatttcagattgtctatgtggccagaaatcccaaggattgcctggtgtcctactaccactttcacaggatggcttcctttatgcctgatcctcagaacttagaggaattttatgagaaattcatgtccggaaaaggtgagttcaaactgatctttttggtaccctctttcaggtgactctaacaataagcacctctgtaaactggaggagaaagttacaaaaggccatcctgattgaggaggtcctatcttgatgatctgggactggagaagccaggtagaagaggtatttttccaaaattgagtacaaatgtaaattgaggtcaactggggtcataagttttgagacaaaggtaaaaagccccaaatccttgacttgagtttcaaacaatcaacttcaaaataagaagaggcaacatttcctatggaaagacctggcagtgggaaggcatgagatgatatcctgcggtttcatcttgcagtgtgattggatggccagaccaccacgtatagttacaaaagtcatacactgcacagccacagacagcctttcccgtaggtcacagtgcacaatcttagacctgttcacctgcaggaacctcacattagaattagcagccatgacccctcatccatttattaagatcacaccttccagagaagcagtgaacacattagggccacacttttcaaaatagcaattgactagatttgaccaggtgtcaaatcagattggcaaggatctcaaacccttcacagaagaagaatatctcatgaaaacaacaatctctagacagaagaaagataagatggctacataaagtgatttaggatgtaaggaccatctttacatatttgtatgagcattaatgcagaaacatgattatagtatttcattataactgcagtgagcagaacctagacaaatggataaacattacatggtgtctccaccatttcactaacgtctctcaaataattagaacttccataagtgaaatgggtgagttgtgatgctgagagctcccagtccttgagcaacctaactatccctgagcaagtgtgttagggacctgagcttcattataaccagtcctgacatattcatattcatattcttttgaggaaaaagaaaaatcaaaatgaagtgacttccacaacatgacctgaataaaaacagatatctgtggaaaagtcaataaataataatttccatcaagcatgtctctccagtgaatcaagagagataacctcattagaacattttctctagaaacataaattaaaaaggactgacagatggaaataagaaaaatagcaaatctagataggactccaggtgaatagatttccaatatttatgcagagaagttttgagagcaggaaaagtaggaggaagcagaggaagacaggawccaagcttcttttcttatatgattttttccaaggcctacattttgttactgtttttttgtgtcaacttggctggattgtgacacctacatatttaatcaaacaacaatcctgttgtttctgtgaaagtgtcaattgtgtagttgtgatttacatctataatcagttgactttaagaaaaggagataatgttaaatattaataatatgggtggtctttatgcaatcacctgaaggtcttaagagaaaaaaaactcaggtttccaaaagaaaggattctgcctcaaggctgttatatcaaatcttgcctgattttccagcatcccctacagatttaaaacatgccaagacccacaactgcaggagccaattcctttaaataaaccatatatacataatatacattatatatgtacatttatctatatgtacatattacatagccattgcctaaaataaattatatgtgtacacatttatattatgcatatatataaaacatgcacacacatacatatacatggatgagtcccctttatacttggtttccctttctgcagttttagtcacccacaatcaaccccaatccaaaaatattacagtatttcaagagaaagaaggatagagagagggagattacattcacatagatgtaaatatattagagaatattgttatagaagctctgttttattattagttttgttgtaattcactcacagtgcctaatataaaaattaaagtaatatacacatctatgtataggaaaaaacataaacactattatcatataatttggtactatctgtggtttcaggcatccgctgggggtcatgtgatatatcccctgtgcataaggatgaactaatgtattctttggatttgcctattgctctgtgtctctggagaacctggctgacacagataccagtcaccatgacacatgccaaagttcaagtcactgcaaacttacatctctgtttgtcctgattcaaaagagagcatttcacacacttgctcacttggtctgtggtcattttcctctggagaatgttttccatcatccttcagacgaatcttcaagtccacttagcacaatgcttgcaacatagctcaccctgaataaagatagctcctgtgtttataatgactgcccagaaccaaaccaggaagctgccagaagttacaacctatcagggacactaaaacatccctgggataaaatatggtgctggctaactcaggtgtccactcattctcttaccaactagtgaaaagaaaatgcatcccatgtttaccacgtagacacagcctcagctggaaatagaagttctcctggagggcacccctctttctgctgctgctgagtctcttttggaagaggaacttgcaaactgcatagtgcagctatacagggaaagcagcaggaggaccctacccatttataggatggcctgaattagttgagtctgaaactaaacatggtttaccaggaacaggggaagaattttattgccgaatgttttaagacatgtcacaagacatagtcaatgtgtgcaaagtcacatataataaatgtgtactataaatctcggctttacaccatatagacaaattttattactagaaaattatttccacttcgttaaggaaccagaacgawagttacagaagcttatttcaaaggagcactaatttactttatagccttgggttttgtcccagtactgggaactaacagtgctctgacttcttccagttgttggcrggtcctggtttgaccatgtgaaaggatggtgggctgcaaaagacaygcaccggatcctctacctcttctacraggatattaaaaaagtaagtggcactgagacttataggtcagacccagaaaccctcctgacaatgttattctgttaaaaagctgtgtctttaattggccaagttcttcttctttcctccctcttcacaatgcctttttctcccatgatcagaatccaaaacatgagatccacaaggtgttggaattcttggagaaaacttktcaggtgatgttataaacaagattgtccaccatacctcatttgatgtaatgaaggataatcccatggccaaccatactgcrgtacctgctcacatattcaatcactccatctcaaaatttatgaggaaaggttggtggcatttcttttccttaactgaactctaaaaaattttctaccctatatgctaaaataattttcaacctaattttcaggcagaagtgactcatttcagttaaattttgaatctctgctcccttcaccctgcctgtttgcagacagccaatgtcagtggttctgaaacttgagtcacattagaacccctgcaggccttgctaaagctctgattgctggtccccactcagagatactgattccacagatccagcagtagccctcaaatttgcttttctctcaagtactcaggtgatgctgatggtgctggtcactttgattacaatacccacctcaaccatgaacttccctttgaaggcttgtgcatcctctgagcagctttgaacactcatctttagtctatccctgtagttcaaaaccctagctaagcacttagtacttggatttgtaactactgatattcatgtctgtctccaaaataagatgataggctgtcctgaagagagtgtagtgttcagttttgttccactagaacctagtatagagactcatacctcaaaacaactcagtaatggcctgttgtgtgagtgtacagatgaatgaacattatttctgtcctcaacaagttaacattctagatacatgcaaaaatagctgcaaaaagttataaacaagaaagtaaagtggaagctatactaggaattccctaataccagttctcctggctgtatcaaaattacctttaaaaacagtgaccccattccagaacattccaattaactagttgcaagctggaatctagaatttgatattatgggcaagcatttcagattaatcctcttgtcaaagggtaggaaaccagtagaaataaagtactaggataacttagagaaacaattcattagtacagcatttgttgggctgacaaggtacaacagtttgcagaagatccctagtatccaaatgtcatttccagtggatttactatttaattttacccaacaagtaatatcttctacaatgaggttactgacatcttgtaacgtctttcactgtccctgggagaataagataggctgtcccccaggaagtccatgatggtaaccagctgtagactttgggttgggtacactagagccargagtgtaccctggagcagaagattcagcacagtggggcacctcagtggggcctgcagcatttgaggaaggagtataaggatgctgtgtgccttgtggtaagaaagccaagtggagtggaaatgagggaccattcatagtggaaagaccagggggagtgggactgagggaccctcactcatgggaaaatcacgtgggtaggcytaggaaccattcactatagaaaggttaggtggaaygggtgcagagtctgtcatgaacttctttgatgtcctacagggatgcctggagactggaagaaccactttactgtggctwtgaatgagaactttgataagcattatgaaaagaagatggcagggtccacactgaacttctgcctggagatctgagaggaacaacaacaaactaggtgacagagactatgccaactatttcgccttttattctgttgagcaaggaactgtgactgaatgtggagcttatgagcttcagtccatctcctatagtgtggctagtttgctataatattaaaacatgatttaaaatatcaacaaaccagttactccagtaaataaaataagagaattagagagcagagtccgcctacatgagtttttttgtttgtttgttttttaagtacaggtatgttttattgtgcatgacagatagagcaaaaacaaacaattgcatcatggattcccatgtgtgatcccaagtagatttcacaagaaaattatgcataggtattacaagccccattgttaagagagaatgtaacagcttgaagtgtacattctatacttttatgtataaataataacttccaagagaaaagagctgataagtacatttcagagtcaccatttctgtaatagaatgatataaaaataaattactactgcaaaatatcaatcaattgcaaaatgattactgctctacttttggcttgtaactaattttctcaatcgaaagagtttgagttggagaaattagtcagtgagtactcctgtaaaaaatcttcccacgatataaataaaatgcttaatgtatctaatctataaattgagatctgggacaaatgcaccatgactatgcattgccattctcttaataactatgcattgccattctcttaataaagagtctctgttgcatcactctaacaataggtatgacctcagatttaatataaatttagtgcttcaaccatgcaccagtgaagacctggttttttatatgaccaagtacaattgtcttattagaagagaaggtcctgaggggccttagggagtaggtggatgccaacagggctgatggcctcagagatgacagcatgtaacatgtaagaaaggggggaaatttggaaagacttaaactcagaaataaaattaaagaagtgtaaaaaggtattcaattaacatcttgaaagggaatcaggaacaatatacatagctcccagtacacagagcaaagtaacctccctgtggttgtgatcattgtctctaccttatcgtagtgacaaggcagtgctattgttacgccaggcaaaggggaaatgacatcctattctctagtcaactggatggaagacaaactcaaaggtaaaaaatagatgatgagattttaagaaaagagagcagctggtccctaaggcctgctgtaaggaagcagagaggatgaagatgggggcatttgaaccagcccagaggggaccctggggtgaaagttccccatcaggcattaccccactgcctacatccagccagataacccaaccacctgaattaccatcctcatatttagttggtgatccagagaagagatttcctctagtattccctaaaggtatagcaagaaaaaaagagattccttgatcactcctgcctagtcaatgcactggaagactggttcacagggctactgtgctttgtaattggagacatgagaatccacaatgattagagagctcgggccccaggtactgtcagagtccacagtctacctcagagaggaggaggcagattaaaggaaaagcaaatttcattttcctactcagaaatgattttctactaattgaaaagcaattgaatgctgtcaataaagacatttcctgtactaaccttggactcagagtattgatgaccaactatacaaagcttatttcttccatgcaatggatgatacctgcctgcctttgcaggtattaaggggtatgatgctgagagtccaggtgtagaagatgggatcacgggttttgggcaaagcattttggctatctaatgttaagaactgtaaggtttgagaatgccttgatgaaagttcgtaaaagctacaaacagagttgctggtcatttctacaaggaggctgtgaactgctcttcatcttctagaggcatattttggctatgggctactaagattcagacaggtgtaagatatagtttgccccatggcctcccctagaactttccccaatgtgactgttcctggactaaactgagggtcgggctgctatttcctgtggcccaataacaagatgcagatgaactggggaggaagagaagttttatttctgtaactggttacattcagagggcctggaaattatcaccaaaccaactcaaaatgacaaaatttttcagagcttatctaccttctaagctgtatgtctacatgtaagtgtgcatgccttctaaagacatatgtgattaatttattttaatttataactaagatctgagtcctgaagaccttcctctggtgcctaatgaagtttgcttaatttaaatgggtctccaggtactgggttgatcacccttatcttgtctcctgttaaactactgaggtttggggagttccttcagacctccaataaacgtgtttgtggaggcctggggagtttcttcagagccccaataaaacttatataatcctaactgggtactgttaagaactcctttattattttgtcatgttgtaaggcccaggaaatgcctaggcaaaactctggatgggcttttgttacatttcagcctttgcataagggcactggctttttttaatatttaacttaaccactcactgaatactgaaacagttgtgatggaggcctgcattaatgcaacctgcctgccacaatccccactgtcaatttgtgcataattcttatcatgctagtatatttatttatcatgagaattgtagggatatggggcattgtaatatttctggctacttcctgctgagtgagtgtcattgttatgggacactgaatgcagcattggtataggggaggtctatttgttcccagcagcactctttgtttcaggggcttagaggcagcacctgctgaaacatttagtcttcagttcacagggctttaagaaagcacaacttaggtttcagtgatttccagttaggaaaaatggggtagtgcatgggctttcatgcagaagagccttcagtgcaagtccatgacaatgtttgcaactcagttttatcctcaaaagctctaactactttttcggtattctaaatctgctttgctttaattcagttttcaaaatattcttcttcctcaggaaatagcacatgctttatagttgaatgaatctgttggctcctggcacttgtaagccagatatctttatctgcaaaatggtatcatatctatctcatgagatcattgtaaagatttacactatcatacttgtaaagtgtacatagttgtgttcaagaaatttagcttccttctccctcttgcacacctcaaccccacatcataaagcaaagtttaatccatataaacactggtaggattagtcccacatattgggacagtggactgatttctgaatttcaaaccatcgtgtctgagtgtctgcacaaattcactctcatgacccagtgcatcagcatcctagaattacaaaactagcatctgagatgtcctcagaaatttaatcaaaagctatagctttctctctttctgtatctctttgatcaaaaagatccaagaaataaggatctatgcttctgggtcaacttgagattccttttattcctcctcttagtgaccttctgttaagttcataggttctttttgccatctgttgtagtccaaatactagagttagttatactatgcttcaccaccaacattgttcctccttcacacagcctttcctgttctcccccaggagatatcattgctccttcccaccaaatctcctggcactctgtctgtacgtaggcagcatgtactttctcagccagccttgtgattgtttgtgtttatgcttaattcctttccttcaaggtaagcctcttgagggcagggacaaccctcatctttgtgttgctacagtatctgggacagtacagtgtctggcactaggagtcacttgagaaatatttttaaaatgtgttcaaatgatcctttaactcatttctctccaaatactgtccaaatggaacatcatccccaagggaagacccaacatgatttgtttggtgtgactgttccacatacaggacccaaagcgggaaattgagaagatactgaagttcctggaaaaagacatatcagaggaaattctgaataaaatcatctatcacacctcctttgatgtaatgaagcaaaacccaatgaccaactataccactttgcccaccagcattatggaccactccatctccccttttatgaggaaaggtagataagctttgtagtctaagatgtcaaatggaactctgtggtccccatggtctgcttagattttccagtaatgtttcattctccattatttattctttccagcagcaccactgtacaacctttgagaggcaagttgcctgtttctcctcattcttggtggggtcctaagggtgcatgcttacctctccctctactcctgcagcaatcattaagattttgccttgtttcagggatgcctggagactggaagaactattttactgtggcccaaaatgaagaatttgacaaggactaccagaagaagatggcaggaagcaccctaaccttccgcacagagatctgagagcagtcagggagtctgtcctggactttcttaccagatttttgccatttgagcctcatgatcaaggacacttaaaacaaagacacccttcctccagtctggagctgttacacactacctgtagatgataatacttcatcaaaatgtaaccaaatcctgggtagagtttttaattaagatacatgatccctcatttagacaccaaccacataacgtactcccctgtcctaaggcaaaataaaggcaatttagttccatcactagtttacaatagtgaaataaataaagagataaataagagtagaatttcaatgtaagagaaagtgagcaagagaagaatgaggatgataagtgggcactaaggataatgtgtgggggaactggtttttatttttaaaggtcaggaatgagaggcagaggatagtcctactcttgaagatattagattaggaggtgcagggggtggcatgaaggatggaatgctgtgagctgggtctggctcaggtggcttcaagctgaaatggtcccaaaaccaaagagaaaggccacaggagagcgataaggaacacaagatgaacaagaaactcagcctacttctgtggccaacacaaggctggaaagcagagaaagattttatctttcagatggacttctgagagagagaggaagtcttcagtgagctcaagggaaaaataaaataaaatatttggtaactcatggacgttaagaaaagcttaaatttcacatctctgtggaaaatcgttttttatacttttttttaaagggctcttagcaaaactgtcagcattgccaagttcttcagctacactaatgattatgttcttttccttctttttgttaaaacctgtaccaagaaaatatctgccatcattttatacaagctatacaacgatccatgtatcattattcttttaatgtcaggaaggtacattttgtgggataggtgattaacttatcattaaaccatacaacacaaaaaaatatctactccacccagtaacaaagtatacccctttgcattctttcatctttccctctctagggtaagcatgcaaatcattaaccacatgacaaatatcccagtatagtatttatgcagagttccggcctgcactgaggaaagatatggtgaactgaaccagcatgattcaatagcaaataaatttttatcaggaatacccacaccaaatgtcttgggttcatgttctaagagctgcctaacaatttagatagcaagcacataatcacatagtgactccctttgtgactgtgatagaaactggatatatgggcagtattgatcagaa

SEQ ID NO: 94130 - DNA, 823284 bp, Homo sapiens
  misc_feature (1)...(823284): n = A,T,C or G
agtggtagaactgagtagttgtgacagaggctgtgtgactacagagctgaaaatatttactgtctagtcttttatggaaaatgtttgatgactcctgtcttagagagtggtggtgtttgagtcacctacatctacgttaatatatatacagatatacacatacacctacatagttcaaatacagtgcctggcacacagtgggagcccaacgaatcttttagttcctctacaaaacttaattcagctcaagaatacacaggatcatatctaagaaatgcagaggaagacacatttatatttttattgaattctattcctctctcattttcaaaagaagagctcatgttttttaaaaaaattctgattgacactataaactttatttatgctttaatgtatcctaaagtatgtatcctgcactatttttacttcccttacagatgctgatatgctatacactaccaaacccaaatggattttcaaaatccaatttccttgctacagttttccatttctctgttgactttttatgtctgattcacatcagagcatctggggccattgccacattttgacctcagcctgcccagggaaatagctcctctggggaggtgctgggtccttggccagtggctgcacttccctgtcctcccccaattatgtggatcttcaccaaacctcagctgagcccagctcctgggatgggggtagattttttgggtttccttcctcccaaaaatgattgtggtgaggtcgagatcacttaaatgatgtcatctgctcttcaaacctgaatgaggttagcatccagatgagtgtctttggggactgtattagtccgttttcacactgctgataaagacatagccaagactgggtaatttataaagaaacaggtttagtggattcacagttccatgtggctggggaggcggcacaatcatggtggaaggtgaaaggcacatcttacatggtggcagacaagaaagaatgagagccaagcgaaaggggaaaccccttaaaaatcatcagatcttgcgagacttactaccaggagaacagtatgggggaaaccacccctatgattcaattatctcccaccaggtccctcccacaacacatgggaattatgggagctacaattcaggatgagatttgagtggggacacagccaaactgtatcagggactctctggaaccataaatctcccctaagctgccataaacacctgcagcaacgtctggggcctgttttggttatggccactaggaattgctccaagacagatagatgttactgggtttaaatgttttctgttctcggtccaggggaagcttggctttaatttctcctcctcctcttggtggctctcagtggcaggacaccctagcctgtacttgtgctgactgcatgggtctgtatctctgtggtttctgagagttccagttctttctgaatctctggatttcttaaatgttacaagtggaaggttcattgcaatcatcttgttcagccctttgccttgcacagcagaaaatgaaggctcagaaacagggaagggatatgagcccaacaggttgtacccagatgtcagtgtcagttgctattgggttatgtagtcttgagttcatagccactctgtttctcaatgtgggagacagaaaactcataaaagttgcctaaaaatctcccctgaatagttcttaaaacttacctttgagtcaagtcagaccaatagggagtgggtatccagactgcattgcgttgggccccaatgagcttttactgaattgtgtgtttaggtgatgctatcaatttatattgagaatgatgatgagaaacagtctcatgaaattggccattcagccccttgtgcagatgttgtttcattatgggatatggggtttctgttatgagtattcctgcagagaaattcttgtctgatcaaagcacctgaaatggttgtcatttccctgagcaatttggcttttattataaaaacacagagtgtccagtaccttaccaggttttgctttttttctattgggtgtcagaagctcagagctatatatgtaacccccttttagtaaaggaacacgtggaaaatcgcagcatagatttgtggctccctccttctgtcctgcttttctttcttttcctgtcctcaatttgatttttgtcatcatgcagtatttcctccttctatgtttaacctgctgctttggttggaccagtgaccagttaggcagcattccttgaaattccctgctttgctgggagcccaagggctccatggaagaatcatgaactgtgtgtattgctgggattcagacatgtatgagtgataaaagtgcagaacaggagcccatttctagaaactcttctgtaggagggacattaaggtccccagagtgaccttacggtccccattttctgtcctgaatgcataagtcatcccataagtgatgacaaatcctggcagagtggaatagaattgacagtggggcctgaatattctgaagaaatagtggctcaagatagagtggaaagctgcttttaaattcactctaagtgagttcttctgcagaggcaaagagaggactgtggtttgaaaataaaaattgggtcactgaggtccaaggcctgctgctgtggaaccctagtttcaaagagcagactgtaagaagggaaaagcatttgcttacctgctgcagattgaagtgaccaacagagctcagcagaggggagaagcaaggtggttcagtgagtgcctgtgaagaggaggtacatccctagtcctcagagggccaggacctgtcagcagtcagctcagtatcagctgagtgtctacctacagttaagcagaggcagggaggtgaggggtgggcaatggatccaacggactaggggcaagtgttaatgtgaccttgcctgggatctgtaacctgggatgcctagaggtatagctgtgagccttcttaaatcttatctagaagaaggaagagaatttggttaattaaaccatcaactaaaataataacttgttttttttagcatcaacacatacataagaaagcatattttccattgcatcttcagtgtatatttgcatgcttacctttcactctattctgcaaactttgtgagggtaaggatcatatctgtcaattctgtgccatgtccagagcccattaaaaaaacttgttgaatgtttctagaataagtgaaggaatggatttgaatggagaggcccaaccaccttggaagttctttatctgcctggcccctcttattaccttataagtgaaagaccttatccttggtttgggggaataattctctctctggtctattaggatgggcatgggctctacagctatgctgccatggatttaatattggctccaacactttccttccatgttgcctgagcaggtcatttatcccctcagtgcatcaattctcttagatttaaagttgagataaaatgtacctcatgtggtttgtgaggattacatgacagctaatgagatagtatatgtaatcggtgtcgaatatgttgcccaacacagagcaaatgcttgggagaatatgcttcttctttctttctttggatcactgtgttgaggtatgacacactttatatattagtcaggttgtacaaagctctacggtgctaacagttaaaccctaagatctcagtggcatatgacaagaaaagtttatattttgctcctgaaaagttgaatgctgatattcctggtcaggcgagtctctgggtggctttcctctacagagtagagatactcagtggggtgctgtcttaatccatttcggctgttataacaaaatgccttaaactgggttatttaaaaaatagaaagttattgctcatagttctgggggttggcaagttcaagatcaaggtgatagcagatttggtacttggtaaaggtcccttccttatagatggcaccttctatgagtccgcacatggcagaaggggtgaacgatttgcctagggcatcttttataagggtgcgatctcatttctgagaacagagccctcacagtcctttggaagcatctcccaaaggctccacctaatactattacattggggattaggcttcaacatatgaatttaaggggaacacgcacatttggaccatagtagttgctgaaggccagctcttctgggtgtccatatccaacaagaaaggaaagtggagaaagcttttctatcacaggttttcttccatggtgtttggactgtattctatgtcagatctgtcaacaggatgtccaccaccactatccagaggaaatctcaggtctggggtgcagagaaagaatttggttctttgcagctgatggagacaatagtgtgatgttaatgagcacatggccgggctagtgtgggatgaactgaataaagccatgtttgtttattttcttagtcaatttaggctgccataacaaaataccatgactgagtggcttataaacaacagaaattgatttctcacagtcctggggactaggaagtataagatcgagacattggcagattcagcatctggtgagggcccagctcctgcttctttgatggcaccttctccttgtgtcctcacatggtggaaggggcgagatagctctctggggtctctttataagggcactggtcccaatcccagtcccaatcatgtggagtctgccttcatgtcctaatcacctcccaaaggccatgtgtcctaatactatcactttggggtttgaaacttcagcatgaattttgcaggcattcacacatttaatctatagcagacattggttctctgtggggtgggaaacctgtgagcgtttaaaggaggaggatggtgatgtgatgcaccctgtgaacattaaagagacaagaaagggacattggaaaagatggactggagtgtgaaacaggtctgggagaccagccaggaggctgctgtagaactcagtcccagttctgcctccctgcatttgtgcaccctgcaggctcaactcagaatgccattcctcctgccctccgcccatggagatgctcccatccttcaaagccctgttcacttctcctccacttctgctttctcctccagaatataatgggctcatttctctggacagaccagtgtttcctagttggagcctccattgyacaccccacatctctctcaatgtcaccttgatgggacttacagctcagagcgtatgctcagtgaatccttgtcaacagcaaatgaatataacttattgtcaaatggtggatggcttgacctttaaagttaaagggagaagctttaaacatgatcaacattgactttattatcttccaggtgcatgattgtctaatttcttaccaattcgattctcactccatgaaaaatgatttttcagactgctttttacagagaaacaggtgggcactgagaaagtattctgtggcagttacttttcacatgttattccatttattcctcatggtatttctgtgaggttggacatttccctccgtatcataggtgaggaaacggagatgctcaggtatgaagcatctggcctgagctcacacagccttgtgaaggtgatggctgtctagttttgccagactgggaagtgagtgctccttccgctgcctcacagcatctctccgtgctgcacaaagcaattacagaggcatgcccctgcattcatttttcctacttagaatgagacgctgctgtttactttctcaggaaggaagattgaaatcaatgtaactagccttattaacttttttaaatacggaggcctgcagatgccagtgcctttcctgagagcaccaaagcaaatataaaaatccaatttgctcatcttttatatatatatatatatatatggaaaatcttctccagagtttaaaattcaaagctgtaaatgaagagccgacgagacagaggtaacgaaccaagcctcagacacgggaatgtatttacccatatctcttttgtctacaggtggctgttcctttgatgagcactacagcaactgtggttatagtgtggctctagggaccaatgggttcacctgggagcagattaacacatgggagaaaccaatgctggaccaggcagtgcccacaggtatgtgatccatcatgtttggggctgtaatggggatggctagtttttaccgtgaatcatggggggaagaacttacttacacattgagctctctgagatggcaatcgatagctctgtaggtagtgagttccccacactcagaggtggtcaaaccaaggctgaatgaattcttcaggatttgatactagtcacatgtcacctggattcagcatttcttttagcgtcgagattctaagctttagctacaagtaggtatcactgggttttgcttgggagcctgatgayagtggcgtgtcagggaaagagcttctgaagaatttacggtcgctgcttttcttccaggccacatggacataggttgtatatatttagggaaacttcaacagtacagactattataaggttatattaattatattattatattattgttatatattatcatattattatctattattgtgtgttatattatttacatatattttatatacttagggagacttctacagtcagattattataaggttatatattatattatacattatatatgttacatagtatatatattatataatttatatatatatttagggatacttccacagatttttataaggtcatattattatataatatattattattatatattattatattattattatatattgtattataaggtaaacatcctgacattctaaataccaaccttttgtccttaaccagcagcgctgaaggcctagtgtgaattcttgatggatacctgcatggggcaggcctgtgaggtacacctgatatgtttcaggggaagtacccaaaggaggtcttctcagagagaacacttagactctaaatgtggggtatacctgcgtaaggtgcatcttgaagaggcttacctggtgatagaagccaggaagagttgtgactctgagaaagtgaagctcacttttctgaataatcacatgtccctgctgcagttgtaaagacaactgcttgttggagaagggaggccattttctacagtttctgcttgaccaaaggctccctcactttaacccacacctgtcttggttttcaccaatcccccaggtgctctttctcagtctcccctgtcagtgcactctggccatggagtattaagagttcttcaggcttactgggtgttctttctgtggttggcctcaaccactcccatggcctcagatactgcctctgtgctggtgattctgacatttatgcctccagcctagatgtctcaggaattttacacctacacaacccactgcccagctgccatgtcatcttggctacctctggagaacggggttttccaggatgctactaaagtgggagcaaagaagatgctcagagatgcccaggtgagggtgtggcctcattcactttgagtctggctccaaaacaggaggcactggatggttatggatagctcctattaagggcattaattgtataaatttctcaaaagtgttgatacaagccttaggtgtaataaagttaggctgtggtacaaaattgagcatttcagatctggtgggaccttactttgaatgagcaaagtcatcaacaggtgtgcatgcctattagcaaggcagtgtggaacaacctctgtctgttgcccaatcatgctgactttaaaaagtactgcctggtttacatgatagaatcacccatcccattagggaccccaagaatccaagacacctctgcttaaacatagcacatctgctctactcttcatggccctccttgatagtggcccaataaatctggatcttatagtgtgtatacgtgtgtgtatgcgtgtgtgtgtgtgtatgggggtgtatgggtgtggtgtgtgtgcatgcctgtgtactggtatgtgtgtgtgtgtgtgtgtatgggggtgtattggtgtatgtgtgtatgcatgtctatgggggtgtgtgtctatgtgtatgggggtgtgtgtgtgtgcatatgggggtgtaagggttgtgtgtgtatgggtgtgcgtttatggagggtgtgtgtgcatgtgtatgggtgtatgtgtgagagtgtatgggggtgtatgggtgtgtgtgtatgggggtgtatgggaggtgtgtgtgtgtgtccgtgtgtttgtatgggtgtgtgtatatggcggtgtgtgcatatgcatgtgtatgggtgtgtgtgtattcacatatgctctttctgctcatctttagtccacttaaagccctgtagcatgttgtaggctctccaagctcaacatctccaaaactgaactcttgatttacccatttccccttccctgtctactcactttccactgttcctcgtctccagaaagctcacttcaccctactggtactgattcagaaaccggggggccatgtttctcttttttctctctcttacccacttttccaatcaatcactttgttctgccattttacttcctaagtatagtttgggtctgcccaagcctctccatctctgccaccactgccctggtgaacacaaccattgtctgtttcctgggtaagtggaaaactttctaacagactccttgacttaactctttggactttaatccattctccaaacagatgtcgaagagattattctagaatataagcatgttcatgttacttcttttcttccttgtctctacccagcttctgtcttaaggctttctgaggcttctcattgctccaggaaagaccaaagccctgttgtggtctccaaagctctgagtgctgatcctccctraacctccaaatcatcatcatgctccacatcccactctgctcactttacactggcttctgccaattgccagaatgttctgactctctcctgcctcgggaactcacatgagattggcatcctccacggagcctttcccctacctactgtcttgtgcgtcctcttcatatctcagtctgggtcagcattctttgtaatggttcccgttgcaccttgcacttgtccttagtagcacgcatcacagcaggtgttattcatccagtgcatggtttactcccagatgagaagttctatgtgaatggggaccatgagaatcttgttcataactttatcttcagtgcctaatgcagtacatcagacatcctatgtactaaattagcaatttgttggatggatgtgtggatgggcaaatagtctttattaagtgtttttattaatacaggaatgaatgaaaaaagattaaaggcctttgggtgctttactaactgatcatgtattttcctctttgctactatccttcccattttacggatcagaaaaccaagttctaagaagctgagtaaaagtgtgtctttttactcatgctactctctctccccaaagacatggcttttgcttctaatattaattttctcagcccctcattatggcagggtgtcatttcataaatattggatcatgctaatacaatcttctgggcttttctaaatagaggcatttgataatgatcactgaaattattctgtcatgatgcgcctgtggatttcagcagctctgtgtgcctcttaggcagagaggcatgaaagcgaatttggattaggcaaaactgtttgttcttcttatgggcataggctgaaatcttgcttttctttctgtaaagccagcagttctcctcatcttggaagtcaagtttgagtctgtttattcagatgttccacagctttttgcccatcccctttgtatgacgagctccctgctatacttggtctgggtaactcattccatgtcattttgggacttaatcctgctgatggcctcccctggcacataggatgaaatctgaaatccttgtcatggcctataagatcctgcatgatccaatgtcttctttgggccccttttcttctcctctctcatacctggtgtgttttagttcctgagatgtgtcagattctttcttggcacgggtcctttgcacatattgttccttgttccttctcaccagaatttgttttctcaattcttcactttgttgatttctctttcgttctttggttgtctctctctctcyttttttttttttttttttttttttgagacagagtgtcgctctgttgcccaggctggagtgctgtggcgttatctcagctcactgcagcctccacctcccaggttcaagtgattctcatgcctcagactcccaagtagctgagactacaggcgcacatcgccatgcctggctaacttttgtatttttagtagagatggagttttgccacgttgaccaggctggtctcgacctcctgacctcagttgatccttccgcctcggcctcccaaagtgctgggattacaggcatgagccactgcatctggcgctttgctgatttcttcatgtctcagctcacaggactcctcaaggcaatcttcccttatccgtctgtctaaagatggacttcctccttattctcactcataacatcctgttctttgctttcaaaatcgttatcatagacatgtttgcaagtcagtgtattccaatcttacacaacagctgagtgaccctagggtctcaactcccagtttccacatctttatcttggggaccagtgtgagagttaaatggaggatgtctgcatgagtgtgaactgtctgcctggagtaggggttagtcaatgctggtttttctaaatgttttctggttcttgcaatctctggggctggaagtccaagtccacctgagaccttgcccccacttctagctcactgatgctgctttacaaaggcgagctgctcagcaggtgttctactgtgggtcctgacaggccagagaggcttttcaagtccaggatgcattgctgcatcgagggcttagacatttcctccaccccacctctgtgaattgaatgttacacacacctactgttatttgccattgaaagtaatggcaaaaaccacaactacttttgtgtcaacctaaatacagacttttcctcatctctgtccatgggagaagctcttgcactagcattccaggcttcagacctggtttcactaccttatcgttattgaggctgtcacagaggagcaggggttagtacactcactcacaaaccctctctctagctgtctatcctgcctatggaactaactacagctaccaccagttcctagccctgccttccccatctttggcatgggtttccacaagtcatccctgaggtacagccctgaattacagcccagggcccagcaggagggcatcctgggggctgaaggaagatgtgagtgctggaggtatccttcggaaagggctgaagccagaggtagtggggcttgggtggcttgcttctatatcctttgaatacttgtaggacattcttttaaacataaggtatggattagggttgaatatcaggttgcaaaatcaggtacataagaaatactcacttatttctcttctttacataaacctgaatctgaccctcagtccccagggagctgagactatattttaggcactgttggagctccctcttccctagggttctatgagtttcctggggtttcagcagactgttgtgattttctctgggaatcccactgctgcattccctttaggtctagtgattctgctgctgctttctcaggctaggagccattgtcacagcccagccagcccaggtgcaccacccacaaacccccccgggcctgcccctcctcaggtactgccacggaggagtgtggcaccagcagatccatacctcccaccttcgtaaaatgggagaacctctctcctcaccatcttagccttcaaaagcacacccttcttggcccagtccttccagaccccagcattctctcttaagtaagtttagagttagaaaaaacaaaggaggaaggaaggaagccttgatttcaagcagcttcttctatttttcctacacacatttctagagcagaaaaatacaaaaagcttagtgagtttccagattggaaggaggaggagttgggagaacacacacacaggtgacacacatgcacatgcacacacacacacgcgcacacacacacacacacacacacatttcacccaactagcatgtcatggaagcagcaccgtctccagggtggtcctggcctgttccttcacaccatggggcctttscctgtgggttcctgccttgctctaactgctcatgtgtctaaagggagggttgaggtctgtttgggttgaatggtgtctcctaaaaagataagttgaagtcctaacccctgatatctgtaaatgtcacacttaattgaaaataagtatttatagaaatgatcaaattaggatgaggtcaggctggtcatattgggttctaacccaatacgactcgtggaggcaaagatacatacacacatagggaaggaggccacatgcagatggcagtggagattggggcaatgcagccataaggcaaggaatgctgaggattgtcaacagaaaccagaagtcaggcaaggcaagttgacgggttcttctctagagcttttggagacaacgtggccctgccaataccctgattttggacttctagcttccagaactgtgagacaataggtttctgttgtcttaagccacccagctyatggtaatttttaatagcagttctaggaaactaaaaccaggtcaattacacatcagtaccctgaccccatcacctacccaggttaccttttccacacgagctctgtaagtattggaagctttgctttcttctgtttttttgttttgttttgtttttttgagatggagtctcgctcggtcgccagggctggagtgctgtagcacgatctcggctcactgcaagctccgcctcccagattcacgccattctcctgcctcagcctctcgagtagctgggactacaggcatccaccaccaggcccagctaatttttctgtayttttagtagagacggggtttcaccatgttagccaggatggtctcaatctcctgacctcatgatccgcccacctcggcctcccaaagtgctgggattacaggtgtcagccaccacgcccggccagcgttgctttcttctaagggagctggcatttactacttgtccactctaactaagaagtgggttaggcatcatcctgtacaacattttgtctaatgtcccaccatcccatgagttcgagatattgtcacttgtttttgagaaaacagagtcccagagaagtgaagcaactggtccaaggtcatgtgagttttatgtggctgaggagtcaggcttgatgtccaggctagagaaatatatattgcagacatggtactgttgtcaactaagcatctttaaaaattgtttctacttgcagtcatgatttatgatggcaaaaataatgtgtattcattgttgagaaaatgctcaatagagatagctataaagaatgaaatgaaagtcatatgttcacacaaacttgcakaaatatgtattttgctatttaatacttttttctttagcattttcccatgtcattaaatgttccataaaaccatgttttctaaaggtttcatagtttyccattgcaatgactgttccacgatttatttcatcaccccatattgttgcatatttaagtcctttccagttactcctgaatcatgttgcggtgagtattcttgtacatacatctctgtgctcatctccaatagaagttatcgaatttgttttcatatgtatatatttctgtattcccttatatacccaaaacagaatggttgtgtattatctttgacatctggagaaggaatatcatccacatggcaaacatgtagtcctggacatttgcccatgacttgatggttgggaaaatgctttgcaaattctgaagcactaaacacaagccaggcactgtcgatggtcccctgattgcaccttgttctagctcttagcttaggtactccctgggctttagcaagaatagtgttggaaatattgtcgaatagaatggtccaagcactagtcaatccaggtggatgctagctgtaaaaagctgtgtgggctccctcatgtttattggatgaactgcaagcttgttcacgggccataaacagagctagcttcggttcttgtaggcaggaacaacattgtatttatatttgtaaccgcaatgctggggcttagtaggtagcggcaaatgtttgttagatgatttgctcttattaataattgaactttctcatgatgcgaccccagcatgtatcttgagcctcagtgccccctcctgcccttttctctttcatttccccttctgtgtaatcacacgagagcagcctttgtgttattgttttgggagtccagtctccaaccctgtttcttgatttggggtatctctcattgtgttgagtctcagtggattgtgtagctcgctgagaggtgaagatgccagctgctcatcatttcctggcagcctgggtgtggctgaataggtaacctggatgcagcaggtggaccctgctgcccmggacttttcatctaggaaggatgggccagcagccagaggctggagaattggggtgtgcagtagtaggggtggtgtctggccatggtgtttgtgctacaaagttgctggacttcttgcttgttgatctcccagaactccyttttttttctgcttatttttcaggcctgatccttcagctttctgttcattatgagcttctcaatattccagaaacttcgtattttttaaaagatagtcatagttgatatctcttgtttcaaccacaaaccctacaggtcacactgtcgtgcctttgtacttgctgatccctaaggctaagagcacagctccacttttccttcctcctaaatcaaaccccggcacaaatgtcacctcctccaggaggccctccctgactcccctcacagcgcttacctctctactatgcttctgtagctgagtttatcacatgttgtctctgattccctactaggcctgtgagtggctgcagggtatggactgcctctcrttgctgaattccttgtatcctgcatggggcctggaataaggaaggyggttatttaaaaataactgaattattgttaaagttattcgtgttgggaaagttgggagaaagtggtttcaggaggaccctaaaggggctgccacttgctttggcattttcgtggcacctggggcatctgtagctttcatgtcttgagcccgactctgagcttgacgaggctttggtcaggatgggccacttggtcccaggtcctgattggtctgggttcttctgctctgaagttggtcccaggatccttcgggcaaataaagagacactggggatgatcccttccttcgctctggggcctggcacactctcatgaatgtgtggcactgcttgtgacacatgtaactggctcctcttggaaagatgtaatctattctcagattgacctactcttcctttaatgtgaggcttacaataaaatcatatggaagtatgggcctttaagtgtccttaatcacacctgatattattattgattggtttaaagttgtaagttcttatgttcccatttagcaattgttgagtcagtacatttttttctttcctctttaatgacaaaatattatatatttattcttaaaaaatgctgagtttgaacatataagttacctctctccaccctgattacagttagcctaaatatcaccattaacatattgatgtgttttgagagagaaagggagagagtgaaggaggatggagagagggaaggaggaagacagagagtatctgtatgtggtaatagtaatagagacgtactacctatgtagtgcttactatgtgtcaggtactatcctaagtacttgaaatatagtaacttatttaatctttgcaacagtcctctgatgtagatgctgttatctgcattttacagatcaggaaacctaggcacagaaaacttgaatgacttgcccaggtcatcgttagcatatggtggaggcaggacgtgcccttggaaagggtccaggctgtgctctggacagctgcactgtggccacttaggagtgtagacagtgaatagaatcatagctcccaaactcttctgtcatccatctctttttatgccactgtattcagagttagttttcaccwtccaaggctacatgatattctcctgggtgaatgaaccatggtttattcaactaacacctaagagatagaggtgggagaagaaagaaatgccagaatgccttctgtgtgcccaaataaaagacaagatctttgtctccaaacagctctgagaaaagttcttacaaaacatctcatattataagatggtttttcgtgtacttggagctacaaaattaattgtagaaactacattagcctgcagtgaccccaatcagtgctagtttgggatgtttacagggatcacagaattgatagaaaaggcaaggaaattgaacgcaggtttagtaattattccggaggatatgagcaagtaatgacgagtgttggtgatggttatgaacaagtttcctaacaatgtcctaacaatggctttgaaaagcaacatgatgtccttttggtgatcagaatatacagctgccagataaatgggaaaacctgtctgtgctaatatccacatagatgcttgccttgacactcagttttctgtgacatcatacctagattcaaaaagtattatattccaaatggtgtaatgggaagtgaaagtgatggagactggcatcgttcaactaaaaaagtgcttcttctgatgacaaacactgctgcatttgacgagttagaataaaggggttgtctgggaggcagaggttgcagtgagctgagactgcgccattgccctccagcctgagcaacgaaagsaaaacttcatctcaaaaaagaaaggaagaaagaaagaaagaataaagaggttctaaagtctatgtgaatggataataaaccactatgtcttttaacctaacatgtgtataccacttcctggacagtgttctaagggctttacatgtttttacatcgtttaatacttcaacaacactgtgagctggatgttattatcacccttattttaaagaggaggaaactgaggcccagaatgtcaactctctcaaaagtgagttacagtaaatggaggagctgagatttgaattcaggccgtctggatccagaatctgtgccctgaaccactctctatttttcaattaatattttatgaaacgtgattttaaratgtatgtgtaattaaattgtatattagataccataagtggacttttgcctaattcaatcatctgtacacttaaaattgtatttattaaagttgcccgaaaactttttttttgaggagaggatgtcttctcactggaaaaatggaagaaatgctttacttttaatggagggttgatcctgtcagtttgttgaattgtctaagtctgtcagtgtctctgtaaatgcagatacagtgaacctgcatgttgttcggagtaaattctttgaaaaggaagcatcacaaaaacagtcgtgtgtcagcgacacatttaacaggaccacagagatgacgttcttcaagattcctctgtttcctgctgcttcaactttagccactcccagggcagccggagaggaagacgttgctgagaatcatcctgatcatggtgatgctggctggatgctgatgctaggcgatgtcttcgtggaccattcaaccgattgggctgctgcaggggctagagctcctscaagtgaacctttcatttttaaatgtgtgatctgtcttttccttagtaaagaaacaggttttcattatgctttggctattatagtaatttgaattacaaatatgcattctaagatatttggtaagaaaaggaaatagtttagtataaatatagtcttttttccccagtttagtaaaaacaagatggctgagatgtctctaaaaaataaagtccaacaatctggaaaatccagtaatccattgaggtcccatttgccatatctaatctggtggtcattagccrcacatggctacggagtactggaaatgtggctagtcctgtaagtgtaaactacacaccagatttcaaaaacttagtatgaaaaaatcatgtaaaaacatcttattaataatgtttatgttgattacatgttgaaatgattatattttagatgtattgggttagataaattattaaaagtaacccatttcttttttacctttttaaatgtgcctattagaaaatttagaattgcataygtggctcacattgtgtttctattggtcaatactctcctagattattagatttttatgacgtcacttgtattcccaccaacagggatatctctctttgagaatagtaatagctagcatttataaagcactcattctgtgccaggtgctttaaagccttgtttcctttatggttcacaaaaccctatgcagtgtaggtaacatgtgttcccactttatagatggaaaattgaggcacgaagagattaagcaacttgcccttcatcatagaggttggaagtgctgggaaggggatttgaaccaaagcagctcaagtcagtggcacccactgatgactcccaggcatccaccttttagcacatggacataacacttctgtctctgccttgctctgttgacttgaacctctggacctcagttttcctacccaggattgggtggaaacatgtgattttaaatatgtagaacatattaacaacagagctacctcaggcccctctagctctgttcttcctgtggttattattgtggttctgtgtgggctgcaggcacatggtggaattgggtaggcattatctctactgccaggcctttggttagcatggccttctgcctagtggctaaggaagcatccctgggaactcatcccagatctgtcactaacctcagactttgagctgcctttctctgggcttcctacacccacttctgtgaaatggatctaaaaataaggagtcctggattctgtcctagctctgccattaacttgctctgtgaccttgggccacacatcatccctccctggaccttattgaccattgtaatatcagaagtcagtttcttctgactctagcattctttgacttgtaatttatgaatcaagaagaaggcatttctaaacataggaatttagtgatacatttataaaacaaaacattggtgaagactcctgtggtcctaacccctccattcgtctgtctgtcaagcagggcaactgcttctgcttctytgcagaggaatttgtcttcatgagtatatggaggtagggcacctgacgtacaatctatccctgagagcccagaccttcacagaaagataaatctcccagttgagcttaaggcacgtactctgttctcacgcatccttgcagagctgcagtgatctatcacatgccccattaatttcacaggtacaactccagaatttatttccccacaactactaatcagtgagacatttggtaattgagagaaattacccttttctaaaaagacctcctgttttccctcttcatctacctagttttgacactgtgctctgtgctgacacgatcatactttatgtttggaaagcaacagatatttgagcaaactgtttttaaaactttcctcaaatctgccaatatcttttaaaattgcttcctttcctaggtgttgtgtttccttattaagaaacccaaattgcactttctcaggattcaaagccttgtmgtcaatgaaacaacttgtgaaagctatgaacaagcaagaatatgttatgtcttttaagaactctgagagtgtctaaggttaaaataagacctatagcttccaagatccttctaaatcatagctgcaaacatatataagcatgatgtgtccatcagtttggattcaggtaggaaaacggaaaccattctaggtatttcaatcaggaaggggtttaatacagggtattagaggtttataaaacctttgaagctctcacatacatggtcaaataatcttcactaagggtaccaagactacacaatggagagagaataatttcttcaacaaatggcatttagtaaattgaatatccacatgtagcakatccttaacttacaccatacacaaaaattaattcaaaatggattaaagacctaaacatgrgagtgaaaactgtaaaacccctagaagaaaatgtaggtagaaagttttatgatgttggatttggcagcgatttcttggatataacaccaaaagtacaggcgacaagagcaaatatagacaaatgagactatatctaacttaaaactaatgtgtttcaaagggaacagaattaaaagacaacctgtggaatgggagaaaatatttacaaacctctcttgtagggttactatctggaatacataaagaatgcctaccactcaacaataacaaaacaaataacctgatttttttttttttttaaaaagggctgaaatagacatttgtccaaagaagataaacaaatggtgagaaacatgaaaatacggccaggcacggtggttcatgcctgtaatcccagcattttgggaggccgaggtgggcagatcacctgaggtcaggagttcaagaccaacctggccaacatggtgagaaccccatctctacaaaaaatacaaaaattagtcaggcatggtggygtgtgtctgtaatcccagctactcacgaggctgaggcaggagaattacttgaacccgggaggtggaggttgcagtgagccaagattgtgccactgcactctagcctgggtaacagagcaagcctctatctcaaaaaaaaaaaaaagaaaagaaaatatgtttagcatcactaatcattagagaaatacaaatcaaaaccacaatgagatatcaccttacacccattagggtggccactataaaaagacaaacaaaaagaaataaacgtcaagcatctggaaaaattggaacctttgtayattgtttgtgagagtgtaaaaatggtatagtctatatggaaaaccaaaaataaaaaatagaaccaccatatgatctagcaatcccarttcttgaaatagaatcatgtatcatttaatgatgggaatacattctgagaaatgagtcattatgcaatttcatcattgtgtgaacatcatagactgtatttttgtaaacctagaagctatagccaactatccacctaggaccaccttcatatgtgcagtccgtcattgacggaaacaccattatgctgcacgtgacagtatatctaaaataattgaaagcagaatcttgaaaatatatttacacactcgttaattgtagcattattcacagtagccaagagatggaagcaacccaaatgttcatcaacagatggacggataaagaaaatgtggtatacgcatacaatggaatattactcagccttaacaaggaaggaaatcctggcacatgctacaacatggatgaaccttgaagaccttatgttatgacagataaatcagtcatcaataacatgtactgtatgattgtacttatgtgatgtatctagagcagtcaaacttacagaaataaaaaaatagaatgatggttgccaggggctggggagaggagggagatagggaattgttcagtggtgtcttagaccattcatgctactataaaaggtaccacaaaatgggtaatttatgaataatagaaatctgtttctcacagttctggaggttgacaagtccaagattaaggcaccattatgtttggtgtctgatgaggaccccatttctatttcaaagatggtggcttgaatgctatgctgtcacatggaaggacaaaaagggcctacctagttccctccagctcttttataatgttgctattcccattcatgagggctctgaccgcattacttaatcatcttctaaaggccccaactcgtaatactgtcactttagagtttaagttccaacatgtgaattttgcaggtacacctgcacttaagccacagcgttctcctccagatgccccaaaatccatgtccttctcatatacaaaatacattcattccatctcaatagccccagaagtcttactcctgtatcagctttaaagtgtaagtccaaagtgtcatctaaattagatatgattcatcttgaggcaaattgctctccagctgtgtgcctgtgaaatcaaattgtatacttccaaaatacaatgttgggacaaacacaggatagacattcctattttaaaagagataaatagggaagaagaaaaggtaataggtcccaagtaagtataaaacacaagaagacaaacagcattaaatctcgaggcttgagaatgatcttctttgactctacgtcctgccttttggacaccgtgcagcaagggtgggccaaagacycaggcagccccattcttcatggctttgctgggcgtgccccacaaagcagctctcagtggttggggttgggtgcctgtctctctcccaggcttgtgttgcgtgatggtggctctacaggtctgaggtctcaagggttgcccatctccatggctccatggaacattgccctaataggggttctctgcagtggctgaattcccatgtctccagggaattgcactagtgagggttctcagagcagccccacccaccctggcagttctctgcctgggcactgaggctctccagggcatcttttgaaatctgggtggaggtagccatgcccccacagcttatgcactctgcacacctgcagggtcaacaccatgtggatgccaccaaggttgactgtttatgccctctggaggggaagcctgagccacacttgggctcacttgagtcacatctggggcatctaaggagcactacaccagaattcagtaagcagagacttgaggtggcacagagcagcgagtgctgaggtctcatgggtgcccaagatcccttttttcatacagttttgtcccccaggccatggcattctgggcctgtgatgagagtgacaactttagagatctttgaaatgccttcggagtcattcttycattgtcttgataaatagcatctggcttccttacacccatactaataaccctatcaggcatcttaatatttttatcaaacattgactcagccacactgttggtattctctccataatatacctttatgtcctggccaggctgggaattttcaaaatctttaagctctgcttcccttktacttataaattcatctttaattgatttcttatctcacttttactataaacagtcaagagaagccatgtagcaccctcaacactttgcttagatacttctttcaccagatatcctagtttatcacctgcaagttctccctttcagaaagcattgagacatgggcatgattcagccaagttmttggctatcttgaagactatgagttttcctccagtttccaatatcttatttcttgtttctgtcagagacctcatcagaattgcctttaccatccatatttctaccatcattctgttygtgactatacttataatatctaagaagattgagcctttctctccagctttcttcttttgaacctttgccagaaacacccttaatactctgttcacaataatctagactctttgcagcatgaatctctaaagtcttccagcttctactcattacccatttctaaagccacttccacattttatgtatttgttacaacactctacttctcggtattaatttccgtcttgtccattcatattgctgtaacaaaatgccacaaaatgtgtgatacataggctgggtgcagtggctcatgcctgtaatctcagcactttgggaggccaaggcgggcagatcacctgaggtcaggagtttgagaccagcctggtcaacatggtgaaaactcgtctctactgaaaatacaaaaattagccagatatggtggcaggcacctgtaatcccagcttcttgggaggctgatgcaggagaatcgcttaaacctgggaggtggaggttgtggtgagccgacatagyrcctctggactccagcctgggtgacagagtgactctgtcacaaaaaaaaaaaaaaaaaaggccatatgtaaatttttaaatttatgtctcatagttctggatgctgggaattccaagtttaagatcaaggtgccagcaggctcagtgtctggtgagggcccagtctttgcctctgtcattggtgaagactgagctggaaccctgccagaaagtaagatgtagtttytaggcttccagccccagtgatatgtgggtgagcttaggagggtaggaatgatacaagataccatgacacaattctcagtacagtgtactctaagtgagtaaaaaaaaaaaaaaaaaaaaaaaaaaatctgtgttcttttcacatagaagaaatgaacagaagtgtgaacattgaaatcaggctgatattagttggaatgccaattctactagtgactagcattctgatatggagctggtttggtaacctgtctgagcctcatgctcgtctctaaaatgaggataagggacaagagcctcataagacttatgtggggaattaactaaaatttcacatacaaagcaccttgtacaacaatggatattttatggccaccctaccttgcagtcactttagaattttgatgaggagtttccagcaccaagaggtgtctacttccagtgagatacctcaaagtatgtggtatgttcagagaataacaagtagtccttacatggtaggatgacagtgatgacattagtatcaggtagcattttggagcatctgttttcatggcactgtgctgagcactttatacttgtcatctttcttttattaagtctttacaacagccttttgaaggagctagtggtaacagcccattttacagttcagaaaaatgaggcacayaaagattaagtaatttatttaaaatcacacagaagtggcagtgtgattttatctaaaatcacacgtaagtggcagaggcaaatactcaaaccaatactcttgaataatgtagtattctaggaagggataccatggtcatgtggcataggatgagatgtgatgagaagggaggttggggccacaacttgaaggatgttgcatgataagagtgaggattcatcagagattaagtcagggaatgtttgatcagatttatcttttaggataaccacttgttggccagtgtgaaaggcaacttggagcagcagggagcctgtggtgggaaggaaggcagtggaccaggagggaactgatcaggcatgaatggggatgttagctgtaaaaatggggaggaggaaaagggggttggaggtatcggtgagctcaagaaaacttggtgaaagagatgaacaaagatactggatttgggtgtggagtcaggtgcctattctttgaagttctgtgactctagccaagccacgtgggttccatttcctcatctgtatattacacacatacctatagaggtgtgctaaaaatggccaggatgcwcatgcagagaccctacctctgtgcccacaatactgggttcttagcaagtgaaagtgttggcccagtgtttgatgcttaccagaccttgggtctcagtgagcaggtagactgaacatctgcatcagaatcaccgagggtatttttaaaaagcagattcctgggtcctatccyaacatgtggcactgggatggggcccaggaaacagcaggcaattttagtacattgatcttgagaaccactgggtgtttgggaagctaggaaaggggtcaaggccagggtcaagatttcrcaggagaaagggaagagcagaggggagagagcagaactctgcacattgccacaatctagggtgtgggtagaggaatgggagcctgagaaggagacggagggagtgcattcctagaggaagacaggaataagccggcattccaccaggagcacccagctccttcccttcttctttcccctgcggagaattggcaccctgggacacctctttgttggagctgttgcttgcatccctgtrgtttcttcctctacctgctgtactttgccatccccttgtcatcactgccatgttctttcctttgccttggagaccactgggtctcagaatcccattgttcttccagcccctgtcccaggtcaggcagtgcgggagctcaatacagaggagctctgtgtaattttgcatttaacacccatcttcctcaatgaastataagctccatcagagcaggaagcaacttttccattcacagctatgtgtcctcagctcctaaaactggcaccagaatgccctcaatgaatattgaataagtgagttaggggatgagtgaagtgttcagctatttggaaacagatttaaaggaaacagaaaatctgaggtggctgaaacatacacttgtggttcagagcatggtgctcagtgggtctcaggagatccgggtctgctgtgctgctgacctgctgtgtggcctgaagcaagttgcttagtctctctgggctccagtggccttaacctatacaaggaagagccctgattaggtaatactcccagttttctaactctaataccacacaggttctataaagcagttctgctgtggcatactttgttcattactgcaaccagggaccacatgaaaagacttcacaatacaggaatgaagagagtcttgastgcacgtggaggtggtagcagcatggagcagatggggcctggcaggccagagagccacctggagtatagttccaacctctggaaaataaatcttatttttcttttctgggtgatggcaacaagtagaagaaagcctgaatttaacactccatgctgattgaaaaaattatctgattttgaccatttcaaacaaaatgtcacctttacaagcctgatttttagatttgtgctaagtttttagactttgcaatatggaaaataataacagaaaggttattgcctgaattgaaagactactttcctgtgtttgaaataaaactttgataaccttggtctttgattctctgtacagttgaatttcagaaaagagattccagaggcatatacacgttcaaggttcagggacactatagccagagggactagtgtgggggaccttgagcaaagctattgagcaaagtttctctatggctcaaggttttctcttacttataaaatgaaggtcatgcaattgggacacatagggattgaatgacaaacatttgagaacacacagaacaaaatgtttggtgcgtggacccatgttgggtctcctccatcaccatcaagcagcttcttcttgtcctgtctcagagctgggactcagcatggaggtgccttggtaacctgtgtactgatggaaaaccctgaggacttgttaggcctgccatccctctcctctctcccctctcccctcctctctctgtgtgtgtgattacatgtgtttaacactaggtgggctgtaatgttcatcatcgcctactggccttctttgaagacctgaggccccttatattgagtggctgctggaggttctttgtccagtgtgtgcttactgagactcagcagaaggccctggagtggccagaccttgtcattttagtcctggcctggggcagaaacgcccacacagggtctcacttgccaatgtcaggagtggatagaggagagccatcacttgattgagagaggggacctcagtttgcagaaaagggacaggaacagggctgaagggtcctttgcagactacagcatcctggccaggtagctggagcgacttcctgaacacctgtcagctcctgactcttcagactttacagggacccctggtatctctttcctgccttggagaaagctgcagaggtggggctggaccccagggtcatctcctcttgaaagagatgtcacatcatatggtagcaatatcctctgactgagatctggggcttttcatggtctgcccactttcctcagatcctttacagcaagaccagctttcaagtccacccttttcaagatccgtgtgttgtaattagggggcagggagtcaggttaggggatggagtttacatccctctaaaacccaggaagaagaaatgaggagctcacgaccactgacatgtccactactttaatcttacttaggaaatgattttaatgaatccataagtttttagggttggatcttgttcatcagttactactcatgaattcgtgagcatttgtgatctaaagtctgaacatcactatggcttgactcttgttctaaagaggaagaaaacatctgcattgaatgatctccaaatacaaggctagaccatccttccctgctctcatttctagatagtcacaaacagagtagcacctggatggacctcaggcagggatgtagtctcctgtcctgattctctgctggaagttagcattctgtggtgtagatgcaagaaaataggtgtccttcgtggtcacagctgctgtaggcacttcattcacatttacaaaattttaagatcatgtcctcttcttttctaccaatataactacaagacctcacgctttgctagagctcaggcactgccaggtgtcatcatgaggagagcacgggatttcctatcacatgaatctaggtttgaaccctggctctgctgttcaccaacctgttaccatctactacagaggacttctctgaatctcagtctctttctctggcaagtgtgaatgggagtacaagtctgccttaccccattagtgtaagaagccatcaagatagtagaagtgcatatgctttgacagctcagtgtctctgtatgggttagtttttgccactattattgtaaccttgaagaacagctgggcccaagcttcctgttataaagaaatacagtgctctcagctaaaaagaccaccccctgcttacccacccagtccctaagagggtggattataactgttgtggctgtaaacccagccgatatgggctgtaatgtagtaaattatcacttgttttgcagtcttgacgagaaaaataaatgcaattacactcatgaatgttgaaaaatgaagcaaagcaatgcagatcggcacattcgaggtgcttttccaaacgaaaagctgtgtacaatgaatgctaatgggctccctccctcccactctctggcatatggtgtgatgtgatctttctgaattaagaaagcagctttgccaagcaccctggctatgggagaggtggtcatgaacagcccccacagtgggagactcagcaggtggaccccaacttcctctcttgcttgaggacacacaatagacccaatttcctggagcaggcaccagagtgatcctggtgcagcctctctgcttcaggaacttgccatctattttgcagttcttctgccatcctgtgtggcaaacatttgctgaacacctaccatgtgccaggcatgatgctgggagctatagagatgagtctcagatatcttgcccctctcaaccaagggaggccttgtgagccaggcctgatgtgcaccatgtagccttgagtggttcaatacagtggcctccagcacttgaaatgtggccagttcaaactgagatgtactctaaatgcaaaatacaccagatcttcaagtctttgtaccaaaaaaaagggtaaaatgttgtgttaatttttatattgtttatatgttgaaaagatagtgtcttgtgtgtgtgtgtgtgcgtgtgtataaccttttgcaatatggcaggtagaaaatttaaaagtataaatgtggcctgcattgtatttctgttggacagtgctgatctagcagctgcctatctcttyattcacatcctctgccacattcccccttgctggtgataccctggtctgtttttttttggttttttgtttttttttaaccacaccaggctctctcctgtctcaaggcttttcacttgccgaaggctcttctcagcaagagcttgcatgtcaactcaactcaaatgtcaccttctgtgagcagtattctctgactagcctttttgaatatgtactccctgttttttgttttgttttgttttgttttgttttatccagacactctttctagtccttatcataatatttggcattttattcatctacatgtttgtgtaactgttttccctaagagaacataagggcagaaggcttatctgttttgttttatttagttttttttaatgtgttctgatctcagtgtctagcacaacaagcaacacatagtaggtactcagaattttttttcttaaatgaatgaatgaataagtgtcacgttaatttcacaaaagaaaaaaatattttgattattttgagatgttgaaaaatacatttgaaaatacttcccactgggtcttaatttatcaatcagttagggaatgtctaggcaagaagcatgtgagagatgaatgatttaaatggggtttaatgaaatagagattggatcagaatcaagggaattaacaagggatagtgaagcacccagggactggcaactttgggaagccattaccaccctgggtctgaagggcaatggtaggaaatagaaatggtgctaaagtgttaagggattgcttgacaggctatagaggaacacagccaccccctggtcttctgtccatggccaaactctgccattggttaaactcagctagaagcagagagtaaggaagcctgggagatacagactacagaccactatgtctaggttggtgggtgaaagtggtgatggaggaacagagaataatcgtcatccttaaaagacctagaaagctatttccttaatgtgacggagcctgtctattccaaactaacaactgatatcctaaaaatataaggatgctcaggaccactaaaattatttaacatttattcagggatttctagtaacagaatgggaaatataattatggcataaagttattatttgcagaggattttattatctaccaaaaccccaagagaaataatgaaaaactattagagcccaataaaagagtctaataaggtgactagttagggaataaatatacaaaaatgaaaaattttctaaataccaatcaccagttaggaaacataatataaaaggattcattctgtaaaagcaacaaatataaaagcctgaggaattggcttaagagacaatttgcaggaactgtagaaggaatctataaagcaaaactgggaaaacaaataagtaaacggaggtatttcatttctggatgggaaggcttggtattttaaagctgtcaatttaaaatattgaatgcatattgcaatagaaatgtataagcratgttataaaatgattttaaggtttatctggaaaaataaatgggcacagatcatcaagcaaatgttgaaaagagaatgatggagaaagacttctacttccaagttttagaaatatatcctgaaactaaaatagttcaaatagcttataccaatcttagaagagacagatagattaacagaataaagtatgtccttaaaacagaggggtgtgtgtgtgtttgtgtgtgtgtgaatgcatgcatgtgtacatgttatagacaaacttcacatttctaattaatgagacaggtcaagatgaaatgataatccaccaggggaggatgtgggttcttcatactatgtaccaaaatatattctggataaatgcagtgcatttcagttaaatgtaaaatttggaaaacatagatgacatttaaagaataaataaatatttaattttggggagcaggacagttttctgatgataccattgaaggtacagccataaagaaaaatattatatctttgtccctaagaacctaaacatcatgaaaatatccatatcaaactggctgggcacggtggctcatgcctgtaatcccagcactttaggaggcccaggcgggtggatcacgaggtcaggagatagagacgattctggctaacacagtgaaaccccgtctctactaaaaaaatacaaaaaaaaaaaaattagccggccatggtgccaggtgcctgtagtcccagctgctcgggaggctgaggcaggagaatggtgtgaacctgggaggcggagcttgcagtgagccaagatcgtgccactgcactccagcctgggtgacagagcgagactccatctcaaaaaaaaaaaaaaattaaaaaaaaaaataaacaaactgagctcagatatgtgcattatatgtgcaaaaaatgattgatataattaacatgtaaagaggttttaaaaatcagtaaaaggaaaaataatccggcagacacacatcagtgttggtgagacctctggcaaccaggtggccatacactgttggtataagtacaagttggtacaatatttagggacaacaacttaaaaagtttctgagcagataaatgtacactttatgtcttcatgacttcatgaaattctgggtgtgtgacctatgacatggtgcttgacctcccagagtgtcagttattccgttcataacatgagaagataaatcaacttgcttcacaaagtggctgtgagggtcatttgggatgattggcccaggaaatcattggagttatgaaaccctgagaaaatggtgtaccttcttgattaatgtggggttgtcacattttgcttctcttccccacccccagccacttgaacgctatctactggagtcccttctcctgacgctgcagctcattgaggcacaaaggagagagtaagagccctaaacctttgtcagggtaagcagggctgcactgagggtgggtgctcagctgggctcagtaagtatttagtaccaaccacttgtgctaggtgctggggtgacaaagactctccccttgaccaaattttagtcatgctcctctgaattcccttctcaactaggctttgattttggctatcttgtctgtggcctgtctagcccagttttagcaagaactctgctaggttagcctactgaggatcccccaaccccttgacatctgtcagtccagttgggcttctataaaaaagtaccataaactaattcttagcaacagaaatttattgctcacagttgtagaggctgggaagttgaagatcaaggtgctagaagattccatatctcgtgagatctctcttcattaaaaaatgacaccttctagttgtgtcctcatgtgatggaagaggcaaggcagctctctggggtcccttttataaggacactaatcccattccttcatgacctaattcatctccccaaagtcctcatcgcttaataccatcaccttggcggttagcgtttcaacatacgagttttggcctccacaaacattcggatgatagcactatctgatcatcctggcctgccttcggtaagaaccctggtaagttgttttagcaagaatctccctacccttgtctcctcttggtaatttttcatccactcactctgttccttggctctaaatccccagctgtctttgttatatttgcctaatttctctcctccattgcaataatcttgaataatgtcttccttaccattttaacaagtgtcagagtaattttatttttaacaagtgttaccatggcaggtaaatctcagtctgccccaaagtagctttgggtctaataggtagacaggtaggcagatccatgattgactctatggaagaggaacacgtattcatgaattcaacaaacatgtactgagggcctgtaatatgccaggcactgaggatacagctttggacaagatactccagctccttgctctcatgaatctcacagtctgatgagagagatagatgataaacataaacagaaacagaaaaagtaaaaagggggcaggtgtcattcctgggattgtagagggaataggggtcccgcataaacaggagacaccttctgcaggagaagacatatgagttgaatctccagtgaatttaactcttgcttgtgggctacaagattcgacaggttcagagctcatctaagcatgtttgtgaataagtacgatgttggatgactcaggagccagcctatgatttgccgattgtgagtaggaagacagctgaggtttctagaggcagcccagctgagaggagacacagacagggagattatcctaataggatttcacaaagaccacttagcagtcgctgagctccagggaaaaacagttatgagctgagggtggggaaatagtcaagaatctggcaactccgcagaagctcggagagaaaagctgacagccgacagacagaacaagatgatgcttgcaaaaaggttaaaagaatagacaagagagaaaaaatgtacgctgagagatatggatggaaatggaagtgcattaatataacttggggatatggattaagataattctagctctaaggagcagagctaggacttactcattacagtacttcacactgtcaggaaactcttggaaacagatgtgggcagtggaaggtcaggatttggatggaaagaaagaatgtgtgaataggcagaaacaggatagctagttctaacccctactctttagagaaaaagaaagtgaggttcagataaataaaatgactttttcagagtcatgcaacatagtgagtgctagagctaagagattagaaccttgtacattgccgatgggaatgccaaatggtgcagctaatgtggaaaacagttggcaatttctcaaaatttaaacatcaagtgactatgtgacccaacaattctgtttgttgggcatgtagccccagaaattgaaggcatgtactcagatttgattcatggtaggttttctggctagtccagtgcccctttttactgcaccccagctgttgcttccatcttccattttctctcccttttttctcctcctttttccctcccaacatcctatcttcatccytcttctttcctctttatacatgtagggtcaggttggggtctaagctatagctttgccacttaataaatacgtgaacttggtttttattgtcctgtcattgacgatgactagatgagggtcctccagccctaatagtatatgcatttttacatactgtgccgtcacatgttcaggaactgcagyggatctagtattgatgagaggacagtacctgggaggttgcccagaagacaaccctgggggaacctgggggtgttgtcgagaagctgatacactcccggtcttgaacaactgtcatgttttctcaccctttaattgcttgtttcgtagagcttaaattctctttaattttcctgggattacaaagcagtgatctatttatgtttcctggagcatctcttcttccagggtgagttttaaaaaaaaatctttgcgtgtgaaacctactgtgggggacacacaatcttcctttaagtcttgtacttttccccctctacttgaccactatatcagtgggggcagttacctgatggtgttatttgatccaaattggtaatgctgaatttgcctttgctattttcccaatttacttggttacagtttgactgctctcttatgggagaggaaattgctgaggacttgcaaaaagcctctgggggctttgtctctaatctgtctctaaatttattgaaattctgacactagatttaggtytattgaattgtcagttgatcctcttcctggggtgggtggtcccctaaagcttcagtttgctcacctgtttcaaaatgagtcagctrctttaatgagaggtccttctgtttcatggacttttgtcgtttgtttttctaaacccattcattttcttgtctttgcccatttgagtcctcatatgagataactggtttctgcctgataattcccagaatggctctgggaagggatttagggaaggagtcaatccaaaatgggaaaaacgagctccaagtggaatattcacacctttccaatttgttctcttcaaattaggagctatatcattcagcttttctgtccattacacattttttttttccttgccaacagtacttttccatcttgaaagggaggatgggctgggttcgatggctcatgcctgtaataccagcactttgggaggctgaggtggtcagattgcttgaggtcaagagttctagacaagcctggccaacatggcgaaaccatgtctctactaaaaatacaaaaatcagctgggtgtggtggcgcactcctgtgatcccagctacttgggaggctgaggcatgagaatcccttgaacccaggaggtggaggttgcagtgagccgagattgtaccacagcactccagcctgggtggagtgagactctgtctccaaaaaaaaaaaaaaaaaaaaaagcatgaacatagattactcttctttcattttggcccaggtggcacttaaaacctatagcatgaggttggggcagtttctgagtttcagaattaataatatttttgttgttcattttaattcattttgttcatttcagtcaactttgaagatggaggttctgtgaaatggtgtgcaaaccaccatattttctggaatacctggcattctttccactataccatgctgtgtgattataaatacactctttcatagccagtatgacatgctcttattggaaaaggtttccaatgactgtattcactgaaatggcctatttatatatcaagtgtgtgattggatatgtgcttccctaagactaaaacaacaacaaacaaaaggcccagatcctgggttacccaacgatgctgccaggtctcccctagttccctgctcccaaatgttcatgtaaagttgccacaggaggtctcagtagtgagcgccttcaaactgggcaatgggattaggtttttagaagatgatttccttgttttcatttcgagatcttaattttattgaagatgcttctgctgttggtggtgctggtataactgatctaatttaatttaatttgcttctttgcaaagaaggcaatcccttgcccagctgctgctctgggcagagaggaagcaagcaggcttggagataagccatgaactttatcagacctctccaagctttatgctaatgagcaatgcttagagatttcagaattttttcccccagtgattgctttagctactgtactgtttcctaggcagtaagacatcatcatgagtctctataggtgagggagatgtgatcatctgactggtctgttactctgcttcaaggtaccatgcctgtggtgggtgcaaggcacatgtcaggtggtgttaggaagagtttcccccacccattctgtcacagtgtgcctagggaagcttcctgtgagaattctgagtgatagcaggtgtggtaagttaaacagtccttgattaaactctggttgtacctccctagtttctttcctttgtcaaggtgttcaaacttgctatgtcttggcctccttaaaccatgcgtgaataggatgtgtgcttcaaggatagagttccttattcctgtctctattttcagtacctagtaaggtgcctgccagacagtaggcttggtaagtatttgccaaatgaacgaatgaatgaacaaataaaaggaaacaaatgggtacgtatggaaaggaagatggaatgtcaccattacatcctactctccagacagamacactctgggtataaggagatccagagtcatgttgtgacgaggtattgtgagccgtaatggtactgcaggtctccccagttctactccaatgatttgatttggtgggttggaaaggatttgttgacacagatctagacatatatgtgatttgataatgggtggtacagaattagcccattttccatctggtcctgcccagatttgctcagccacggggttagtctattcagatccagctcaactttgctgtattttaggagcccatctctcaagatagtagtgattaaagtcagcctgctggcgcaatcctggcatgcagtcattctgaggaaaacgtatacaaggttgtgatggttaattctgagtgttaaattgattggtctaagggatgctcagatatctggtaaaacattaattttgggtgtgcctgtgagggtgtttctagatgagattagcatttgaatcagaagacttagtaaagaagtctaccaatgtgggcaagcttaatccaatcgttcgagcaccagaatagaacaaaagggcagaggagttcattttttctctcttttcttgagctaggactcttctcctatgcatgggcattggagcttctggttgttgggctatcagacttccagacttacaccttctcatcctgggttctcaggactytggcctcagactgagagttataccatcagccatcacctcttctagttctcaggctttaggacttgaactaaattataccactggctttcctgattctccagcttgcagacagcatactgggggacttcctggcctccataattgcatgagccaatttccataagtctcctcttatatatctttatatattctgtcggttctatttctctggagaaccttaactaatacaaagttcttcatatgaggcttctgcttagttttcttgattaagatggtgattcctgaatgagaccaaaatactcagggccaagccacatgagctaaaaggcactgacaatgctgagttaatgtagatatatcagaccaaagggtgcctgagatttagcttctttgctcttatcctgaaatgcagcaaagctgttgcttcatcatctagcttctgactctcagcatccccatctcctgatgccttcacttgaacatctttgctgggcagctccaccaccatctttgactcctcaagtatgctagcaacctgggtggaacctgcatttgtcatattctcttggccactctgagtgaacttgtgttcactctctagggaggtctaggtttcccagtgggtttctgcagccccacctacctctcagtctgttctcttctgcacccaagcactgtaaaattagtacaagcctcactaactagaaggcatgttgataggtcagatgagagggtttgtgaaatagaggaggtatctaggctgggcttggtggggaacagaatccatgaatgaaggctgtatctctaggatgagccagtggagaaaaatcctcaaactgatggaaaagaaaaaatactctggctctgaaaatcaaaggacatagccctctgaacaagtgtgattagtattctaaaaaaatatatgaaggaggcatcaaagaagaacccattggcattagcaagaggttttagggaccagatacgaaataaatttctaaaaaaaaattagcaggttttttctatgtgcagtttttaaattgtaatatatagagcaaagaaaaacccaatcataacaggacagaatatcttttaaagcttgggatgaagataaaaaaaatgcaggaacaacatgaaaactttaacacagaggcacataaaagaagacttgaatacttggaaaaatatcatgtttctgaatggaaacgtgtattcatataaatatgtcaattctcccccaaagtgattacatatttatgtttttaaaacttgacaaaaatgattgtaaagtttggatagaagatgaaatgcataagaatggcaaaagggacattttgtcccttaatagaagggagatttgcacagcaaaaagttacagagagttataaaataacttaatactataagcaatttagtggctagtgaaataaaatgtaattgaaacagaatacaaaataagataatgaaaatgatttgtgtctatgtaaatacttactatgtgataatggtagacttaaatcgttttgggaaataatagattatataattaatgctgttaggaaaatcagctttttagagggaaaggcagatcattatctcagtccgtacataagcatagattgcaaactatggtgtacaggccaaatctggtttgctgcttgttttgtaaattaaatgtattgaaacatagccacacccattcatttacgtattgcttgcggctgctgttgcaccaccatggcagaactgagtagttgcaaaagagacgatatggttgcaaagccaaaagtatttactatctagctctttacgaaaaatatttgctgacccctgctttgacacatggagagcaggaacttgagctgaagcaatagcaaataaacaggaaacatcttattctctatggttggggtgacatatttatttttgtttcaatagggacatttttgagagtaaaaggaataccccaggtaggcagggaggtattataattatagatgcctataatggatcaagaattggattggaaagggagaaatgcaagacagtgatgattagagttgagtaagattagagttaataaagttaagaataatagaaatcagcgttgttaaaagcacagtcttttaacagcagaaaggagccttgtgagtcttcatggatctttagatacttttgatagaaagtagtaactcagttattctcartgtcacaccaggcagaatgctatttawtatgcaacataaaagcagaggcaaaaactcaagtacttcttgagctgtgcagggaacagaatagatgtaagacaagaacaaaatgttcaactctaatgagaggataagaacattagaagactagtatcttggatgtttgaaacagtggagaatggccaacaggaaggaacagctgtaattaagtgcagatctaaagaagtggcagaaaaactgtgccttgcaagtttgacttagcaacgagccagctaccaagagccctaatgaggaccaaagatggaagatgtctgtggggagtgagacccgggtaatcagcttgttttttcccrtctgtgagttttccatctgatgagaagaaagggcgtcaggaggtagactggtccaagggctgctctttgaagacacctgatctcaaatcactaccatggtcaggaggggatgctccaaagtgagctccaggaaaatagctttgcagataagcccatgggcctctaagcaccttccctgttgcttggagaaaaaggaccaggcctggccatgggttaaaccagcagctggcctcacaaaggaatgtgtaagtgccactgcctttggggttgacactgcagtgcagtgggtgtatagcaactgaacaaaaaggactgactgcctaccactgggggatgccaaaagactcgcctgtagaaggcacattcacaacactggttaatggcccagtctcctaacataaataaaatgcctccatccttacatatccagcccttgccataatgagccacagtccatctcaygttaacaaatgccttttcaggttgggcctgattttccttagttattccggttcggacgttaaaatgacagagttagtaattggagggcttcagaagaatcaattagtccagtgcttttcaacttgaggacctgggaatctgggaaggagaagtggtagtgcttgaagcgcttttagtatttcaagatgcctgtgcctacactatacaggttcaaagaaatctcaagttctttgggttaggtttcaaattcaacccggtgaacaaagctgtgatctcatgctgctcagaaacctgaaggggggaacttgctttgattaggagaaaatggaggaagaggtartccttcacaaattcagtttatgcagtggacaagcctttcataacatgcagcccagggagaaatgtagtcatagggaaagttgagaaccccttggcttatccattgtgtaatctgtgtccttccatttaataggtgatgaaacctggacccagaaggaaatgggacaaggtagcacagcccaagttgtaggaaacagaaacagcaggattaacttcctctaagtctgagatttaaaggggtagacataggcatctggagacctggagttcttgtaggggtgaagagctaacatttattgaggacttactgtgtgttgggtgctgttctagaaaattcacacacatcgtctcatgtaatccctagagtgatcgtgtgagttagagattattctctgaaagattcagaggaggaaaacaaggttcatggagtctaagtgacttttccccaagatgatgtaataataatggagctgggttctaacagagtgtgttgtggcccccagggctgatgctctgcccactgtaccaccctatcttggagaatgaacctctrtgggttttggctaccctaggggcatgtgaggagggagtttcaaaattgtcctcttgggaaaaagaaaccactggacagtgcctgcatctgatctgtttccactttccccagaagcagtacatgcctgactttctgtaaatgttggattaattgatttaatttagttgattgtcactccaaggagttctgtgaaagaacaatggaactctgaattcaggcctagagcaagtgggaaagacttaggaggaggctggttgtcatttaagagaaagtgggacttcctaaaatggacctctttcacttagcaaattccacttaccccttggctgtcagaaagacccctgtttcctcagcatgggtactggtataaaaacaggcacatagaccagtggaacagaatagagaactcagaaataagcccaaatacttacagcctgatcttcaacaaagcaaacaaaaacataaagtggggaaaggacaccctattcaacaaatggtgctgggataactggcaagccacatgtaggagaatgaaactggatcctcatctctcaccttatacaaaaatcaactcacaatggaacaaggacttaaatctaacatcagaaaccataaaaattctagaagataacatcggaaaaaacccttctagacattggcttaagcaaagacttcatgaccaagaacccaaaagcaaattcgacaaaaacaaagataaatagatgggacttaattaaactgaaaagcttccgaacagccaaagaaacaatcagcagaataaacagacagtccacaaaatgggagagaaattttgccatctatacatccaacaaaggaccaatatccagaatctacgaggaactcaaattagaaaaaaaaatcccaacaaaaagtgggctaagaacatgaatagacaattctcaaaagaagatatacaaatggccaacaaacatatgaaaaaatgctcaacatcactaatgataagggaaatgcaaatcaaaaccacagtgtgttaccactttactcctcctgcaagaatggccataatcagaaaatcaaaaaataatagatgttggtggggatgtggtgaaaagggaacactttacactgctggtgggaatgtaaactagtacaaccactatacaaaacagtgtggaggttccttaaagagctaaaagaacaaccatttgatccagcaatcccactactgggtatctacccaaaggaaaagaagtgattatacaaaaaagatacttgcacacacatgcagcacaatttgtaattccaaaaataggaaaccagccctaaactccatcaatcaacaagtggatgaagaaattatggcatgtatatgccatggaatattacccagccataaaaaggaacaaaataatggcatttgcagtgacctagatggaattggagaccattatcctaagtgaaggaactcaggagtggaaaaccaaacatcatatattctccctcataagtgggagctaagctctgaggatgcaaaggcataagaatgacacaatgactttggggactcggggaaagggtgggagggrggtgagggataaaatactacaaattgggtacggtgtatactgctagggtgatgggtacaccaaactctcagaaatyaccactatataacttagtcatgtacccaaataccacctgttttccaaaaacctatggaaaaaattttttaaagacctctgttttctaacaggatggaaacatcactgcctcttgccctgtcattgatgcaaagtctaaacagtctcaaggtgaacatggtaggcccagggaagtcctgggagtgtcacctgtgggtggccttcccttcagccagcagatcactcaactgtggcagctacaggtctgtgagagacattgatggctgtggcatgtgactctaaagccccatttagtgtcccagtgatgagggctgaacaygtatatccaagttgatgcccatggatggagcaacatctcgtgccttgagtgcttacttcctgggcagattgagagctgtgctagtggtgttcacgcgaccctttcaatccatctttacccacctccaccctgctcactgccctgaaaggctggcctgtataggctctgccaatgcccttggtcttctgtatggccagaaatcagaggggggcggggagtaagagtgttctgtgtacttattccctgggccttccctgtgtggttgctatgggccagccgtgtgtcttgactgaaggttgctgttcctctcaaggggatcttctcgcccctgttctctcctgctggcttctgttaacgacttcctcccctaatcccttccatccccgtgggtgctctgctacacttacccttgtccttgcccgctttgtacctttgtaaatattccctttgttaacttgccttggattctcctcattcgaacatgcccagggtgaccctgattgattctctaggcattaactaatttgatcttcataaaaactggaggacaaggagactgttattatcaccaccctcatttttaaaatgagaaaacacaggcatagaatggccccattgttttctccagagtctcattgtttgtaaggagtagagacagagtttgcatctggcttgttcctgcacattttctaccacagcactagggtacctacttccattgattcttttcgagggagacctaagacacaggaaaacaaaggaaaaaatcaggctctgtagccttcttggaacctctgtccccaggcccagtccttatctcaactttccagagctccccacttcagaaggtaggagccaactagccacatgggaaaccagagctcctgaggggcagcgaagagaaccctaaagaggtcattccccagacagctgggcttgcaactcattcacttaaattaaaactttatcccctatggtgtttgaggctcaccaaatgcctgtagccattgtcccaagctttgtattaagcaagagtgcctcttcttgcagcccctagaagccaagaatgtgagatcattactgtggtagtttgcttatgaagggtgaggagccccagcaccacagccatggcgaacatctggtacagatggggccagtctcagtccttccatgtatggctttagtgctttggaagcttttgccttaagcctgacatctgcttctgtgatgcattttgctgagctctcctcagagggggcggtcaccacaaggtgttccattaggtgtcttaataagccttgtaactgcagcccggcatgcctctcccctgcagagctgctttctgcatgaggatgggaagggtggatagttcagacataatttgcaatggcagcaggaatattatttttgcgttataaagcatggcgagtgaccttatcaaagtaggagaagtgagcaggcagcaagtgagggcatccatggttctgggtgacacacggaggctggtgggtggtgggcgtgatggtggtaaggttttgaggccctcagctgccttgtagcgtccctgggggctgcaggatgctcagcttcccttgcagacccctgcaagttctgtctttaatagacctatgctgggccaagtaggtgtggctgtctcatgactgagaacaaggattttgtctgttctttgagggcacccctgggtttaaccctgagccctggaccagctggaggtctgattctttacctgcccagttcttctctgccatcatttctcagaagcttgtgctatctctgatttcctgaggtgttctgggataatctcgcttgcccttaaccaagtgctccatacatgtcccatttctccagaccagatcacagagctctgttcatgcctgtcttggactcctgcatccagctcatacccagggagttctctgccatgcccttcctccattgcttgtgcagcaggtgggctgtgtgacccacgtgggtatagcaggtgtgtgccctctcaacaaggagagtccaggattccagacttttttaagtactctctggagcattcgtagaaaactcagagtcagatttttctcagaccacacactctgtcacacacatgtgcacacacagaaacacatgcacgcccttcaatttatgattataattatgatttaggatgagaaacaggtttatataaaatcataaacctgcatatatggaaaagatgaccttggatcaccaaccaatataacactcccattttacagagaaggcagttgagatccagaaggagaagtgacttggccattaccacacaagacagccctttagctttccccagtctggacctctgaggggcaagaacacccgaaacagaaacaacagtggacatcgagcaaggcactggtctgactgctccgaggatcctgagtacattcacacactcaggcaagggaggggtgggctgcttgcttaccartgtctagacactttggtcttaggcagcccccttctcccacaggggcatcttcatccttaccttcatagtaacaagggatgagagctgaatctgatggtccccgtcaagcaaagcactagccactcccagagggctggttcttggagaccgcaaactctattgtcacattggcagaaggtgctgggagaatgaacctgaacaggtgggtgggatagagagtcatggaatggcaggcagggaccatgggtttcctccagactaggcagcttgccaaatccccgtacgcccatctcctagcatggggtctgacccaaaacaggggctcgaactgatgaatgaacaaacgccagagcagtgtgaagctgattctagatatgttgaaggtacccaaggactttgtatttttggtgagtcaggagaggggagaggggtcagaagggaagcatgagagccccacttagcccattgtcatgkgggggaagtcatggggagtggtcagcatggattccctctgagagccccagccaggggccttctgtcactgtgagtaaccaaattgtttttttgaccaagactttctggaccatgaagaaaaaaaaatccattgtcatttctgaaatcctggtcctggaaaccaatgaaatcacctgagcaaggactatgactctcatagaaaggaccccttaattctgatggtaatgtggatgctatggyggygggagctttggcatcaggctcatatctaaagatgagtttataggagttctcatttttctcttcatgcyttttgaatttggtaggcttgcctccctgaacccggggtatgttttcatcacaaaaagatttgaaaaacactatgatttctaattactggtgctttcctattattactgygactgcaatgaccgccaatgctacttcatatgtattttatgggagtgaagtgaaataatgaatggaaagtgcctagcacagtgcctggcacatagttggcattcaaaaaacaggcctttccttctctgatgctcacctgcgtaaatgttgttcccatgtcctcaatacatacacttaactactttattttgaagttttgtgttttttctcattatcttctattgttacgatgaattttactcaggttcttgatctttcagttttcttggccaagtttctgagattttccatgcaacacactcgcatgcattattttttcctggctggttctactaatagaattttactcctaaggaaggtgwtgtgctttttaaggtcactgtaaagagatgacatgaggtcaagtcttaccccttaattccctctcattagaatgtggcacccagaattcagccagagatggctttagtccaatttggaagccctccatgcttactttcctccttggagccaaagctacaaccatgggcatggcccctgttctttgtatacctgagggagtgctctgccccaaatctttctgctcccctcaatagcaacctattacacctgccatattcttrctattgctcaactctaaattcaggccaccagaggttatcacccttgccaggtttctttggagaaatgacaatttgagatgctaccatctgccacatttacctgaattacctcaaattctggagactctgtttcccaaaagaagtcattgcttgggttgatttctgacaggttcctgcctagtagcagctgcccagcagaggccgtggtgggagcagtcagtccctggctttgagaaacaaaattccccaagggaactgcagaaccacactgtacctgaatccatcagcatacraaggccgggtgtggcatgagatgtgcactgtgtaattgcttctttacctcctgcctgaaattgtctatcrgaagctattaatagctatagtttattttccaaatctctttagggaaccaacatttatctcaracagkcagaaatcttaattgtggagtttttaagccagaagttccttggaagggaatataatccacatgcttatttagcaggtgaagatttagggatcccggaagtgaattagcttatccaaggtcatactaggcctgactagatgggttctgtggtctaggtgttcgtatctccctcttccaaattcgtatgttgccaccgaatccccaatgtgataattttragaagcggggcttttaggaggtgattaagtcatgagggtggagcccttgtgaatgggatttgtgtccttataaaagaggcttgagggaccccctctgttcctgctgctacgtgagggcacatagaagctgccatgcatgaagaagaggccttcatcagacatggaamctgccaccaccttgatstttgacttttcagcctcaagaactatgatcaataaatttaggccaggctcagtggctcatgcctgtaataccagcacttttagaggcgaaagtgggcagattacttgaggtcaggagttcaagaccatactagccaacatggtgaaaccccatctctactaaaaatacaaaaattwgytgggcatggtggtgcacttctgtaatcccagctactcggggggcggaggcaggagaattgcttgaatctggggggcagaggttgcagtgagctgagattgtgccaatgctctatagcctgagtgacagagcaagactgtctcaaaaaacataataaaaataaaaataaataaacagtctaaggcattttgttatagcagtctgaagtgaagaagacaatggattttccaaccctggcctgacagagtgtagctactcagctcccttgtagcactggctgctgatttgtagacactgcactcttcttcgttttgcatgtctcctggagctttggggatgttcgcagtgcagccaccataaaaaccacttccaacctgaggaggaagacctgtgaacctgagtctggctgcattccatgaaaccaggctgctgttggagaatacaggagttttctgattctaaagatctttctaagagaaggtcttcttgtaacaatgatttatgccaaaacttaagagatgtggaatggagctggaatttttttwaaaaattactgtgatgattagaatgaacgtggttcctgtcacatgctgagacctcagtttgggactgatgatgaagtggggagcagggcaaagctggggacattttaccacttataatgcacaagtcacaggccttctggccaaattgcagtgttttaaggagagtggcaaactttggcttcagctagattgaagcttttttccttttccagattcacaaatacttaattacttcaaactagctattctgcaagatacccacatgtgtgatatatctcttgtaatagttaccacaaacttgtgaactagacttaggttgacattctcgtacatatagtccagaaattcaagaagttatgaaaatggagagagagattatgtgtgtgtgtgtgtgtgtgtgtgtgtgtgtgtgtgtgtgtgtatttaacactaaattcatttggctgtcaaacctgacgcaaactgttatgaagctatctgtagcctttgtctcccatggtatgaattttgatatgcctcactgtggaaatatttgtgtgtctgagcccagaatgttgccccagatctcactaggactgttttatgggcccatattacttgtctaaaaacccaaactgttctgaattctgagctgtgtttgtcstgagtgttgtgatcagaaatgagggcatggattatcatctgtgttttaaaggtggggaaacagagcttcagagaggttaagtgatttgcccaaggatgttcagctgtgtaatagcacagcaaggtccagacaaatgcagattttaaaggagctttgactcattagtgggccttgttcctggtgagtggaatgtcrgagctctgatgctacctaagaggaggcaagtaccaaacctgcagctggatggggtgggatatctgctttgtggctgagccccagctagcagtggggttttgaggggacagggtgtagcatacctctcatggcaagggtgcttgggaaatttagcaggctgtcagtagccttgccaaggagcctggtgttgaagactcagaagccaaaggccaagtgagccaaggcaaaaggctttgagtcaagtagcacgaaggactccatgaacaataaggagaaaggtagaggcttcttgagcaggaaggccactagggatctcccaaatatgtggggatgctgggctccaagtagcaactcatgctgtgagtatggcattcaggcaatgggcaggcagagtccacaggtcaaagctgaggggttgcaggaacaggcatttatacccattgttgtgagttgaattgtgtctctctaaaaaagatgtgatggctggacatggtggctcgtgcctgtaatcccagcactttgggaggccaagatgggcagatcacttgaggtcaagagtttgagaccagcctggccaacatggtgaaaccccgtctctactaaaattacaaaaattagctgagcttggtgrtgcatgcctgtaakcccagctactagggaggctgacgcaggagaattgcttgaacccaggaggcggaggttgcagtgagccaagatcgcaccattgcactccagcctggacaacagagtgagactcagtgtcacacaccaaaaaaatgaaaataaaaataaaaaaacaaaaaagatgtgttgaagccttaaataccaatacctcagattgtgaccttatttggaaataccgtcattgcagatgtaattagttaagtcatactggagtaggttggccccaatcagtatctttgcaagaaggtgaccctgagatgacacagacacacatggagaaaaacatgtgacaacgcaggcagagatgggggtcacgcagctgtaaaccaagtaatgccagggattaccagcaaaccacgagaagttaggaggaggcaaggaaagattcttccctataggtttcagagggaacatggtcctgccaacaccatgctttcaggtttctggcccccaatagtatgaaacaataaatttctgcattaagtcacccagtttgtggtactgtgttacggcagctgaggaaaccaatatactagtaaacaacattaggccagggtatacaacctccactggcgttgggatctcctggggtttgtctaaaaagtctcattgtcctggctacaccccagtctaacttcattaggatctcagcgggtaaaccccagctattagaatttttaaagctcttcaggtgatttaaaaacaaatttgcaaaccacaacctagagtaccacttattaaagatcttaaacaagggatccagttcccagtagtaacagcaccagttggctttcacgaccctccagactatgccataccttgggatgtccttggtcatttttctccacccatgtttttctcttcactcttctcagcttttggccagcaggattcaagggaatcgctgctttcccttatttgtaaagcatgtaggaatatctggcacacagtgagtgctttctaagagtttgctgccattatttctccaactgcccttaaataaaaccctggctttcttaatcctcactttctggagggcaaccccagagtggtaggattttatcatgctggctcaaaaagccatttcttattatgcatgaaaactgtgccttactttcctttaattaaggctttttcttttctttttttccaatttgcctgagagctagatcatgtgaagggcgctttaaaaaaaaaaaaaaaacagagtgaacacagagtaagtgtgcccgagcttcagagtgacattgagagagctttttgctctgagactaaagaaagccatggatcagaatcctgcccaaggtgggaaaggctgatgggcaaccagggaggccgtgtgagatggaagtccctacgaggtatgcaagaagagcctacctccagcacctgtgcccttcttctgcccaacagatccctcctgcagagcccagaaagggatcatattgagccctggcctctaggaggtcatagtccagcaggggagatagatacttaaagtagccaatggcaagcagtgataggagatacatgagtcctgtttcctggaccaaccctggggaccaaaggtgtaggagcctcaagtctcatcatcccaagcccaagcacaggttcctatataaagggggcaaggactccccagaggttcccctaggaaggatgagcrggggacacggctgggcgggcagccaatgatggccactacactagacattggtgaaaaaatgggaaagggagattgtcaccaatttgtattggaatttggattccctgccatgagggagataccctccacagagaagtgggcacccatatcaggtttaaaatcagggaagggatgtgatttgtttttatatcccaacccttctgatcctctcctctgtccagcggcccattggttacagcccagatatcccaagataatggtgggatcacagagcaaggtcatggtgtagaccctttggtcagaagcccatacaatacagggatccccaactggtcctccaatgtccagtgtttcattgatctcaggaaagaaatctccagcttcccagatccccgttccagcctggctagctcagtctggagcctctgattaaaagggtacccagaggggcaagggctcataatatggtttgtccttagrcaacagactggctttttatctgtggtttcattttatcaacagtttttgggctgagcgcrgtgactcacatctgtaatcccaacactttgggaggctgaggcggatggatcacatgagttcaagacaagcctggccaacatggcgaaaccctgtctctactaaaaatacaaaarcagcagggcgtggtggtggrcacttgtaatcccagctactcgggaggctgaggcaggagaatcgcttgaacccaggaggcagaagttgcagtgagccaagatcatgctactgcactccaacctgttcaacaagagcgaaactccgtctcaacaaacaaacaaacaaaacagtttacgtgagggcctggtactccaaagctgccacccagtttggaaaaagtgttcctttttccctcttacttctccgaaaggacagatggatatctgtctagggtgcaaatgtgaacaccaagagccacctttgacccctctttccctcagtccccaatcctatcccgttttcctcctaaatgtctgctgaaattattctattttctcctttgccaccaggataccatcatctctttcctggcagtcactcttcactggacttttgtttccctttggcctctgtactctgttctgcgtgtagcaactggactcttcgttgctaagcactggaataggctctgaggacccagcaatggataactcagatatggtccctgaataaatacatactgttaatgtagtgagtgttaaatgctaccaaggaaacaaatcacttgccttggtaggcatgagctgtttgagcagactggactgcagcagacctggctggatccaggggcccragattggtccttccctccactttgatggcagggcatgggtggtgctcttggtcaccatggtggaggaaaagatgagctctcaagaggtgtggactagggcaggtgtcacaataggatgatagcctggtaagtgtgctgaggggtggcggaggccagatacctgctttcccagcagaagaccatgcccacatcagaacaaggtgaggggacctgtgagtgtcaggggttgtgggttgtctgaggcagcaaggtgctgggcccactcacagtggggatccaagggtcctccggatgggcctctgtgggctccagtggctgctggcatgaggaaagaactggagctgaatccagggcccacccccagctcctgtatgactgtgggacgcccacgtccctgctttgggccttgttctcccatctataatatgggcaggaagaaggagacagggctggttactgtccaccctcaagaagtgcctgtcattagggaaaccatgcggtgcggcagttaagtctggcctcagactgctggggttcaaatcccaactctggtgcttccttgctgagccacactggacacattaatctttctgtacctcaatttccttatttttgatatggggatggtagcacgtaatagttaatttctgaggattaaatgaacagtgaacataaaatacttagcacagtgccgttacatagcaagtgcccagtaaacacgacttattgtcatctaattatttgctaattattttagatagaaagtaggccttgttgttccagttttatggatgagaaatctgccaaaacgtgtctcagccagtgccaggaattcagtggccgattaaggattcaaacccagggctgtttggttccaaagctcggctcatccccttgtgttttgttgccatttctgacttgcagctctagaaaccaggtgttggcctgcgtccaggtcttagagytcagagacttgaatttcaagacagacctggyctttcttttcatattcaaatrctctgcttggttccgcattgccaagcttgtaaggagtcatgaggatcagcttctaatctgggagggctttgcaggaaatagaaatgtccaaggrttgccatttattcaacagctggaagtacacagaccaggtggtggcactgaagtctcagcagccatttatacctggtttcagggacttgtctcttgggaggtgggcagttgagagaacaaagaaactcccaggaatgtattgcagtggatggagggtctggggtgggaacatgcctggccctatgtgggaggcggggagaggaggggctcctggcacctaggcctgggcagcaggaggctagggtaacctgttcctggcaggttccttgattacaggcatctgaggtggatacagattcttggagtcaaattctagagctagggagaggtggctgaccccaagccctcatcttaccaatggaaaaattagaccaggggcaaacagaggggtttgcatcatccaaactcctccttcatgccaggcactgagctagtctccttcccaacgtgctatctcgtagaaacctttactctgtgccctgaaatccccactttctaaatgcagactgtcttcataataagacatggatatctattatgctttgcctgattaaagagaagggagaagtattttctgctcttaataactctctgtgtctgtatctctctcattctgctccctgttgattattaagatagaaaattgaggaaatataggaaattgtaaagaataaaatgaaaattatctataaacccagtaataaccaaaaataatcgttgttaataatttggtatcattcattctcttttttcttattttttgatgaaaaaaagttcttgtctagaacagttttaaaagtaatgtatgctacaaagccttgagtgaacagcagtagcccttcccctctcattctctgcccccctgaggcaaccagactcagctccttttgctgctgtttccccctgcgtttaatactacatttccaaataaaataggcattctgctagtccttttctatttcatttggatatcatctatctactgagttctctggaagcttccttgtacgtcctcacttacaaaccttcccaagtttccttttgaagtcccctcatattgtgattacatctctttcctcatttccccagtcatagagataatacctgccttgctttattattttgttttccttaaagtgtttccaactccccctcaaaagtgttaatctcatctccttgtgtctgaattcttcagaatatctattggtttcattgttttctctccttgaatttacatgcctagaagcctccagcttcctagtttaatatcgcctgtgttctctttagatcccagacacatcacttgttttggaatttcckgctacctctctcctttttctaggtcccatgagttctttttttgtgtggggtttactttctcattctattagagcatggtatataggagcttcctgagaaaagttatatttgaaggtaaaaaataatttaaatatcttgcctagcagataatcattttatgttatccttacatttgattgacagtttggctggatataaagttctggtaggctataattttttctcagaattatttttttaattgacatggagtaactttccctccttttggtacacatatatagttttatgggtttagacaaatgtgtagaatcatatatccattactctagtacatacagaagagattcagccctccaaagaaattaacatctgggaaaaggaaaaagggtggwggggtacggtgaattaaagaataaaagattgatcagattattggaagagaaaccccatcatatcccacaacctgaataacatttgcattgtttcggatttttggtgattatgaataaatccactgtaaatgtcagcataccggtttttgtctcaatgcaagtttttatttcttttcagtaaatactaagatttctgagctgtacgataaatgtatatttgacttcataaggaactgtcaatctgtttttcaaaatggttgtaccattttgcatactcatgagcaataggtgaggattcaatttgttccacgtcctcacctgcagttagcattttttttcctttttcccctttgttttaaattttagctcccctaacaaaatgygcagttgtgtcttattgtgattttaatttggattcccctaatgagtaatgatgttgaacatcttttcatattcttatttgctttctgtacatcttctttagtaatgtgtttgctcaaattttttgcccgtttaaaaaattgagctgttattaagctttgagagttctttatatatccaaatataagcattttgtcagatctgggatttttaatttttttttcccagcctatggcttgtctttttattctcttaccagtatcttttacagagcaaaatattttaatttcgatgaagtctaacatcagttttttacttttatggatgatgacactaagacgtgtcttatttaacaatttttagcctagtccaaggccacaaagattttttcctgtttttgattttatattttacatttaggtttatgttccattttgagtaaacttttacatatagtgagaggtataggtcaagggtcctcctttcttccccccgctcygtgtgaatgtctaattgttctggtactatttgttgaaaagcctgtcctttctccactgaattatctttctaactttgtcaatccctcagaatttcacagatgttggctgtgttgtcttctgatttcccttcacaatattgagaagtccagtgccattctgattccttatcttttatatgagacatatgtctgcttttatcttgtaaatgtttagtctttttttccttaaatgagatggggcctcgctttgtcatctagtgtggagtgcagagatgtgatcatagctcactgcatccttgagctcctgggctcaatcaatccatcctcctgcctcagccttytgagtagctgagactataggcacatgccccactttatttattttatttatttatttattttttcagagatggggggtctcgctatgttatccaggctgctctcaaattcttgggctcaggcgatcctcttgtctcagcctctcrtagtgttggcatttacaagcatgaaccttcatgcttggccaagttttttttttttttcttttaatttcagtgttttgaggtttcataatgactttaggtttttttttaagttatactgcatgactatttggttactatttcaatttacaactttgttatcatcagttctagaaattattcttaaatcatttctttgataacatattctcagttttctctcgtatatttttttctttctttggcacggggtctcactgtgttgtccaggttggagtgtagtggtgcagccaaggctgactgcaacctctgcctcctgtgttcaagcaatcctcccacctcagcctcctgagtagctgggactacatacacatggctamatttttaatatttttgtagagacacagttttttattgcccaggctgatctcaaactcctcggctcaaacaatcctcccacctctgtctcccgaagtactgagattacatgtgtgaggcaccaagccwggccttttttttttttttttttttaacaaatcctattagttggcttttggattacataagccaaaactcaattttcttgtttttttttctttgcttttccttcttcttcttctttttttttttttctttctgtattctggacaatatcytcaacttcatcttctaagccatctattgcaatttttatttatacttgtatagttttaacatctgatagttatcttggttcttggaatgatccttttttacagcatctttttcttggataaaatctcttctctctacattaaaaaatgctcttcaaaatgtctttttttttagcttttagtttcaggagtatgtgtgcaggtttgttatataggaagattcgtgttgtggggtttgattattttgttacccaggtcctaagctcagtacccaatagttaattttttctgatcccctccctcctctccctctccaccctcaagtaagccacagggcctgttgttcccctctttgtgtccatgtgttctcatcatttagctcccacttataagtgagaacatgtggtgtttggttttctgtttctgcattagtttgcttagaatacagctccatccatattcctgcaagacatgatctcattcatttttatggctacattgtattccatggtgtatatgtaccacattttcttcatccartctagggcacttaggttgatttcatgtctttgctattgtgaatagtgctgccatgaacattcatgtgcatgtgtctttatggtagaatgatttatattcctttgggtgtatacccagtaatgggactgctgggtcgaatgatagttctctttttagctctttgaggaatcaccacattgttttccaaaatggctgaactaatttacactctcaccgacggtgtgcaagcattcccttttctctgcaaccttgccagcatctgttatttttttgacttttaataatagccattcttactggtgtgagatggtatctcattgtggtttttatttgcatcatttctctaatgatcagtgataatgagtttttcttcatgtgcttgttggatgcatgtatgtcttcttttgaagtgtctgttcatgtcctttgcccactttctaatgggattgtttttctctcataaatgtgtttaagttccttatagatgctggatattatactgttgtcagatgcatagtttgccaacattttctcgcattatgtaggttgtctgtttactctgttgatagtttattttgctgtgcagaagctgttaagtttaattagatcccatttctccatttttgcttttattgcaatcacttttggtatctttgtcatgaaatctttgctgttcctatgtacagaatgtccctatgcctaggttgtcttctagggtttttatagtttggggctttacatttaagtctttaattcatcttgagttgatttttgtatagggtataaggaaatggtccagtttcaatcttctatatatggctagccagttatcccagtaccatttattgaacagggagtcctttccccattgcttgtttttatcagccttgtcaaaatcagatggttgtaggtgtggggccttacttctgggctttctattacgtttcaytggtctatagatctgttttggtacctataccgtgctgttttatttactgtagccctgtagtatggtttgaaggcagctaatatgatacctccagctttgttgtttttgcttagaattgccttcgctattcaggcccttttggttccatatgaatattaaaatagatttttctagttctgtgaagaacatcactggtagtttggtagattctgtaggttgctttgggcagtgtggccattttaatgatttaattcttcctatcatgagcatggagtgtttttccatttgtttgtttcatctctgatttattcgagcagtgtttcataattctcattgtagagatctttcacctccctggttagctgtattcctaggtattttattctttttgtggcaattgtgaatggtattgtgcttctgatttggcactcagcttggctgttgttggtgtatagaaatgctagtgattttcatacactgattttgtatcctgatttatatagatataaaatcatgttgtatgcaaacagggggagtttgacttcctatcttactatttggatgccctttatttcttcctcttggcttattgctttggccagggcttccaatgctatgttgaataggagtggtgagagagagcatccctgttgtgtactggttttaatgggaatgcttccagcttttccccattccatatgatgttggctgtgtgtttgtcatagatggctcttactattttgagatatgttctttgaatacgtagtgtattgaaagtttttaacatgaagcgatattgaattttattgaaagcctcgtctgcatctatagagataatcatgtggcttttgtctttagttctgtttgtgtgatgaatcacgtttattgatttgcacatgttgaaccaaccacttgcatccttgcaatgaagccaacttgatcatggtagattagtttgtgatgttttgctggatttggtttgcaagtattttgctgagaatttttgcattaatgttcttcaaggatattggcctgaagtttctttttttgttgtgtctctgccaggtttttgtatcaggatgatgttggcctcatggaatgagttggggaggagtctatcctcctcaattttttggaatagtttcggtaggaagggtaccagatcttcattgtacatctggtagtattcagctgtgaatccttctggtcctgggcttgttttgattggtagactatttattaccaattcaatttcagagctcattattggtctgttcgggaataaacttcttcctggttcagtctttggaaggtgtatatgtccacaaatgtgttcagctcttctaggttttctagtttgtgggcatagaggtgttcatggtagtttctaaggataatttttatttctgtggagtcaatggtaatatcccctctgtcatttctaattggatttatttggttctactctctcttcttgtttatttattagtctattttattaactttttcaaaaaaccaactcctggattcattgatcttttgaatgtttttcatgcctccatttccttcagttcagctctgattacaggcatgtgccacccacaaccagctaattttgtatttttagtagagatggggtttcaccatgttggtcaggctggttttgaactcctgacctcaggtgatccacccaccttggcctctcaaagtgctgggattgctggtgtgagccactgcgcctggccaatcatggccttctaacagtcccccaaagtcttatctcattccagcattaactcaatagtccaagtccagagttttgtctgagatgaggtgagtcccttccacctatgagcctgtaaaatcaaaagtaaattagttacttcccagatacagtggaggtacgggcattgggtaaatacacccattccaaatgggagatgttggccaaaacaaaggggctacaggccccatgcaaatctagaatcaggcagtaattaaatcttaaagctccaaaataatctactttgactccgtgtctcacatacaggtcatgctgatggaagagatgggtgcccatggccttgggcagcttggtccctatggctttgcatggtatagccccccttctggatgctttcatgggcttgtgtggagtgcctgtgatttttccaggcacatggtgcaagctgtcagtggatctaacattctggggtctggaggactgtggccctcttctcacagctccactaggtagtgccccagtggagattctgtatggagactctaaccccacatttcccttctgcactgtcctagcagaggttctctatgagggctccactactgcagcaaacttctacctggacatccaggtgtttccatatatcctttgaaatctargtggaggtttccaagcctcaattcttaacttatgtgcaccctcaggctcaacaccacatggaagctgctagggcacaggacttgcaccctcttaagccatagcctgagctgtaccttggcccattttagccatgactggagtggctgggattcaggacacgaagttcctaggctgcccacagcaggggtccctgggcctggcccacaaagccatttttyttcctagtcctctgggggaggggctactgtgarggtctttcacgtgccctggagacattttcccccttgtcttggtgattaacattcggctcctcattactaatgcaaatttctgcagcaggcttggatttctccccagaaaatgggtttttcttttctattgcattgtcagctgcaaattttagaaatttttattttctgcttcctcttgaatgctttgccacttagaaattttttctaccggataccctaaattatctctctcagtttcaaagttccatacatctctagggmaggggcaaaatgccaccagtctctttgctaaagcataacaaaagtcacgtttgctccacttcccaacaagttcctcatctccatctgagaccatctcaacctggacttcattgttcayatgactatcagcattctggtcaaagtaattcaacaagtctctaggatattctgcactttcccagattttcctgtcatcttctaaatcctccaaactgttccaatctctgcctgttacccagttccaaagtagcttccacatttttggacatccttatagcagcaccctactctactggtatcaaattactgtattagtccattctcacactgctgataaggacatacaagagactgggtaatttataaagcaaagatgtttagttgactcaccgttcagcatggctggggatgcctcaggaaacttmtaataatggcggaaggggaagcaaacatgtcctttttcaaatggtgacattaaggagaagtgccaagaaaaagggggccatctcctttaaaaccatcagatctcttgagaactcacacactattatgagaatggcagcrtataggtaaccaccaccatgatttaattacctcccaccaggtccctcccatgacatgtggggattatgagaactacaattcacaatgagatttgggtggggacacagccaaaccacataagggcatttatagtgctatagatttccctcttaacactgccttagctgtatcccagagattctggtatgytgtatctttgttctcattagtttcaaacaacttcttgwtgtctgccttaatttcttttttttatccaaaacttattcaggggcatrttgtttaattttcatraaattgcatggttttgagcaatgtttttagtgttgacttctatttttattgcactgtgatctaagagtgtgtttggaatgattgtggttcttttgcattttctgaggattgttttatgtcatattgtgttcacttttaaagtatgtgccatgtggtgatgagaagaatgtatattctgttgttttggggtagagagttctgtagaggtctatcagatccatctggtccaatgttgagttaaagtcctagataattttgttaattttctacctcaatgatctgtctgatactctcagtggggagtctcccactattattgtgtggaacttgaaatctccttgtaggtctctaagaacttagttcatgaatctaggtgctcctgtgttgggtgtgtatatatttagggttaggttaggtcttctttttgaattgaatcctttacaattatgtaatggccttccttgtcttttttgatctttggctggataaagtctgtgttgtctgaaatgagggttgcaacccctgctttttctaatttctatttrcttggtagattttcctcatccctttattttgagcttttgtgtgccattcattgcatgtgagatgggtctcttgaagattgcataccatttggtcttgcttttttatccagcttgctaccctgtgccttttaagtggaacatttagcccatttacattcaaagttaatactgatatgtgtgaatttgatcttgccattttgttgttagttggttatcatgccagcttgtttgtgtggttgctttatcgtgtcactgctctgcatatgaaactgataagaagagatactacatttgatcttagccaaaaggctgagaagcacttatcttttgttttctacctgcacttttcccctccctgtttgttttggtctcttctgttcatgttagagatttaactcaaatagtcatcatcattggctatccattcatatttaagagattggcactaaaattttgagtctatgtattgcatgggaggggctttgttcactgacaggtttgactatatggaaataagacagtaaactggatttttatggatgaacattggaatgttcacggctaaggccttttcctctccatctggtaaatttttccaaagataagccttctgcactcatgaaggcatgggaagtatgtgtaacctggctgtgggtactcagagctaattgggggatgctgtcttcactcagtatgttggtttcagtggatcacccgtggttttgcctggtgacttaccccctctcagctggccacagaatccttgaagctatatcctctctgcttgatatgttgtagtaactacattttcagtcttatgtaggtattgagaagggactggcatctggtcgcatggcagatgtcaaagggggttttgtgggtggttgtcttaacatttcttatacagattttcaggtaattttgttttcagccctaggtgttcctgccgttagaataatctggttgccccatttctgggtccttttggtactccatgggttaaattggttgtattctgctttcttacctgatggacatacgggcttcagttttcactgctctgcttaatcagttaccatttgtccaaccatttttcttcctccaaaatgtttgcatctctcaattgctgtcacttttttccccattctcttggtatatatgggtttgtttatgtctttttaattcctrcactgtcattttggtgcatttggaagaaaatggaggttaatgcatgtgtttactttgtgatgtttaattgaaagttgaactcttctcaagtcgtttttctatatgtagattactatttatatacacacatgtgtatgcatatgctcatacgtttgctaaatgtatatatatattttacaaaattaggtgcaagctataagtcctgttacatggcttttttttctcatttagaattctatcattaacatttttatgtcattaaatattcttgaatgcttggacttttacatcaattaaattatatcatattgccrtattattacttatttaattacgtccttacacttgggtgttgaaattgctttcagtctttcagtacagtaatactgtcgtgagatttttcacctaaatatttgttatgatttctcattatgtcttctagattgggattattcaattggtggtgtgggcattttaatgtgatatgtgattcatattgtgttatatgattcacaacttgataatgtgatacgtattatcaaattgctcctcagaaaatcattgagacaactggtagtccaagcatcaggtaattactcatttactrtttgctaatattaggaattatcactgtttcaaaatcttagcttatttgataagaaatgacactgcatcctattgacctggtttttccttattatatagccaaatatattttatgttttgtcctctgtgaattrtctgttcataaacatttttatrttttccatatatgtatattataagcttttttatggagaaaggatattattctttacctggtacttacattttttcagtttttatttgctttcagaatttttgatgtctctgatgaatagttttaatttttatgttgtccattatagaaaactttatatcttcttttgcttttgaacttcaaaagttatttccctattcccaaatgagataaatattctcttgtatttttctagattttaatgatttgattttttattcttcttcatgttcaactctttatagttatgaattaattaattagctagttaattaatttttcattcaccatgtgaatagaatctaagtccattgttttttcaaatactatagttaatcagtrttccagaaccatgaattaatagtttagcctttctcccctcattaaaagtggggctgttctcatcaaatgcattctcatatatggtctattgatgttctttcttcttcttgtcattagcctgtctgtttttatgtcagtacaacactcttttaattattgtggctttactaggtatttaattcttaataggacattctcttctagttacactttatgaaaaaaaacaaaacaaaacaaaagagagagagactctktgtgtctcctttcaaatgatctttagaattattttgccaagttccagaaaactcctcttgggttttattcgaattgaaaatattgctcaaattatttttgtgataatttccatcttgactttattgagtcttcagactcagaatcgttacctgtatcttcacattttcaaggattcttttatttccctcagtaaagttttgtgggtttcttcatctggacctctcatatctctgtttaagttgattcctagttatttgctaccatgggatttaatttatttcttgtcagagcttccaagtggttattgatgctatataagaaagctgttgtgttttatctatttgttttttaaccactcatcttactgaacttttttttttaatcagtactgcaagtttttgagttgatgcttgtgttttttttaggtattcaatcatatcatcaggaaaataatggtaattttatctcttgcttttctattattataaaaaatttctttctttctaacttcttccttctctttcttcccttttaattttattgcttagagtttgcaaatcaatattgaataatgtaagtataaccttgtttcattcctgaatttaatagaagtggcttcagtgtttgactcttatatatgatgttgtctttggcttcagatgggcgctgttattctaatagagtattcttctacatctaaaatactgactttttttgaggaggatgtgagtaataaactttttttttaatttcatttttacattttgtttattctaaaaaaaggaagaaatgggatacatgtgcacaatatgcaggtttgttacatgagtatatgtgtgccatggtggtttgctgtgcctattgacccatcctctaagttccctcccctcaccctgccacccctcaacaggccctggtgtgtgttattcccctctgtgtgtccatgtattctcagtgttcaactcccacttataagtgagaacatgcggygtttggttttctgttcctctgttagtttgctgaggatgctggcttccagcttcatccatgtccctgcaaagcacatgatctcattcctttttatggctgcatagtattccatggtatatatttaccacattttctttatccggtctatcattgatggggatttgggttggctccatgtctttgctattgtaaatagtgctgcactaaacatacatgtgcatgtgtctttatagtagaatgatttgcgttcctctgggtatatacccagtaatgggattgctgggtcaaatggtatttctggytctagatccttgaggaattgccatactgttttcaacaatggttgttacattcctaccaacagtgtaaaatcatttacatttctccacagtctcactagcatctattgttttctgactttttaataatcaccattctgactggcatgagatggtatctcattatggttttgatttgcatttctttgatgatcagtgatgttgagctttttttcatgtttgttggctgcgtaaatgtcttcgtttgagaagtgtctgttcatatcctttgccactttttgatgggttgtttttttcttgtaaatatgtttaagttccttgtaacttgtggatattagatttttgtcagatgggtagattgcaaaaattttctcccattctgtaggttgcctgttcactctgatgctagtttcttttgctgtgcaggagctctttagtttagttagatctcattggtcaattttggcctttgttgcaattgcttttggcatttttgtcatgaagtctttgcccatgcctatgtcctgaatggtattgcctaggttttcttctgagatttttatggttttgggttttacatttaagtctttaatctatcttgagataatttttctataaggtataaggaagtggtccactttctgtttttgcatttggctaggcagttatcccagcaccatttacttaataggatgtcctttccccattgcttgtttttgtcaggtttgttgaagatcagatggttgtagatgtgtggtgttatttctgaggtctctattctgttccattggtctgtatatctgttttggtacaggtaccatgctgttttkgttgctgtatccttgtagtatagtttaaagtcaagtagtttgatgcctccagctttgttttgtttgcttaggattgtcttggggtcttctttgattccatatgaaatttaaaactattttttctaattctgtgagtaatgtcaatggtagtttgatgggagcagtgttgaatctgtaaattactttgggcattatggccattttcacagtattgattcttcctatccatgaggatggaatgtttttccatttgtttgtgtcctcttatttcattgagaagtggtttgtagttctccttgaagagatctttcacatcccttgttagctgtattcctaggtgttttattatctttgtagcaattgtgaatgggagttcattcatgatttggctctctgcttgcctattgtcagtgtaaaggaatgcttgtgatatttgcacattgcttttgtatcccgagactttgctgaagttgcttatcagttcaaggagttttgtggctgagatggtggggttttctatacataaaatcatgttgtctgcaaacagagacaacttgacttcctgtcttcctattttaataccctttatttcttcctcttgcctggtaaccctggccagaacttccaatactgtgttgaataggagtggtgagaggaggcatccttgtctgtaccagttttcaaagggaatgcttccagcttttgcccgttcaataagatattggctgtgggtttgtcataaatagctcttatcattttgagatatgttccatcactaccaaggttattgagagtttttaacaagaagggatgttgaattttatcaaaggccttttctgtacctattgagataatcatgtggtttttgtctttggttctgtttatgtgatggattacatttattgatttgtgtatgttgaaccagccttgcatctcagggatgaagccaacttgatcatggtggatatgttttttgatgtgctgctggatttggtttgtcagtattttactgaggattttcacattgatgtttatcagggatattggcctgaagttttccttttttgttgtgtcttcctggttttggtatcaggatgatgttggcttcataaaatgagttagggaggagtccctccttttcaattgtttggaatagtttcagaaggaatggtaccagctcctgtttgcatttcaggtagagttcagctgtgaatctgtctactcctgagccttttttggttggtagcccattaattactgcctcaatttcagaacttgttattggtccattcagggttttgactttttcctggtttagtcttggttgagtgtatgcgtccaggaatttatcaatttcttctagattttctagtttatttacgtgaggtttttatagtattctctgatggcagtttgtatttctgtgggatcagtggtaatatcccctttatcattttttattgtgtttatttgattcttctttctcctcttctttattagtctaactagtgatatattttgttaattttttcgaaaaaccatcttctgcattgttgattatttggagatttttttatgtctctatctccttcaattcttctctgatcttagttatttgttgtcttctgctagcttttggattagtttgctcttgcctctctaggtattttaattgtgatgttaggatatcaatttgatatcttcctagcattctgatgtgggcatttagtgctataaatttccctmttaacactgctttagctgtgtcccagagattctggcatgctgtctccttgttstcattggtttcaaagaacttcttgatttctgccttaatttcattatttacccaggagtcattcaggagcaggttgttcaatttccatgtaattgtgtggttttcagtgagtttcttaatcctgagttctaatttgattgccctgtggtctgagagactgtttgttatcattttagttcttttgcatttcctagggagtgttttacttccaattatttggttgatttagcataagtgccatgtggcactgagaagaatgcatattctgttgattttggtgtagagaattctatagacgtctactaggtccacttgatccagagctgagttcaactcctgaatatccttgttaattttctgtctcattgatctgtctaatattgagagtgaggtattaaagtctcccaatattattgtgtgggaatctgagtctctttgtaggtctctaagattgtcttatgaatctgggtgctcctgtattgggtgcatatatatttagaatagttagctcttcttgttgaattgttccctttaccattatgtaatgcctttctttgtcttttttgatctttgtttaaagtcttttttatcagagattaggattgcaacccctgcttttttatttttttttatttttatttttattttgctttccatttgcctagattttcctccgtctcattattttgagcccatgtatgtctttgcatgtaagttgggtctcctgaatacagcacaccaatgcctcttgactccttatccattttgccagtctgtgtcttttaattggggcattcagctcatttacatttaaggttagtattgttatatgtgaatttgatcctgtcatcatgatgctatttggttattttgcacactagttgatgcagttcctccatagtttcattggtctttatattttagtatgtttttgcagtggctagtacctgtttttccattccacattcagtgcttctttcaggatctcttggatggcaggcctggtggtaacaaaatccctcagcatttgcttgtctgggaaggattttatatctcctttacttatcacgattagtttggctgcatatgaaattctgagttgaaaattcttttctttaagaatattgaatattggcccccaatctcttctggcctctggagtttctgcccagaggtccactgttagtctgatgggcttccctttgtaggtgacctggcctttctctctgtctgcccttaatagtttttccttcattttgaccttggagaatctgatgactgygtgtcttggagttgatcttgttggagagtatcttaatggtttctttgcatttcctgaatttgtatgttggcctgccttgctaggttggggcagttctcctggataatatcctgaagtgtgttttccagcttgtttccactctccccatctctttctgctacttcagtcaattgtaggttcagtctttttatgaagccctgtatttcttggaggctttgttcattccttttccttcttttctcctctattcttgtctgcatatcttattttagtaaggtgatcttcaaactctgatatcctttcttccgcgtggtcagtttggctgttgatgcttgtgtatgcttcacaaagttctcgtgctgtgtttttcagctccatcaggtaatttatgttcctcagctccatcaggtaatttatgttcctctctaaactggttattctagttagcaattcctgtaaccttttatcaaggttcttagcttatttgcattgggttagaacttagtttttcattacccatcttctgaggcctacttctgtcaattcatctgtctgatcctccatccagttttatgcttgtgatggaacgacgttgcagtcgtttggaggaggaraggcactctggccttttgtgttttcagcatttttttgttgattctttctcatattcgtgagtttgtttagttttcgtttttgaggctgctgacccttgaatgggttttttttttgggtctttttgttgttgttgttgttgatgctgttgttgtcactttctgcttctttatttttatttcaatagtcaggtccctcttcattagggcttctgcagtttgctgggggttcactttaggacctagtcatctgatttgctcctgtgcctggagatgtcactcaaggaggctggggagcagcaaagatgggtgcctgctcgttcttctggggcctctgacctcgaggggcaccagactgatgccagtagggttgctcctgtatagggtatctgacaacccctgttggaggggctcacccagttgggtggcacggggatcaggacccatttaatgaaacactttgtcacttggtggagagggtgtgctttgctggggggaaacctacttgtctgggctgcctggattcctcagagctaccaggaagagagactaagtctgctggtccctagaaactgtggctgcccctcccgccggggctcaggtccagggggatccgaattctgtccttgagcctctagctggagttattggagtttctgcagggaagccctgcccaatgaggaaggataggtcagggttaggcctgaagaggcacgctggcctcagactgccacagccagtgtgttgggctgtggggacaaatcttgggatcaagccctccagcctccctggctccagcataaaatactgactttcttaaagccaaaaatattgaaaagattttaccaaaagcctcttccgcaacaatggattagagattgtttttctcacctcatcctgctgaaatcataacaaaaggcattttatattttcaaacagtctttcctttcctagaataagcatactgtccctgaatatacatatatttctttttcatatcacaatttaatttaattcagggagtattattgtgtacacattgataggtgagattgttctatagttttatgtttaatttcattttcaaagatctgttaaaccaaaaaaaaaaaaaaaaccaaacatgattaagatgtcaaataactcagaagggttcatgtttaaaaaccaccatatgctgtttggcttctctgcctttcagatcccgccctcacaggtcatccatttctatttttgcttctttggtggttatttctacatgtgtaagtagtttacttaaagtgcttttcttgacttattaacttaatatgttgtctactggctttctgctaagaaaaatgaggaattgcccttttaaatcactttctagcttctgttatagtaaatgtttactttttatgtctaccactggtaatctttgcaaattcagatgctatagtttacttcagcctctgcttcttgttctaggaaccatcagggtcttctgggtaaggtgaggaagacattgttgatctccccttctcccaatcacctctgtctttgacattgtcatccttgtttttacgctttcatggccaaggttggtaatttttaggcttttctccataacgattcttgcctttcatgattggttagtgtattagctcattttcacactgctgtaaagaacttccctgaggctaggtagttacaaaggaaagaggtttaattgactcaagttccacaggcttaacaggaagcatggcttggaggcctcaggaaacttacaatcatggcagaaggcgagggggaagcaggcaccttcttaccagggcrgcatgagggagtgtgactgtgcaagaaaaaactgccacttttaaaaccatcacatctcatgagaattcactcactatcatgagaacagcatgggggaaacctccctctgatccagtcacctcccttcctcgacatgtggggattacaggtccctccttctacatgtagggattgcaattcaagatgagatttgggtggggatacagagccaaaccatatcagtcagtttaatgattctaaaagttgaaagtggatacatagctcttccattattcttactgtgtaaattgtttcattgcaaaaccaaaccgtgtgctaggatyatatttccttttctgctggactcgagcatatcttctctacctctcaaaggagaatgctcctacctttaaggttgaagggattctctcttttacttacaccccactacttacttttatcatagcatctgagctatcaacttctcttatttcatgagagatcttactcacttccagagccacctgtcctactgttccaatcttcactgaatattaatcatggctgtcgtctgagatgaggtggcttttcacagttagtattactggcttcagcccaagaaagaagacttttgtgtgtgtgccagctcccagcctgaaagtttcctccagactcatttttgtagatgttcataaccctgatattaaaatgaaatgaaaaaaagagaaaaaaaaagttttctgttcaaacaggactacattctcatataatttcccaagaaagagtaagtagtcttgtgtggctcaaaatgtctgggtctaatttatttgatagttttgctgggtatacaatttttgactaaagatcactcttaaaaatttgaagttatggtgacatttctccccaggatccaaagtggttgatgagaagccctgtcaactcagcctctctcttgccctgattgtttttgtgagcctaaacacttttaaaaatccacttatgatcatttcagagaggccctagaagacaaatatcagtgatcattttgctttttttgactgaaaatatttatttttgtacctttttaattttatcttaatatcaggcttggatgaacctcctaaggtgcgttaggaagcagatgacaacttctaagtttgacctggcagaaaaaatgtttccttgttgtgctgaagcaaatgttgtaaacttactttgctactggtttcctttgccatgtatcagaacctctgattttcaccatggtttgagctttgcctccatccttggtgttggcaatccctttagctttaaactcatctcttcagtcagtcatctgacaaacgctaagctccttcagctcagccctctaccacactctatcccccctaccccagtgctgtgtttgaacataagaggacacaattgaccaacataaataattcagtagatcccatactctttagcttctgcaaatgaacatgctatgtctgcttggtctttactaagatctaaatgaattcaggactaagcctttcaaaaacctactacaaaaacatcagtgaatagtataaactttamtaaatattccttgtgtgagatggagaaagtatacctttcagaggaaacaactgaaaattaatatcagaccatctttttttcaatgttcattctcacctgtacccccattgcttttacttaactcttcatttttcttactcagcatttggtctagcttgttctatctcttttctctcttctgttgtacttttttcccctctgttatggaaggcaattaggttttgcttctgggttcttcccacaagcttgcrtgyttaaactaatgttggtgttcagcaaaataggggccttctgattgaaaaaaccttccttctgagaagtgaataaaaatatttcttctaacacatgaagtttatytgcaaggagaattcttatgaatgacatgcttgccatcaattataaccacagaattcttgtgtcacccacctcctgatgaaacatggcactaaagatggcagtcatgacatttgcttcctttataaaataaatggaatgtgctacgtgattcctaggactgatttaagtgctaacattttataatcctataaattagataactaagttcattactgcagagtaataacagctcattcattcataactacatttattgaaaacatattcttcatataaaatttgagagcttgcaaagcaatttacatatattatctaacttagtacttctaaaaaaattcatgagttcagtattataattattatcccaacttacttatggaaagtgtgactcagatatttgcgttaagatcactgacagaaactgaattacagaattcctcttgacaaatacgtaatagattgagcaaacaagaatacaagaaaagaaaaataaataaaattcaccacaacaccaaaacaagggaaagaaaactatcaaatgcaagttttaaacactggtaagtatggaaagaaacaggagacacagagtgatgtggagaggtatagctaggcttctaaatctttttccccacccaccaaaaagcatattagtaacatagtttggggattcctcaataccaaacatctagagaaaatcaagtttactgggtatcattatcctttctctcatatgattaagtaataagaaaaaatggcttggggccgggatgggggtataaacaaagcaaaggaagggggttatggaggaggttaactttctctaatsgtagcaaaatcttcrggactgtcttctaaattgagtaagataaatgaaaatagggactaccttctcatcagaaaagtaaatacctgcaagtagatgtagtgaatctgagtatgggatattcacaaaatctaaaaagaagaaacagatgcccagtaatctaagaatgaccaaatatcaccttagatgagctctctccttccttctcactgtttcattaggctcagaaatcagacagaataaagaatactcaatcttcaaacttcaaggggaaaacaaacttccctgatatggtaggaagaaagtcaggtgtcacatatgctatatatcatagcaaatggcatgtcaggatggagccacccgagtggagtcacctaggcagaacaagaaggtaagaaatgtcatggcaacattaaagcataccacaaatactaattttgaaaaaaataaagggaggaagagaaaagaaacaaggaaggaaagaaggaaaagagggagggaggaagagaggaagggagggggcaaggaaggaaggaagaaaaaggaaggaagggatgcaagcaagcagggggctgtaatatacaagggcaaggattctaacctaaaaaaataacatttcagaaacagaggtaaattattcacaattgcttcattctatagaacaatttgatatgaacaccaggtcaataaagygagggttcaggataatggaataaatggacagcatgagattaatagggacaaaaggaaacaaattgaggcccaaaatagcattartagkattaaagagcccataaataatgacagcaaaaagtgaaacaatacaaaaacaaaatagaatatacattgctggaaaaaacagtgtagagggaagtcttaacaagcacatgaatacagatgaaatagagtggtgaaagtagtcaactgaatatgaacataaagaaagctaaaggagaaagcaatttattctacaatagatacagacataaagatatatactctaaaggtataaacatataaccttttatttattcaaatataacaaaatatagcttagtataacaacaataacaaattattttggcgttgattatgcatgaaacatttatttagaggtttacatgaattaatttttcacaacaatttgaggttaatacaattagtattcccaatttatagatgaggaaattaagatatagttacgtaacttgcccaaggcaacatgtctagtatatataacagaattgggattcaaaagagtagaatgatgctattttgcctctggataaaaaaaaaatcctgaagcgaataaataactgaatgtgcaaatcaaaagagaatgtgttacaagcagctgaaccattttacctactcaccagcagtgtataaggattccagttgctccatatcctcccaaaaattgttactgttcatttttggactacaggattccatttataagtaatatctagagtacgcaaattcatagagatagaaagtagattmgaggttaccagactggggcaggagagaatgaagagttattacttaatggttacaaaatttctctttggggtgatgaaaaagttttagaaataaataatggtgatggttccaaaatattgtgagagtaattaatgctgccgaattgtacacttaaaataattaaaatgctaaattttatgttacatattgtagtaaaataataataaagagacaatgtattccaggaaaatttggtacagaatgctagataccaagacataccctagttaaactattaaaacttaggataaatacagaattacccagtattctagacacaagaatatcctccacaaggagaaaaaaaaaagtcaagttgtcctcagacttctctacagcaggattcaatgtcaaagatgaaagaatggttatctaaaagatytgagggaaagaaagcatagttcaagaatataatagaatataaagctcacaagtcatggttgtcaagagtaaatgtactcaggcagtgtaatatccataagatcttgacaaaaatacttaattacaaaatacaactaattaaaagcaaacaaaaataaaagattcatgaatgcagacctcataacataaggattgatgataagtaatgaaaccatataaatataggactcacagtaagcaacttagacaattacagttatagatcagggtatgaaggttaaaacctgggcagtgtaacaacagcggccaccaacaattaaaactgagaaattgagagagggaggagaagttgaggggaagtgtgatagttctaataccatatttgacagcatggagtcattagataagcttaacatcaaaataaatagttaaaatatagtataattacttcaagctcttaatgctttcttcacaatctgtgttcttaaagagatctttgggtaagtatctcttggtaaagaagtatttgaaaggctagttttctttcaattttgttttaatttctttttcttctgctacatacaagtaaagacaaatacagtgttaaaaaaaaacttaaagtgacatatattttatcccacatttcatagtatttatttccacctattcttccgtccatccgcccatcctcatccatccatccgtctgtccttttgtctctgtgtatatcataagatatttaaaatgatgtttgccatatgttaatgacagttatttctgggtagtgaaacttaagattttttttaaacttcaatctttgtattttgcatttcttgaattcctcaaaatgaatatgtatcatttcccaataacaataaagtaatctttcttctttaaaaataaaaagggaaagcaaatatgttaagatgttcacagtggttgaagctagatggcagagttatgggtatttataattttattctttgtagctttctcaattttctgccacttttaatttattaaaatttaaagagcataaaaggaaaacaaatgaagtacaaaggggcttgttctaagttatatagtcagaaagtgattgtgcaatgatttaaacctaaatagaaggacaggaattaagacctggggcgggttggacgggcaaaggggagaggcagcgtcgaaagacttctatggtggaagtaatctagtttttccaccatgtggaagtgatctgattttccccttttgggtgggaacagtgtttcagttgctgggaaagttacttgcagtgaatctgatgcccacagtattgtaggaatcctaaatccacaggaatctggaaatccttccatccaacctgtacttgaacagatgaaggactatagacaccaggtattattttatacaatggtaagcttcagaactgcgtactgcttttaaggcaatctagtgcaatcctaaatgcaaactgagctttgtgttacgctgcatgaactaggagtctccaggtcctgaccagaccagtcccatagccgtggggtgagagctgattcagattcaatagatatttaattcaggcttcccttgtgtgtataagtgggccggggctttgacttgttctgtcttatgtaatcaccccaacatccaggtaggtcatcttctcctygcactctcttattttattttattttattttttggttgatggagcctcactctgtcagccagactggagtgtggartgcagtggcatgatctctgctcactgcaacctctgcctcctgggttcaagcgattcttctgcctcagcctccagagtagctgggactacaggtgcacgctgccacgcccagttaatttttttgtattttagtagcgatggggtttcactgtgttgcccaggctggttttgaactccagagctcaggcaatccacccacttcggcctcccaaagtgctaggattacaggcctgagccaccgcgcccggcccctactctattttattagtacaaatttaagtctaagcatgagggtaagtgacatttacagagtcacccagtgtagttgtagtggggttgaatcacggccccccagcattgtgcaaggtgtaattcctggaacttgtgactgtgaccttatgtagaaaaaagatctttgcagatgcagttgagttaaggatctcaagaggaggttatcctggatttagggtggatcctaaatccaatgatagctgcaaaagtgagagcaaagcagagggagatttgaaatgcgaggcatgaggagaagaccatgtgaaaacagaggcagagacgacctcagggagcaccagacaccaccacgggctgcaagaggcaaagaggaattatcccctagagacttcccccacggccctgccgacccaccttgatttcagacttctggcctccagaactgtgagagaatgaatctctgttatcctaaaccrccaagtttgtggtaatttgttccggcagccctagaaaagtcatacatccaattaggaaatggctggaaagggctccaagccagggtttctgtcttctggattggttatccctgctccatctcagtgcccttctcacccaaatgccagtgagtgaagagcagccatcctgatccgggagccacacctggcaggagtcacacctggcacctggagtcacacctggcgggacaggrctgtgtgtcccttgcgtttgtttccggcagccctttctcctgtcctcagtctggctcactttccctgccaagcctcagagcaggtttggaggccttggagaggaaggagaattgggcagtgacgtgatgatggcaccaacatctcgtgcttgggcttttgattcaaccccctaactaatctccttgctgcagccacatcctctgtgacccaagtcacatattgcttgttgatgcrcagctccctaagtgctctcctataccaaagggtcatgaagcccagaagccacgtttcccagattccttcacctgcagggtcccagtgagatcccactgatgagagatctgaaaggtcaaagaaccagagaacagtgagcctccctccggcagctgagagcccctgcaggggtgcgggcagtcagcagactttgaggtgtgcccatgtttgttgagcatctacccaacagtcacccaagtagccaaaactacagactcgacttttcctgtggtccttatacttagggatttcctgaggactaccttccccactgacattccccagcctcccagtagtggataaaggtctgagtctttgtatgaaaactatctacttgacgcatccagattagctcctgttttttagagggaaccttgacaaagacaactcatctcggtgaaatgaatattttattacgtcccatttcttctgataaacacccatgggctcctggtgcatggtcagctccttagcttgactatcaaggacttgctttggtcctcttcctgggcctccacatcccctctcaccagtcaggccaggacaccaaatgcctctgtgctgtcatagtcctggactttctcgtcctgttccctctgcctgaaatgatcgttccttctctacctggaatattcctgtgtgtttttaaagaaccaacgcaaatgtcccctcaaaaatgcccagacagagcaacttgcttccccagacccattgtcactgttggattctctgggattcagaatcagagatggagatgagygtttattaggatgtttattggaaattgccccctggactagcagctatggaagggaaggaagggatgagcagcaggctgcgggaggaagtgagttsacgcagacctcaggacatcattagccaactccacggggagctaaaatggcccgtccgagtctgcaacgggcaggactggctgagrctttcaaccctagcctccatcagttgctggatgtgcagctctcagaaaggcagaccttgggagtacactctgcagctgacacagtccctggaggggctactgctaaagactgtgtgcctaagtgccctggcagctggggagacaagtttctttaaagagagacctgggcagggcatcaccagatgcaccatacccatttagagcaagatgtcttcaagaataaaatatttattctgtgtctctgcatgcttggtaccaagtacataaagcttgctcagtgaatgtttagcgggcacataattagtaaaagaatgaatgaatgagtgaacaaatgaatggatataagggagtggaagagattgaagcccgattaagcaggaatttcttcaaataatttctatacaagtagagaattttcgcccacacctgttgtctatgcttttggccctgggtcgtagtatatcaattttggtcaggacaagggaaaagtggggcatggcttaacccttggtgtaggtggtaaaaaaaataaccagaaaatcccaagaagtagataaagcattggatttatgtgtttgaaatgagacagtgccacagagagcacagggctcgggaactctttccaccatacacagagtccatggtggaaataaccttaagagactttgggaatcccaacctcttgcagtttcccttaaaaattcccatgagaacagcacaaaagcatcagatcatagcaacactgkaaagtgagacaggtgaacttttgacagaatctgggagagttttccctcaactccaaggctaataggaatggtcggaaaaacagagctcagccacctatgccgtgccactaacaaaaggaagatgtgcatccatccttctctgtccctctagtagaagataaaggtctgtaccaatctaaatgggacagacatccctttacagcatgaagaggactttctgaagcacttaatgttctattgttttcctcccacctttcttttcacatcctgctcaaggctgaaactcacaaatacaacagggcaaaaattrtcagagacrttgtggcagcgcattgcatcttggaaggtgtcgttttcacaagtgcagtgctataggtgggctggaaggaatacttctgtggatggtggtttttcatgtacaccatctgttcatagtgtcagagaaccaggcagtgagtgacagagaggatccaacccctgtccttctgaatctcatcatagttaataataatggctaacattgattgagaatttagtatttgcctggtactaagtcagaggtcagcaaactacagcctatgcatggacccctcagctgcctgtttttgtaaagctttgttggaacacagcctcatccatccatccatttatccattgtctctgcagttgtcacaccccawcagtagaattgagtagttgttaacaaaaacttttcggcctgctaagcctaaaatattgactctctggccctttatggaaaaagtttgtcagcctttctactattacctgtattaattcagttaatcctcaagcttaactgaggatcctgtaaggtttgggttttttttttttttttttgagacagagtcttgctctgtcgccaggctggagtacagtggctcaatcttggctcactgcaacctccgcctcctgggttcaagtgattctcctgcctcagcctcccaggcagctgagattacaatcgtgcgccaccatgcacagctaatttttatatttttagtagagatggggtttcaccacgttggccaggatagtcttgatctcctgacctcatgatccacctgccttggactcccaaagtgctgggattacaggggtgagctaccgcacctggccaggtttgtctttttattatctccattttacagattgggaaacaaagacagagaaaaatctatgtaatttgcccagggatgcactttaggaaatgagagggctgggttttgactgcrggggtgtggctccagagcctgcatcttcattgctgtgctgtgctcctaagaacaaggctgtaagattwaaaaaaaaaaaaaaaatcttccctatattaggaattagggtgtgagatatacctatctacctgccttccaagtgtatattcaaaaagaggatttgacagatgagggacaaacatgctatccttgttcttttggcaaaagatgagaagcaccggtccacagtatttagaagggaataggtcgagactcaataaattgcatatgggcacgtgatctatactataaaagtgatgcagcatcagaaatgcacaggctcagaaaatacaccattcatagatccttcctggggaaataatcrttgcaaaggtacttcagagcctcgaaagatgagctaaaaatcaagaattttaaaaggggtaatcatggcatgaaaaactggcatgcattccctggggggcgtctacrggagccctattcaacttgtttcaaagctcttgaggagcattttcatctccgcaaactgtctctgatgaagtatcttcactgttttgttcacagctgtactcccggggcctacaacagtgcctggtgtggagcaggcactcaatatacatttgttgtgaaactaacctgcaacatcagtgaacaggcagccctgttgaaggggtgcttgctcctttcccattggaatttggatatagcttcaatgcagacaaggccactataaactgttatcccccattaagcctcttcttcaggaaaaatttactaaccacagtcacaaacccaagtaaatgccataactccttggaaagcactaacctatgccagcaaatgagactgtaaggaaatacctcaagacatgtgtggctgtctttccgtgaggacttgtcactcctcctttctacttttctgtttgtttccccatgtattgttttatagttaaaaagaatattttcccatgctccctctaaatatgatattccgtcatctctacagaaaccctcctaggactgccttagataactctttgggtgatgaacacagtagggctctagaaagcttattaggagttaaattctgttcccaccaaattcatatgttgatgtcttcactcccagtatctcaaaatgtgaccttatttggaagtagtcattctagatgtaattagctaagataaagccatattggagtagggtgtgctctgaattcgatgtgactggtgttttttccttaacaaatggagacagatgcacacagggataaaccatgtgaatctgaaggcagagataaggaggaggggtacatctacaacccaaggaatgccaaagatcgccagcaaaccaccagaagctaggggagggcatggaacagattctccctcactggcctcagaaagaaccaaccctgctgacaccttgatctcaggctttcagcctccaggactgtgagacgatcaacttctgttgtttcagccactcactttgtggtctttgttatggcggcttcagggaacccattcagctcattgcttccctggcagttgtcagcactagagctgcctctacttcctgattttgtcttgttctctttccrtctgggtctaggttctactgcagggcttggtggaactgacagagacagtatctttggtggtctagagtgcagagaccacttgactggatgaggtggacagcagcaagaggaaggggaacccaagagatggttggggtctgcattgtggtcaagggggatagtccaaagtgcattttggtacaaaaagtgggacaggggaggagggctagggatggggaatgggagaaaggtaagactgaaataggaaactagctttgcagctgagaggatgggggcaggtggaggagtgagggatgaaaggggaagagtgggttcaggatgaaaaccgtagaaaatctaggggttcaggtgcttgatttcaagaggcctcagttgatggacatatcctagtggcttcaaggactcagagggtctgggagatgccttctgtgtcatttctgtgagtcgtcattatctcctggtgtccatttcctacctcctggcacaccagggcaactatggtgcctcagcaataaggaccgcactcccagctggccctcactggggtagggattggagtcctttccagaagtgcatgtgggaaggcagtttcaagagagacaatgtagggcagtggtcaagaacacaggctaggccaggcgcggtggttcacgcctgtaatcccagcactttgggaggctgaggcgggcagattgcctgaggtcaggagttctagaccaacctggccaacatggtgaaatgctgtctctactaaaaatacaaaaattagctgggtatgatggcacatgcctgtaattccagttacttgggaggcttaggcaggagaattgtttgaaccctggaggcgaagkttgcagtgagccgagatcatgccactgtactccatcctgggcaacagagcgagactccttctcaaaaaataaataaataataaataattaaaaaagcacaggctctggacccatgctacagtgctgtggaatctggtaacctgtcctgtcccttcttgggaaaagcagggaacatccagtggacaggaactggcatgatcgccaggttattgtggtctaccctgataggctgaggctcaggcaacctgtctggggaaaaaaagtggttctcaaacttgagtgggtgtcagcatcccctgggggacccagatgactgaccccactcagagtttctggtctagtcagtctagcttggggcccaaggatttactttttgaggggttccccatgacgttgatgtatctggctcagggccacacttggagaaccactggcaaagagagatgttccttgttgtcaacagcatggagatgttccatggcttcctggtgccttctaggcccgctgcctctgtggacagtgagactgggacctgccttaccctgctgaattccagggtcagttatctcactgttgtagtcgaagatctgcatgagggctcagaaatgccgcttctgccactgatgatcatggtagctaattctcaacatgtcaggtactattctaagcgtgtaacatacagacacatttaattcacgtaacaagcctaggaagcatgtacaacttttkccatcatcacctccatttttcagatggagaaactgaggcttatagatgttaagtatgttgcccaaggccacacagctgagagctgacagagctgggatttgatctggcagtttgagtcaacagtccatgcccttatctttcattgttccactgatcatgcaggagaagggaggcaagaaatgacccttgtaatgttggacaagttatctggcctctctttgccctcattcttacttcaaaaaaggaaatagcttttccaatcttagaagaaaaaaatacctttacgttaaaaaaataagctgtcaggattaattggataacagctgtcaaagtcttgtagctccttagaggatggtaaaataggaggaataattattgtgctattttctttgcagaccttagtacatttgggggagtcaataagtgtctaattatattcttggtaattagcagtgatggaaagaaaatggctcaggctgttggagttgggcagagggagagtcttcatgtttaatggccagtggccaagacctcctgcccctgagagaggtaggcagggcgtggcccagggtaggaggtagtttaacaagttagcacccctgtggtagcaccatttgttgattcgcccaaatttttgggcccctgccctatcagggctggggaattagagaccagctagtccagtggttatcaaagtgtggtccacagatcagtcccatcagcatcacttagaaacttgttagaagtgcagattcttggactccaccccaaatctactgggtatgggacccggcacagtttaacaagctttccaagtaattctgatgcacactgcgatttgggaaccgctgtttcagagggaaatgatactgatcttggagtcagatacacctcaatttgaatgctggctctatcaccctttggctgtgagactctgggcaaatcagggcacctctctgaatatcaagttccttatatataaactgaagggtgagaggttagagaggtggtctctaaggcacttgcattctgtctgcaatttcttttagcccccccacaaggcagaaactgtcttgttccttggctttgaaacaggctatttcatctgcatggaacattctttctgttcccttttcccctgtctgacacctacataacttagacctcagcctacagtttatttgctccagaaagttgtaggtgttttctttttatacttcttcccccaaatcaagtctgggttcttgccttgtcatagaactttccacattcctgtaatggctctttagaagtctgtaatctctaagaggataaaaactcttccatgctgactgctgttcccctagtgtcagacacatagtaggtgcacaaataatacttgtggttagaacaaattttattaacttgatgaaatgcttggctttggtggatttcataaggagactggtggaggggttagccttcatgaatggaaccaccttggggaaactgaggcatagaggtaccagtggagttagggatgcagtggcagagagaagccaggggagaaagccagctccagtagttgaggatttgaggggcgggtgctgtggaactgggggcgatctttagcagacctccatgggaccccttccacctggtatccgcgttagatggtgtgatacacgcaccttcagtgcttgcagcatgggctactagtgaagagcaaaataatgtgatggcatctgggcagcacacacggtaataagtcactcctagtatccccagggcaggcattttgcaaagctcagagtaactcttagcttctgtttattatttatttatatatttatcttggacagggttatggagctctttgagaaatagatggatgctctccccaggaagaaaaaaagagcacaaagacacaaacattccccactgtcgaccttgccactcactgggtatgtgaggaggttgctttcagacccagtcgtggtaagggagataaaagcctcaggtgaggggaagggtagacttaaatacttgatgtctctcccagccctggcattttaaagcttggcaataatagcgatgacccaatttagtaatgtgaaggcaagacggcaccattttaacaggattagtcatctcttctttttgctgtcttttctccccctttccatttgtgtcttttcccattgcaaatatacgaggtaataatccagtattttctatggagcatggcaaacatgctatatataagacacagttgaacattctgtgagtgtaattggagcataaatgtaactaatcaaaatattatcatgccaacggatgtgtgaagagtttggagatttaaaaatatatatattttagttccatgtcatttccatttagagctgcagaagcaagggactcagcccaatgaatgtcaagaacaatttggggtctgacaatgttcccagcagccctgttgttctctttactcttaatatggcagcagcttgacaactgacttaatttttgttcgttctttccattctttacccctcttcctgcatgaaccagctccccagygcaaggccagctaactccagggagttgatgatcactccttgccatcaaacacaacgtgcccacatgtggtgtgcagcctagcagctaaatgagaattayaacttcctaggtttgaatcctggctctgctaccagctgtgtggccttgaaaaagtcacttaagctctctgtttctcagttttcccaactgtaaaagaagaatgatagtagtcactacctcatagggttgatataagaattaaacaaatgaatcttaagtaaaacatgatggtatgtgttggctgttgttattgttaagaagaggagtgactgagaagataaataaattctcatgagaacacaaaaagtactgcatttctttgggaacaagacccaaggagaaagatctttccttcccaccccttcttcagagagagtctaggtagaaaatccaagccagcctgggctcctgacttaccactaactagtcaggtaaagtcgctgtaaagtcttggaaacagacttctgtagctggaaggaactttaaaacctctacctgtatatatacctgttttgcacgtgaagaaacagacagaattcttgcttacggggcagtgtgtggttaaaatgggtgcataggaagaggtgaagagtctgaagggagagtagcattatctgaccttcagtttcatctggactttgccaaatgaattgtctatttccaacatcaaagagcaaatcggtcaagaccttatgttttacagtttatgttgctgagttgtcattctgttgtgttttgggttccattgtttttcctacaataacatttagttttgctcctgggagattgaattgaattgttggggaaggcaagttatgaagtaataaagggagacgcaggtcccagtatgccctgcaacattgtcccggggtctgttttcatcacatcatcattggaaggaccagaagaagtatgctgggtaaaaagtctttattttcacttttgcttttgtttgggaggtcaggagggatgcaagcttrtgtaggggttgcrtgtagtttacatgttaktctgctttgtctccataatcttttgcctcttctctccccctgctcagtaccccttccctcgcctgcagttcatgtctcctgcttctccwtctgcctctttcccttgttccccttcctcccttcttcccttccatccakcctcttccccttttccctcctttcttcatcttagttttcattactcttttgttttctccttcttttctttcttcttccccttctccattccttctttgtcttgtgtctctccctcttcctctctgccttcctttttttctcagaaagtgtaaaagaatgcaggcggctagggatttggtctttgaggaaaagacccacgtgcacacaaactccctgcctgactctgcttgcattagggtatccagcaccggttagcagagcctctccaccagtgcgccttcaaatccaatcactgggggttaataccatatttaaacgacattatccacagctacatggattattagatagttgtttcttcaaaaattgccttaacaaatttgcatatgaaatgctgaaaccccaacttaccggtctgaatgaatggttacagaaatgcttattacttgttcacgcaaagtgacaaaatgttcacaatattcaattcctttgaagtttcaggatgtatcttttttttgttttaaataggtattatatatccattaagttccaattaacaccacctccccattttctggtatattagaaaagcagcagatttcttttttttgacacttgataattagattgctttcatagataataagaataatgttgaatgatatgtttattggtatggctattggtctattgttatgtttgcaattggcttgatgattactagttttcatggtaatactggtagcactatctgcttctcttgcacctacattwtcttacttgaaagtgcattgtgccttttgatgtctttgtgccactttcacttttattatgactagatagctaaatttcatcattatggacttttaaattagatcctgtttaaaatacctataatggaagtatgcactctgaagtataggaacaacaattcagaagtgcctgtttcctggacattagtgaaagccatgyagggaaagtgatatttaagtagtttaatgaaggaccatggctgagctgggtggcgtggatttcaggaagggtatcacctgggcaaaagcctagcagcagggacatgcgtaggatgtttgaagtgtgtattagtttcctattgctgctgtaacaaattaycacaaatttagtggccgaaaccccacacattytaatctggacatcagaagtcctaagtgggtcacactggggtacattcaaggtatcagggctgcattcttttctggaggctctarggtagagtttgttttctcaccttttctagtttttttctggccacctgcagtttttggttcatggctccttctttcatctcaaagtaagcagcatagcctccycagatagctcctcaactgtgattctgactctcctggcccccttgtctrcytaaaggacccttgtgattacattgtgctcagctggaaaatccagaataatctccccatctcaagcttatctggttaataaccttaattccatctgaaccttaattctcttgccatgaaaggtaacatattacaggtttcaaatattaggatatggacatctttgggaggcccttattctgtctaccacaaagtggccgaggactgtgtttgcgggggagggtrggagagatagtcttcatataagaggcaggaggggtgggggtcaggatgtgtaaggctccacatattctcatgaaagaccttgggctttataggaagtggggaatttcctataaaggaagacctcaatggaagtcgagaacatgtcacggttggctttgtatctcagaaagatggtgctgastactgttttattggatggtgagagaatcaaggactagactgcttaggaagtcrttgcaaaataaacagtttctgacacaaatgccatggacctgaattaggccagtgccaagggagtggaaaggaagaagatggtcagagaaacaaaaggaggaggcatccctggaccttgatgccttatcaattgtgggaggtggagayggggcagcagattttactctrcctctcagtggatttcttactattttcttcttcagtctattaaggtctccctgctacactgaaacaaaactttaggggtatgggaaagatagaaaagaagctgtttttgaggacctacatgcagcgatacttatctacgcactttataaatagtagttgtattratcctcatggattacatgaggccacaatatgagatgtgttttatarccattttatagaagatggtacttgagagtcaaagagttaagtgacttgtttaagatcatcagagagaagagatgtatcttgggttccagtttatcccagggaccccttgttagaagcatcctacattgtccttgctcaccagggcttgggcctcaacaaacagttgttgaactgcctgtcaaagctgaggctgggaatgcccaacgtgtgtgcacatacttctcctaagtcatgtgacatgtagaatgcctaggacttctatgcttctgcttcctgaaggcaacatatgctcttttccctcttaaatagctatctgggaaaccacttctgtggctgtacagctcgggcaaggaacggcagagttgtctgcggtagaaactgaaatcggagtcggaaaatctgagtctaaatcttcattgtgttggttgacctyggccaagttacttgttccctactggagtttataaaatgagtaggttgggttagttaagttcctgtgactcacttggatgtaatttgttatgctttggtaagtaatccacaacttcaagaccagtgctatccaacagaaatttctgtgacaatggatgtattctacaccagcactgttcaatatggtatccaccagtcatgtatgtctactgggcacttgaaatgtggctagtatctctaagtaaatgatttttttctacttaattttaattattttaaataggcatatggygttaytagctactggttaggaaagtgcattcctagaccctgtagtctctgctttctaagaaggaataattggtttgagtatttatcactttctggctatgtggctttaagaaaatgactttacctctctgttccttcgtattccttgctttaaaacagagattgcatggcaccacctcattagggtgctaaacaatgcttagatcaatgcctggcacataataagttctcaataaacataaggttttataaacggcattgggctcactgttacctgctgttggctatctgttataaaattagcgtttattaagtaccgtttttacttaatattcactgaaaacaaacaactttgatctgtaggtttcattatcccattttatagrtgagggcattgaggcccagggaattttactgacttgctcaaagtcacacaactaagaaatgccagaagctggagtgaaacccagyttacttaaytgaagatccagaacttgtttcatgtcaccacagctgcttggcttttggcagcatttgaggccccaccagcatccattcccttcaagtaggtgctggcactgggagctggcggggccacctgtctgcagggaccatgctgagctcttggtgcccaaggccctcagctgccagtcgcccgagcacactcatgtaatcttaatgaacaatgtgcaaagccattaaaaactcaattaggactttctttttactgccgacgtgaggaaatgcaatcctgaggtgctcatgtgtaaacacaatagmcrccatctgctatggagaagcattttgcctccaaaaaggagwtctgtgttgcagacacatcaataacgaggcgcttatcaaggcattattatgcacgaaggggaaaaatgcaaaatttatggccagccagagagtacttcctggtttaattccacaattttcagtgctatgtataataactatgaggaaactaatgctgttttatgttccttatcacgttagtagattttttttttttaagggagaagggaaaagaatgtatttacagtctttctctttcttgtttctgactgatcttggcgtaatgaccggctcatttttgatctccaggaaactgacagccctgggatgatattaattatgccaacctgttgatcaaagcgggccccacagagctgatgatatacaaggrttttcactcctgagcaatctctagtggcgcgcttgagctcaactcrcagataggctcccttcctttctggagggtgtggtcagacctatataaggtgggctacatgtggaaggggctagagatggccgctggatcccaccccccacccccaagaccttacactascattgctggatgcttctgtgcctttgcctrggctattctatttcaaatgcctcccaagttaccaccaaggcttgctgctcttaatgatatccttaggtagcctgtcttgcaactttgcttagtagctactgtttcacatcttattgccttaaataaagggacttgtagctgaataatagtttattccctttttacttaaaatccaagatgagtgctcctaataggtgagtagccttctgtgtggttgtgctcattcagggaacctggcttcttttatggtgcactgccctctcctaggctcttgagctctgggacattcagctggtagatgggaaaatagaatgggccaatgattctcactgctttatgtacatgccgatcacctggggatcctgataaactgcagatccaaactcaataggcctgggggtggatgtgagattcttgtttctcacaagctcccaggtgatgctggggtggctggtccaaggaccagtctttgagaggcaagatcatttagtatggaggtgtgggggtgagagggaggcagcttttaccaaccaggcctggaaagtggcacacatcatactcatgccccattatctagaactcagttgcatgtccctaccaaatgctaaagggaggctggaagacatagtctagctgtgtgcccagaacaatgttacagggttgtgcatgaagctacatggaacagggcaatctctacctcctcagcgagcctgccctgctaccgaagctaggatggaaagaagtgggatcawgaactggtggaaggaaaaccttcccaactctctctacagtggattgtaaggagccaagggtacatgagcccgtggcgtgaattggcaggaggacaggagctgaaatgtgcatgcgggtatcatgggattcagagaggagagagacactttgcttctcaggctgctgcctctgctgggagatgtgctactcctcagtggcagaggcagtcacaaaccctttgtggggcttgtgagttgctacttacctgtccaaggaaaccttttggaaccctgtggcatgtargccagtggacagatatgggcatggatgcaggctcggtctcatctctaagcctcaatttctgcccctataattgctcctttttagctgcccccttgcgagtttatgataattcaataacttctctgacatagagacatygctccacttaccttgtgttactgcacggccataaaactgggacgccttactcagaaacacsaggcaaagacaccygcacctttgttccacttccagtggctccttccccaggaggtgctacattttccgaaatcatgacttttgcggcaatatggatggaactagagacaataatcttaagtgaagtaactccaaaacagaaaatcaatacggcatgttctcacttataagtggtagctaaataatgcrtacacatggacgcagagtgtgaaatgatattcactggaggcttggaagagttggagggtgggatgggggtgagagatgagaaattacttaatggatacaatatacatcatttggttgctagtcaaactaaaagcccggactctgccactatgcaacatatccatgaaacacagctgcacttgtatcccttatatttacacacaagtttttctcattggtaggatggcgaaaacctgatagccactggttcaggtttctctgtgcttttcacctggctaccttttggtacaaacccacccaactatcctaagtggtcatcccagtaagacaactgtggccctagggatctgggcacagttggagggtgggtccatggccatccgcctgctctgcatggtggttcaggggaaacatgcagaaagtctaatttggccgtaagtccaagttactttgtgaataataacgtggaggttttgaactcctctctctctgtctctccctttctatctctctcatgtctgtttttaaattcactcagaacctgaaggagacagggtttgattggtaccttctagaatcccaagaagttatgggtttcccagcacttattaactgggagctgttagtctttttggtattagggtgaaagaatgaggtgacttttagctattgaagtagctcaacttggctgaggataagtggtcttaaggtttatttttgaattgaagattttagtggttttctaggtggaaactgtccttctagaatcaactgagtttatctgcagtgttccatgatgcagtttatttcatagaatcataagactctaagttcagccctcccagttgcttgtgaaatttccttaatcatctctttaatttgtctaggctctgttttgccacctgctttggtggggactcactttgtctctggccagtccattctattttgcaccaactttacttgttagaaagttatttgtacactgaactgaaatktaccccctcatggtttctttcatgagtctgccctcccaggcagctttatcaataagctattgtcacaataaagctgcatgacacactgaaaagaaactcactggcaaacaacaataagcgtttattctagctctcatggaactgtgcattgattgtagattggctgatctaggttgggcttttgggccatgtggctgtgattccagctgcaggggtggcatggcttggttctttaagatcagttcaagtcaggtgtcctccatgtgtgtattcttgatcccaagctgaaaggggcagcagctactgggggcacatccttttcatgaaaggtagcagtagtgcaagacggcaagcccagcaaggcaagcacattttaacctttgcttgaatcattctgttagcatcctattgaccaaaacaagtcatatggtggagcccaaagtcaagggatggggacataccctctgtttctgctggaaggaactgcaaagccagtggcaagggacatggatccagggagggataaagaattggaaacaaccatttaatttgtcaaagcaactcaaaagaggctcacttcgtcctacaaggaaactttttgaatgcttggagatgttttctgcaaacagtaatagtagctatgttttctgcaaatagcaatagtagcacgttgtagaaatacttcatacatgttaccatctcttaattcttaaaaccaccttattgaatagattttttatacccaattacagaagaggatactcaggctcagagagatgtggcttttgcagggtcacccagacccttctagagtgacttgatctctggccactcctctggccaccatgtttatgggtgtgactgattttyagaaggattttcttactttctctttgtctctacttcccacctgctttgtgggtctccaggatctttcatgrtggtgaacagctctgggagagcctctggccagaaggcccaccttctcctgccaaccctgaaggagaatgacacccactgcatcgacttccattactacttctccagccgtgacaggtccagcccaggggccttgaacgtctacgtgaaggtgaatggtggcccccaagggaaccctgtgtggaatgtgtccggggtcgtcactgagggctgggtgaaggcagagctcgccatcagcactttctggccacatttctatcaggtatggcattttaccatggttttatttttgaaaatttgtaataaatctatacacctttgctctccctacaggtgctaggtctagaaaggacttcatttattcactygtgtttactgygcttctcctcctagccaagctctgcagaggtgacctaacacagccgctgtcccacttgaattcatcatttgtaggaaaagactgatatgtagataaaataacaatgtaccaggatgcatgtggctcctgaagatgctagaggaacataggcattgattcctttttataaagtcagtgcttatgacatgatgagggaggtactagtactagcctattttatggatgaaaagattgaggttcggagagatgaaataactcgtaaaagatcaccctctggggaatggggtgtttgctggggaaggcaattaggatggtttgtaagaggagatgacatctaagatgaatcttgaagaatgaatacaaatttattttaaaagggagggagggaaaggcatttgagttgtcacagacagtgtgtacagtgagctgcaggggtggatgatagactatggcagagtttggaaagtctaagttgtttaaggtacattgcaaagaggacagacagggagatcagcctgcagggacaagcagatcatggggggctttgaatgtcaggctaatggatggaacttagtttaaagcagtgctgctcatactgtccatggtgaagggacacttcctctcaactcattgtggagcaatactcttataaaccatggtaaaaaaaaaaaatcatggcaatgacagattgttgcaacagttcctaaacctctctctctttccttccttatctccttgcgaacygatgcacacagygcacagattggcaccaatccataaagcatgcttagaggaacatttctccacattgtcttggcctggggccattgaaagttttgtttttttttttttaacaatgttattaaggtaaaatgtacatatcacagaatccacctattttaagtgtgcaatcccatgacttwagaaaacctattgaattgtgcaaccatcattataaagcagtccagaacatgttcatcatcctagtaagatacactgtgctcatttgcagttaatctccacttgcactgttgaaaggttttaggttagagggtgaggcagtcagatctgcattttggagaaatttctctagcatctgaagcagaagatgaaccggtggctgggggcttcttagacattctccaagttaatatccatgrtacagttcttccagattttagtgttaggaatacatgtatctattgagattgcttgttgggtttaccttaatgaggcaattcaagctttatttcccttttgccttggtaacgagaaatcagaatttaatactcaattaccctcaatatttagactggatttttgccatacatatttcaattttatcctcaatggcttgtgatttccttttagaataatgttatttttcttcatgatgcatttcctgaaactcctttcagaaataggggagaggtagtgatgatgatggtaatggtggtgatggtgatacctaccgttcattgggtgtttatcatgttccaggcacagtacaaaatgtttcacatacattaccttgtttaatcttcacaacaatcctttgaggcaggtactacgtacccattttataggtgatgaaacgaaggctcagaaatggtaagtgataacccaagcttgaacggaggtagtgccttgttttttacccgttttgtttgatttcactgtctaagctagtataatccagtataaatataaygggaaccacacatgtcatttataaacgtttagtagccacattaaaaagtaaaaggaaatcagtgaaattaattttagtaatacattttacttaaaccaacgtatccaaaatactatcacttggacatgtaatcaatctaaacaattattagtgagatgttttctgttctctccctgtcaatctttataattcagtctatattttacacttacagtaagtctcaatttaaatgttttattttcattagtaataatgatctgtatttggactcataaaatgtatagctgaagaagtggatacatatacacaagttgttccaaacattcttaagtgaattgggtatcagtttttaaattaaaatgtaaggtaactgaagttaagtaaaatgagaagttcagtttcctagtctcattagccacgcttcagtagctcgtggttgtcaaattagtacagatcataattcttaaccacttggctccacaatttcccctagtagagttcttgaaaggcttagccacgcctggaacttgtggatggggagatgaagsggggtaactccaaggctgggctctcagaagggacctggcctttatgaggtgctggttctgctcattctcatcctccattgctggagaatcccgcagctatctcttgtaatgccttggtctgtgttgagggttttcttaaggtttttattttggggttctttgtcaggagacttaaaggagtaaataatgagatataatggcaatgactgtcgaacagcacaggtgactcccgcaatcctggagatctgcaagcagcctgggagatggacctaagtagccttgtttgggaccacgtttcctttgcttttcccccagcctcatctccttggcctgcccatgggtgaccaagagccagaggcaggaagtaaggaaagttaggaagagagcagaaataaaagaggaagtgagaaagagaagaaaagagaaaaagagagagtaaattcttggaagaactcatcacaccatcattcagccactcgctccctattctcatctgcttgtcagtcattttgcatcctgcgtgagccaggccagttcaggcattggtaacgcagaggtgagtgggacagabctggccttggggtggtcagggtggactgttgtcatttggtgtgaggttaagcccctgttcccttctttacaacagcaggaacctatgaatgaaagtggctaaaagcagagtcctttgtttttaacacgtgtcactaacaacgtgacgtgttgtatcctagatgttttgagacaaattatatatctttggcctctttacttcggtgtcttttccttttgtgtaatatgttttagtacaaacctttatctgaaactgatggtgtcagatatgtgtcagaattcacaatgtttggaatttagtaatatattagtaatatattggcatatcttctgtattttataacaaccctggtaggctctgaggcagtaccctgtaatcaaatgtaatatttctacagcaaaacttacacacactcacaagaaatgggataartaaagactgtaagtagtatcaggccattcggctgtgttcaggttttaccaccaaattactttttataatactaaggtgaagaacgttgttttcagagcttttggggtttcagaattgcattaagcatatagccttatattctctacctgcacagttgcgtgaacaaggggatcagatcttgcttgtacattctgggaagaatacccagtgtatgatttgtagagtgtgctctgtggaacatgtgttccccgagattctctgtagtgaaggctgatgtggtggaggtcacagcattttgaaaaagctgtgtgatgtattcggttctaggagactcacagttacccacgtgggagttctgaggagtcagaaagaaatccatttattggtgtttaacctcctgtcttgcctctaagtttgatcttggccctctttttgttggatgaccacctgactatagagatagtattctgcagacaggtggccctacatctcagtttgctgggacaaccctggtttactcccattatcctggtgaaattaagagcatccatttcatagtgtgccccagtttcagtgataaattatatagtcttcctatccatagacatttacagaatgcatactggcacatgtggcttaggtttatcctcattttgtagataaggcaaacattttctgttaagggcagaaagaaaacatttttgtctttrcaagccatacaatttctattgcaattactcaattctgccattgtaccatgaaagcagtcatagataatatgtaaatgaatggacccagctgtgttccaacaaaactttatgtgcaaaaacaggtggtgggctggatttggcttccaggccatagctgaaccctgatgtacatgataaagctgatgatgtccagagttgcatagtgaagtccaagaacacgtaacaaattattggcaaagctgagagcagatcccagataccctactccctagactgtcaccactgtatcattgactgtagacataaagtatctctaaaagctcatgggcacggtcagtgagcctttaaggtttcaattagaaaccccatatataggaccagacacaaatgggtacaggatggggccacaggttgaagtacaatgaacaagaaaattgactgagtacagggacagtcataccatttgccatgcttttggatgaggcatggggggaaaggacatttctggagtaccccctatgttcacaccctatgagaggcatgagatctgtgcagtagctccctctattaggtggcaacatgtcctatcttccagcgtaggaagcactactggtaaattcaagtccccatgatccatcccaggtcctctggctctaagctctgctttgcctttagggaaaatagcttgcactttctgagaatcttcttcctagttgtgtaatgttagctgtatcctgtcatcattcagaatcacagttccctcatctgtagaatggagaggatattaggtatgatargaccttctgcagatgaaattagagaacatatatgtatcatcatgtcaggtatattagtctgttctcatactgctataaagaactkcccaagactgggtaatttataaagaaaagaggtttaattgactcacacttccacatggctggggaggcctcaggaaacttacaatcatggcagaaagggaagcaggcacatcttacatggtggaaggcaagagagagcctgtgaaggaggaactgtcaaacacttataaaaccatcagatcttgtgataactcattcagtatcacaagaacagtatggggaaaaccacccccatgatccaatcacctcccaccacgttcgtctctcaacatgtagggattatggggattacaattcaagatgtgatttgggtggggacacagagccaaaccrtgccatcaggcttgyagtgggcctcagtggaaggaagggaggaagggagggagggaaaaaggaaaagagggaaaaagagacaaaggggaaggaggaaggaagcctttttaaaagaaatagccagtgttgttaagcctgtactcagtaacctccatgccctcccttggataagtagcctcatctgggagaattttctgatttgcaccttattggctactacagcctcattgcatttccttggctgagagcagcagtttggagagagatgttatacacacaccgtcactaatggttactcacttggccacaaacactgcagagtgcccacatagggacaagcacccacaagactctcagattcaaaacatacttgcacatatacacataagtacagtggcaagaaaaggaggcctatcagaaaatccaatgacactagcaaaatgggttttaaaaktcaccagacctggagctctggtcctgtacatatgattctatgggctaaatacaaattactgggcttcggagctgatggtttatgtattaatttattaaagtcgtattttatagttctaaaattgacttttagctctgtaataaacactgaaatttcctctttctcattagtgagctttctggcaccagacttttggcaaggccgggggtgagaacctgcctctgccagccatctccygacatgtgccttttcttgggaaagcaggggcttgtttgtttatttacttttaattgacaaatattaattgtgtgtatttagagggtgtagtgtgatattttgatctatgcatgtgttatagaaagacttagtcaaactaatgaacatatccatcacctcaccaacttaactttttttgtatagtgagaacattaaaaaaatctattctttcagcaattttgaaatgcacaatatattattattaaatgtggtcaccactcagtgctgaatgactgttaagtcacgtgtacttcagatcacagctcctttctaggtgatgttaatttgatttcatattttctaatgattctgaattttctgtttcaagatttaaaaaaataaaagaacttctgttaattttgcagccatctgcttgccctagtctccatcacctgcctaggaaaaattayytttatttggtagttattatcgctatataggcccctgaaattaaggactcacccagctttggttcaactggactttaaactcagtccctttccctggaaaacsgtgctatgtggcactctgtagatttagtaaattcactcacaatgaagtggagtttatcacaatgaggggcccactctaccactcttggaattctattccatctgcttccttacccatcccacttctctccactaagcatcaaatcctcctccttgtcttatacaggtctccttgggctgatagggtaaaaaaagtctctcttaattttaccctaaacaatctctccccatgaaaacatgtatatttatgttctaagaggagttctgatgtgccaacatttttctcttctcctgaaaatgtttgcagccccttgaaatttttgccatgcagattttctgctcaagaactatraaagattaggttaaaacaccaggtctgttaaaccatggcctgacatatccacaccctcctccaagtatgaacaaaaaccattttttggaaggatgagcaagactcatctcagagcctcttgtggggaattgcttcctggctttgcacaagtagtcatgcacagggagaggttttcacctttccatgcaagcctcatctcttcaacaccygcaccaggaggtctctaatgaagcctatgggctggagcatgtgcaatagatggtaggtccacatggcagccttggagctgaagagcatctacagagacgttggaattctcagcctgggccctctgctccactccctgtactcagggtctyggcctccatttactgacttggagtgccactgggtatgcatggcctgcctcctgaagacatcccatccctactcccctgcctcctgaagacaggaggaaaacactgcaccagagtcacctctagacttctctactcactcccctggctctcccatttcctgactttgattcctcaagggccgtggttgaattttcttgagagtgtgcttgggtcagagataaccattctccctctcctcagaacaccttggcaggtctttccatctctgagggtccaggcatcaccttgtccccttgtggtgtctgtccctaaaaactggagctggctatctattgggtggggcttcctatggctaggagtctcacgtcagaagcatattgatggagtgatcatctccctccaaggttgtaggtgtcttctggggcaccttttgatcatactcagtgtcattttacacaattacattcatagattattaccatttttacttcctctttttgtgaattacctgttgaagtcatttgccactttttaatttgaatgrtttgggtttttttttttgttgattctcaagagtcctttacacataaaaaaggatattttcatattagctgacataggtattacaaatattattctcaacctgtcatttgacttttaattttgttttagatttttgctaacatacaaagcacacttgacaccatagttattaagaaagcattgtgtaactttaaataaattggtttttaagacattgtcactaatttctagttgtagtgaatttggttagaaaatgtataggcccaaagctaaacaatttcttcttcgagggatttattgaagttatattgtagcctagtatatgatttttttgcaactgagccataagcctttgaatggaagtttcattctgtctttacatttattaacatgtatctaggaaatacattattatttacattatatatacttgctttttcctatacgattagtagtcaaagtctaagacatagattaaagtcttcaacccatgtctttttcatcattttcttcacttaagtcccttgactcatgtgttttttctaaatgaccattttagtccacctaattttttcattgttcttttcagttaaaattctacttcaaggttttcacactatttttgcaacaactgctttctgtttatttgcatttctttattatgtctttcttcaacttgttctttttaatgttrtgcagtcattctgttttaggtgtttatcttatagcatacaattcagagatgtatgacatgggaagatttgagaaatgctaataaggtagaataaaaaggaaaatgaagatgagggctgaggcagaagttgaggcccaatagacaccctggtctccagcttgggtgactgaatgggtcatagtgccacttaaccatattccgtatttcagaaagaatagactattggtcaatgagggaaaaggtttgaggaggaatctgtgcagatctgttggattcacgtcattgatgtggtacctaggtagaaatacagatctgtgacctggacacctaagacggatgtgtgggtgaaaggtctagggtgcagagctgggctttggagttatcagtgcattggcagctgttgaagggagagtgtatgcagtgaaaagatgactaacaggggcccacgttagaagggaagatggagaaggaggaatgcctacagacctcccaggcattgaacagtgccagatttatgagaaaaataacaagaataaagtgttatctgagcctaaatagaaaaaagacccagaaatggagagtctatgaacactgacagttgtagaagaatggtcaagttgtgataataattctagtaaatatttcttgagaatgtaccatgtgccatacattgttctaagtggggtcttaactcccttaatctaaaaaatcactcaatgaggtagacactataattaaagatgcagaaaatgaggcacagagcagtaacataacttttccaggactactaactagcaagtggcacagccaggrcttgaacctaggcacttggaacaagagtttaagcactgtactatcttccttcttaaagtaagataaagattgaaaatatctacttgattaagcaattagaagattattagtatcttccgtgtaagcagttttaggggaagttccagatcatattaggttaaagttttgcagtggaaagtcaggaagtgttgggagtcaatgaagataaaactgctgagaattttaagtgttactgaaacacaactggatggtattagagaaaacctgctgctgaagggtagtttttaaagaataggagaagctgttgacatgtcaaaattagggataaaagggagggtttggagatatagggtagacagagaaaaccaaaaagaatccaaaagatggaaaatatagcaagagtccgggtcaagagcgctgatgttccttgcaaagaagaggcaggggatggtgtggatggatatcaagtcartgggtaaaaagttagaagtcagcccctctttccctcttgcctcttgaagatgtgggtgtctgctgggattacatgggtgcatgttgaaagggcggcagttgtgtaaggtacaggattggagaaggcaaatgtgttataggctgggcaaagttgcaataaaggtgcaaaggaatgggggctttaggagagactcgtatggagtctgaggagctcacatggtagcctggaccttctgcattaataatccaaggattagataagaaaagcagaggtccaggctaccacgtgagcctgaggagcaggtcaagaggagtcaactgggatgagactgtcggtagagactgtgccggagtatgggaaaatggaatttccaatttccagaaggtgaaaaatgaggtgaaagtggggctaaagtggattgaagaaggccattggaaccagagagttcaaggatgttggccatgctatccacacagacattcatatctccttggtgaagatagaggttgagtgatgagggaagctaaatgcattacaaaatttttatggaaatagcagtttaggtggaagtcagttgccttctactcctggataccaacaggtagattgccacttatttttaagagtgttattatagattcaaatgtaatatgttccttggcaatgtagaatcaactcatggtaaaccctccttggcttatggtagcttccaaggtaggcatctatcttatccttcataagaaagttggaatattagaaagtagttctctgtagaagaatggtcaagttgtggcttgacccttgaagctgcaatgagaaagatgcagactggggtttccgagacctcggtgtttgggttgtttttcctgcatctaagtgttatttctgaaatttgttaaaaatattcttcttttgctagccaccaaagtgtggcctttttaccttgtgttgaaaatcccagtcaattgccagggtagcgtgctgtcttaayagaaggtttcttgggttgcttctgatgggaagttgaaacataaagggctgggggccgggcagcttcttgtgatgaatgcctgcaactgtttctgtgaaaytgactccygccctgtgtgttgcaggtgatatttgaatccgtctcattgaagggtcatcctggctacatcgccgtggacgaggtccgggtccttgctcatccatgcagtaagtctttcccttcctcccaacacagccttgatccatgccagactgggtagcatagagcctgcaatcccttccattcattcagcttacaaacatctctcactctctctttctctttgaatccttcagaaatgcttacatactcaatgcaatcagtcctgaataaatccataattttgccggcctgttcaacaggcagcacctccaggaatttgcagagagtggcaaaacatctttgtttgaatctctctccattattaagggagtctaaagtcctgattgtttattagtgggattcagaccactgaagtggtagaattagagggctttggatagaatcttgtgcaattgtcttaaaaaaaaaaaaacacaccaccaccaaaacactgagcaaattagcacactgttccctcacagggaaaagtaccctgaagttattaattcttttaaaataattttaaatatactcatcagctccatgtaggcatagagatttctcatagtggttagtacttatggtacagcgtcaagagtcctcaaaggcgtggcactcctccatacccatctacttctttgccatatttagtctcagatattggaatgtgtttcagcagggagatgtggtttctggatttactaaatctcagaggccataagtcctgggtacaggtagttgagatgacatcatacccagtgacatttggttggggggactgaaatcaaactgatttgcatggagattatggcagaccctgggagggatacctggaatgccagccccatgagtttgttagtgttctgcagattggagattcccagtagtttcttggcagccatccagttctaggtaaccccctgtgggctctctccactcctcccatatgggcatgagtcatgctttgggctatggtgcagtttgctgctgcctcaagagacatcatgggtcctcctctccttatgtgcttctcaatcctcgcatttagggactattctcatttcagcctcatccatgttgctttaattgaaataactctttccacttctgctgcaatgaatttgtcagaccctcaaatgtaacttccctccctctgcctggcactagaatgccgttgtctgactcattgtcttagagccccttctctggaggaatttggaacacattacaagttccgaacattattttgagaaattgtgtttggatcctgtgcaggagagaccctctttcccaagaagcaactggtatcttgggaatgctgagatgctactgggctcttctttgcactggctgaaagtccctaccctctgggttacttcctgaggcttttagaatttctcagatgggtctgtcattcagtcatgcctggggaaatgtttctattgacccagacttcatgtgaagaggatcccagaaatccccccagctatgcagggtttatgtagtagatatgcatatgaatctccttcactagggtgaaatattccccaccctggactcgtgggagtcaccatcagctgctcatttgagaatgagcctaagactgggcaactgtgttgggagatgtctgtgctacctgtggtccatttaattgcatgcgctcaatcttgcactacctccagtttcgaggtagtctctctgaaacatgccttctgtcttcctcattccctgcctacatcccatccactcagagcgtgcttgcctctgccacatctacctgtgttcctgcttcttactttgtgctggatgcttggactttagctttctagtaggtgacagctggcttttcccaagggaaaayagcatgagtctctctacctggatcccagaactttgtgctctaatgggaattttcatctccgtcctgatgcccaaccttgacacctgtctcttaccctagccgtaactaccttcaaggccagagtggtaaaagctctgccttacctccaagcactgaccatggtttgctgtcacaagcaaatgcatcctttttctttgataaatctccatgggagagggctctttggagggcactggaatgactttccaccccccaaagtctcatgaatccttttgaaattctcgtttcactggggttgctcctgaagtcaggattctcctgacaacctcatcctcctcctgcagaggggtgtgggtggcatggtcatgaaattgctgaaagccagttacccagcaaatggaccatgggatataactcaggaaggcgtgatcctggctttatgtctgcataatgtgctcctgttgggttcaacctcagtgttgaggcagcttaagcataaacttcccagaaagcatgatgtgaagaccccataggagtggctggaattggaaaaaatttcacttaactrtatggacaaatactggcaatgtatataatgcctgaggtatatccacagctcacgaatcatgtggagttgagtagggcctagcaaagtccctttcctaaggaccagtgctcagtccatacctagcccaggtttttattctttctttcagcaagtaaattattgtacatcagctatgtgttaagaactttcctaggcacagtgatacttaagtgactaagaaaggttcggtccttgtactcatggtgtttgattagcagaagagccagtggaaagaaaggcactaaatcagtaactaatattaagtaaccagaaatttcagatagtgaaaataatagtggatatagtaagtgtcggtgtctgggatacgggagggctgcttggatatagtggtcagaggagatatctttgaaaatgtgacctgggctgggactcaaatcacaggagggagttcacagtctagtgatttggtggaggggtgcttcagacagaggagatagtggttgcagaggccctgcacacggagttggcttgatgctgccagcatgtcctgagcatacagggcacaggagaaggtggtcagggcaaatgttgggcaggaaagcctggactttgggcagcatcgtgagtagtttaaatgtttgtctaagggcagggaggctctgctgcagggagtgctgctggagaagggtcacttgggctgctctgtgttggaggaccatagagaagatgtcgggagacctaggaggaagaaagttctggagccatgcaagaggtggtggtggcccgcaccagggtgactgagagacatccattcatcatccaacaagtatttactgagcgtgagctccatgtcaggcaccattctgggtttgtgggagtgagaaagacagattgactgtctgtcttcatggacttctattgaagtgaaggaggctgaagcaaaacaaataaagtaattatatgattatattattataatctatatattatataattgtacaagcattatatagaagtatatrttatataaatgtgagttatagtatataaataattatataatcatataatttacatttatatatcatatatacatttataattatataagcatatcatatataattatatgatatgcttatataattatatgatatgattatataattatatgcacagacagtgcgttagtttgctaaagctgctataacaaaacccctcagactggatggcttaagcaacttaaatgtattttattttctcacagttctggaggctggcagttcaaggtcaaggtgttggccaccgtagtttctcctgaggctctttctttgcttgcaggtggctgccttcttgctgaggcttcacatggtcattcctctgtacttacaatcctttggtgtctcccggtgcattcaaatgtcctcctctgttgagaatactggtcagattggattggattagggctttccctaaaggcctcattttaatttaatcatgtctttaaaggccctgctgctaaaaataggaacatttgagatactgggggttggggtcatatatcaaaagataaatctgggggagacacagttcagaccatgacaaattatgagcaggacaatgaagaaacttagagcatagaggtggatagaggtgcagagattagcgatccatttaggaggcagagccaactggtctcatttgataaattggattaagagtcaggcatcggagatagtgcactcacagatttgtagcttaagcaaggtggtgagagcctgggaagaactgagcaggctgcctggtgrggggccctgtgggccccagggactgcttacagggattacctgtcatgcaagtggatagtagcttctgaactctcctttagactaaaggtgcttttccccagcctccagtcttagaatttatgacttcactcatagatggttaaaaattgaactatattgaaatatatgcgttcaattcaaaaaagcctgtggacataaagtctttttaattatccctttctgtcctctaaaacatattttctattaacatatggtcagagtttatcaataagtgattccactaagtattccaaaagttccagggagcgagtgactgatttgcaattgtatcttcaattgattggcactgaaattagaactgtagataattgcctccaagctcccaaaacagtaaccaaaagacaggcataatactcaaagaaattattttctcttacaaacggaagcctctcatctatattttatagcccatttaacatttttgtgttattctaaaagtattctatccttagttaccctctgttgctgtttctcagtgttagccattagcagggccaaggcagttataactgtgtaagataaatgtcagtatgatttttccactccgtttcaaagtttctagcttctaagttgacttttctttctccctcacaatcttgtggggccgtgtccccgagcccacagagcatctgcaacatgtttctaatgtgcgtactgggctttctccacaattgtgtggcttcctactgagcactgtcaggtttaaagagcaagataaagggcacaataatatgtcttcagatgctgcactgacatctgtaggcgtctaaatgtcactaacgwcaaggcatttttgccccaaatgcacagccagtcttctgttaagcccattcagtggcatcccatctggggggaattgggtctcagtgtggagtgagtaggaaatgcttagaaccacgagccgatggctgacctgggtaccaaggtcaaccatgtttggctgaagatgagtgatttgaagctcgtggaatataagttctctcccagagcagcagatgctgggggaaggtgacagttgagagagcttgcggctgatgagcaggccgtttgggggcatggaaaaaggagggtcagagaggccaggaacgcagggaagaggaccatacaggccccccacataagcacaatcaccagagagcactgcctgtcatgagccaaggatgacccagagccccaaggagcagagacaagggtcttgagcaagaagagggtagcctagatcagctcctgtgctgggaactgtactcggggttggccttcatgtgatgcccaccgcgtaccgcatggagtggtgggggcatccctgaatgtatggggctggatcgggtgagactggctagtggaaattgttgcagaggactttcataagagctacatatcagggaccgcagattgatagagcctgcatgtacacatgttttgttaagcctgtactgtgttttaataacaygttgagtttagagtgagagatttcatataaagtctggatttcttactggcctggagaaatcagacgtttgacaccsctatacaaagcatgcatgcctggccttcctctgctgaatttaagtaggagctgccccctttcagtgtcccctttcagagtctctctccagttccctccagtcctcaccactccttattktctcctcagtgctgaggctactggtggataccagttattgtgcttacaacattgcttttcttatataaagaaayctttatttttctcaagtctctatcaaaagtgggaaagtaaaagatggggcaaggaggtggtatttttgttttgttttacagctgaacgactttattaatttacataactggctcttgtaggtgcatgcgttcattatctctgctgtaaattgccagtatttccccagaatattcacactaggagccattaaacatctaaactctctaccactgaacctagaaggaagggaagaagaggaattgaagatgaaagaatcaaggcaaaaggtctgttgctgagaaggaagaagtggagaggagtcagaggcatgctggggacattgatccagaaaagattcattgctaattgtrcatatcccagaggttaaaccattttctcgaagggtaagggaagagcatttctttgtaaaactaaacacagagtttcccagcattggagctaagactctgcactccctccccacctggggtggatgtgttcactccccctttaagcctgtggcatgaacaggcttccaaggttcactctattcccattttaagaattgatttgaactgatagttccaaaaataacttcataaaattatacaggagagccaaaaggaaacaatttcagacaatcagagcagcatggcatttgtcaagttgactagatgcaggaattttcaactctgaaaagcccatagaggtggttttcccygggccttgggtccttgacaccacaccagccatggtggctcaaaggtagcctgaggggtctctgagctgctgtcattagtttaaaaacctgagtaaaagtacattggggaaatggggatactgcccacttcctggattttttgggggtttcagtgagatatgacgtgtaaagtcctacaaacagtgtcagactcatcataagcgatcaatgaactcttcactgtgccaggccacttctcaagcaccaattccacgctgcccagtgctctcccaacaagtctgcctaattgttccaagattcttggcttttgctgagctttataggtgctgacacagattggtagacaaaatagttcaaatcaaggaaaaatagcatggaaaggggtcacttttaataaaatatttgggagcatggacagaaacctgaaccatcagcacagccctgactgggagccccttctgcagaccctggagtctatctggagacaccatcctcattcccagtgcccaggaggcaagggagcatagctgcttgttacatgctgagtttggggctaaagtggacctggattgaattttgtttctgtctttcactagcgctgtgtagctttcagcacattaaacttgctgagccttgatttctgcctaacagggaaatcataatagtgtctgctttataggaatgtcatgaagttaaattagatagagcatgcaaagcatttatcatagtacctggcattgtaggagctctcagtaaatgacattattgttactatttgtctctctgtgtatttgactccttgtagaaagatggccaaagcctcctgttaaacctccttgatcctctcctaaccctccatttgtttccattctgggggtgatcccagttcatcactgatttgattgatggcatagagatccttcattgtgcctcaatgaagaaaccaattcttctagatacaatttatcagccaatggagagctgttactgttgttattatttgtagagtgcaggtaggtgaggacccttctccacaaaaaaggaaagagatgaaaccaggttacccaatataaaacatagacttaatccgaagattgtctgctcatacacaccctgattttcatttgaaagaccctttccctgttatgtcctgtccctagaatcaacgctccccctcatgctcagaaagcaccatcacagagtaagactctggggtcttgtgatattgggcacgtttctagagttctctgtgcctcagttcattcactgtgtaatagagaaaataacactactgactgcattgggttaagtgagttactgcagagagacactgcatgtggtacttatcaaatggcaagcgctaagaatgacagctactagtgctttccttcccttttcctccctcttccgctctttgtcttcctcatcatcttcctcatcaacatcgtcacccaggccaagtgtgcaggtatcaggcccaaaggtgcttcacttcagctttcttattttgcttcttcaggctacagggaagcatcacctatggtgaatacacccctcctgccccccaatttttcttttaactttcagtgtcgtagtttcaccttttgtgcaatgccaaccccagaagcaatgatcagtttgggtgtattctaggcatgtttgtgccaatttcacagagcacagatctaaattcacgtcctggttccctccccctctggatatgtgtctgtgccaaatgatgacgtaaaccctcagagccttaattttctgatctgtgaaatggggatactgcccacttcatggatttctgtgaggtttcagtgagattctgcgtgtaaagttcgaacagtgccagacttataataagtgatcaatgaaatcttgactgagccgggctacttcttaagtgccagttccaccctgcccagtgcccatcctgagctgccatccaccaatagggaagtggtgcaggctgtygaatctcattctcttgtgttctttggtttctctcttaggaaaagcacctcattttctgcgactccaaaacgtggaggtgaatgtggggcagaatgccacatttcagtgcattgctggtgggaagtggtctcagcatgacaagctttggctccaggtaagcatgagagaagcctctgctcagacycgttaggatgagaaagggaaaagaaggactggaaggaagcagctctatggcaacacaagtgtattgaacaaagacatgcagagggggacaacagctagcaccggagcccacccttgcttacaaactggggtaattataggtccaggcgggagaggtctgggcttgtgagatggggtgggtggtgtggtcagtcgctggtaagtgaggagtttcctggggtcagatggttaggcctgggacttgtctggcgggatgtgtctcatggcccaaacccctgcggaattttctgctctaaccagcatttgcaaaatggtgtgagtttacgaaatggggcagcttgggctaacgatgctgtcttatcccttgataagggaagaaagtgtgtgctatgatgaatggtttggtgtgtacagggaagggagatttttaaagtacttctgttcctctgatggtgccctgcatctatgatcttgttaaatcttaactacgattctgctagtcaggcattggtataaccattttatacatgcagaaacccagaccaaaacctaaaagttccagaactagaatttgtaactatgaccttttccaactaccctctaacaaactttgtcttttaattgcagattactagggctgaggcaaatggaatagcttaggttcttggtacgtggttgtcatgtaatcttaactggaaggttcttggatatccagtgattcactggtacttctgggtaaaattagagagtcgctttttatgggaatttttcactaaaatgagcaatctgtctattctttggttaaataagtccgttagtaaagtccatcagggaagtgtttgaagcttgaatttgccttcctgttatttctgcttgttcatcccactttccaagaaagatgagaaaggatctctttgagtgggggttaggacagagggcgacacatagaactaaaacgtaacttgttataacattagcatacttccattaatactagcacaaatagcaagtttttggggcagcacagaagttggagccatgctgttcagtgcaggaaccactaactacatgtggctgtggtgatttgacatgaaaataattatttctatagaaaaattagctgggcgtggtggcgagtgcctgtaatcccagctacttgggaggctgaggcaggagaatcacttgaacccaggaggcggaggttgcagtgaactgagatcgcaccactgccctccagcctgggcaaccagattgaaactccttctcaaaaaattatttctaactagctttattgaggtataattgagatgtgatgtttaaagtatataatttgataagttttgtatgtttacatgtgaaactattaccacaatcaagatattgaatatttgcatggcgtccaaagttccgtccccatgtgtaatcacttccttctgacttccccactcccgtttgtcacaagcaaccgccaatctgctttctgacagtatgtattagcttatatgttctagaattttatataaatggaagcatgcggtatgtacccttctttcctacagaattattctaaggattacttatgttgttgtgtgtaacagtatttcttacttttgctaagaaatatttcatagaatggatatactactatttgtttatccatctacctgttgatggatacctgttgggttgttggcagtttctggctattacaaagaagttgctgggagcctgcatgtgtgagtcttcgtagagacgtattctttcatttctcttgggtatgaaagtgaattagaagtggaatggcagggtcatctggtagatatatgtttaactttaaagaacaacgagctgtttgaaaaaatggttgtaccattttacattcctaccagcagtctatgaaagttctagttgctccatatcctcaccagcactcagtatggtcagtctttttaattttagcatttcaataggtgtgtaatgggagcacgttatagttttaatttacatttcttagaggactgatgatactgaacatattttcatgtgttcctttgcctagctgtctctccacacactttcttggaagttcatgttgtcacttcttttcttgaatttaagccatttcctgtggttagaaaaatccttgggcataaagagcccatctagggaccaacagttcttccttgccacttagcagcaagcagagtgcaaatagcagcacagcagcgtgaaatacctgttctttctgcttcccagggttgcttacagaccacaggagagcataagaaacctccacgtcacctcagtattcggtagagttatttactcttttcattacgattagtgttcaagtgtattaggctgccaagaagctgtgtgatttcaatggcattgcctcagctgggtcatgagaatgaggcaggaccatcacaatattttcagcaactttgtttgggttttccaattattttatgatcgttattgtggcagttcttagttgcatgccctgaaccttgggtttgtcagtgggaggatgttaaagagatcataactgaatatttgaagaaaacagatggaaacacatgacatggagctcttccacatcttatctccttttcaatgtaaaccaaatcttatttcacaaaacgtcttccaggtggctttcaatgggacataaaacatgacaagatatcataaattaaaagtgggacaacaccagatagaaggagaaaatacacagagctggtaataatgcgaaaaccgcatttctgcacacgttactaactggtgggtcacacacagagcccgcagctttgtagccactagtggaataaaggaaacttgtcagatacacagttcacaatgtctgtgagataaacaaaaaccaattgctcaggaaaattctacctgttgttcacacagaagccagacaggaattgttcccaggagtccctgtgaagaaaacactgtatgatgcaatgaacaatgttccccaccacagtcttactgagggcacacaagtgagtttcacaggcctgtttcacatcatgatggctgtgagaaagcagtctggggaggagaagggggagagaggggtgaagtgggcaagaggctatggcagagtcccctgctctctgccaatctgtctccatcctggggcacttgaaacgtatctggtaagtgaatagattcagtaactattttttcaaggaaacttccctaaatattgtctgtctcatctgcatttcagaaaatattgggaggtacacagtttatatcgtgccatctgacaaatgcctgtgtggctagttaaatccaggcttatgtgcaatcaggtaattggaagtaggctgtattagtcagggttctccagagaagcagtktgtgtgtgtgtgtgtgtgtgtgtgtgtgtgtgtgtgtgtgtgtgtataattttatatattttcatatataatatatagtatgttataatatatatcatgtaacataattatatgtaattatatgttatcctaagttatgtataattatatgttatacatataacaaattatgttattatatgttatataacatatataatatataaaaatatataattatatgtaatatatttatgtttaaaatatatgtatatataaatatataatctttatatagcactcattaaagaaaatatatattttataaaatatatattataaaaatttattaaatatattaaggaaaatatttatatgtaagtatatattaatatatatttgtgtatatatagtttttttaataagtgtttccttatagatgtaaacacttccatccatagtaagtcttttccttccatatataatatgtccttcctatatggaaggaaaggacttagtacaggaattggctcatgtgactgtggaaactgagaagtctcatgatctgccatctgcgagctggagatccaggaatggcagtggtgtaattctagtccaagttcaggagaagaccactgttccaactcaagcagtcagggaggaggcaaaggggcaaactcttcttcccctgcttttctgttctattcttccaaagattggatggtgcccattcacgctggggagggccatgcactttactgagtccactgattcaaatgctcatctcatccagacaccctcacagacacacccagacatactgtttaatttgggtactctgttacagtcaagttgactcataaaattaaccatcacataggttaacatctttctacaaaaagaaggcacctatcaacacacctgccaccccagagaggatcgcagccaccatccaagacaggccaaggcagtggccagtttctcctgagatgtttcttcagatgtgtccaagcastagaggagtggctggcactctcgctgttgttctgcctcatataataaggttggggtgacttagcctgagaatttccaaagcaaatgaaacaggcccatcatggccaaaagagtctctataagacagctacagcaggtctactgtgtagcagtgctacttcctgctgtagcttctgagatatgctgaggaatttcactaagtcactgaaagtggtaacttctcaactcggccagttgtaattcagggaaataaagatgttgtttccagcatagcaggtatgtcggtggcccttctttctggcagtggttagaaaggagccagtggattcatagtttgagataaatccctgttgcctgtgtggtgaaatgctggccytcttttctgtagagtgggactttatagcttgcttttccttaagtggttttggatcataaattaataagttaaaaggaggaccagccaatgcccctgttttgcacccctctggaaactttatatgtctttagaagatcccatctgccggtgctggcttttgtggaattacagtacaagttctacatgagagtcaatggacaggaccgatgcagaaatgcaaacacatgagcctagaacaattgtagtgaatcagggaaaaggatgatagaaggctagtaaaaaattataagcaggttcttcttgtcctgggatcatttctccttgaggtgaagtgtatgatgccgtggtctgtggtggaaggggctcagtcataacttgcttattccttatgtgatactttggcctgaggaatccagacatgtaactttgcaagcaatttttcaagcaaggagatggtgtgcattccaaggggaatagccactaaacaaagtggtctacagttttgtggagtccatttaaaaaatgacattcaggatacaactaggtggggctataccaacataattataagtgtagcacagagcaaatataaatgtgtacatcttttctgcaagataattaggcagttgatatccaaagccttaaatatgcatatttttccaatgagtaaatttacttatggaaatttacctaaggaaatatctagagatggggacaaaaatgtatctgcaattgtgttcagtaggacaaaaggctggaaagaacctaaattttcagcaaaagagactgattaagtaaatgagggaatggtatcattaaatatcagattttagaagtatatttaacattttcataacatgtaagtgaaaaggatgagttatagagtcatataatattaagctttatgaaaaaatatatacacatatacatgctcatgtacataatatataaatatatataatctgtatatacatatgtatatacatagacactcctataactccatgaaatacatattaagacacttgattgtaataatagattatgaagctttttattttcatcgctattcttttctgttttatccaaatattctaagatgaatacaggaaactaacataaacaaaatgctattaaaaaaagaaaaatggtcactttttcccagttacagaatactcctagtatacgaagaagcctttgctgggtttggcatagctaattccaacagtgaggacacaggtttttcccacacccccatcatcaccatcagacactactcatccagaagcatgtttagaaatattttatgtgtgtcctcctgtctttatcaaggagcatggtggatggggctctttccttgaattactcagggactccagagcagagtctgtcagccccaccatggagctgactctcaggcctccctacaaaggattcaatccacgaggggtttttatgacaaataacatttgaagagtctcagaaatgaagccatgtgtccaaacgccctgtgcagatctctgtagggacagtgtatgttttcagacaaattgcattcactggactgggagcagatctgaatctcataggaaaaggttcctgcctgcactccagcagctgcaacagggttgatgagctgaggaggcatatcagtctttactgcagccggttcgcccagtaaacctgtttccttgctcctgcagggctgctgctggcctctgaggctgtgagtgttctggggaccagctcctcctcctacctacctgcctgcatctgaaccaggcatcccttctgtgtggcatttctgttgacaatctagtggtcacgctgcaactaagcaatgatgataatgtaatgatactatgtttaacagctgatgtttactaagtgcttacacataggatgtatttaattctcataaccagtctttcagttagatgtgattgtagccctgtttataggtgaggagactgagccttagatgggtagatgacatcctcggaattacacaggcagtgagcagcagaagcatggtgtgaagaaacataggtcctgtctctcagtcctgggctcattcttccatgcctacctcatggccctgtcaccttgggttacactccagcctttccttctatacaggaggctttctatttaaaaacagatttctttatttagcatatatttatacacttctaaatttattggccgctgaaccagatacttaagtatattttaatttctcaaatctacatgagatcaatgaaataaaatgcccttggaattatttttgaattgcctccccaccccctagttgccttcttaattctcttatccccttcctagccacattctttaaatgggacgtctacacttggaatgaggctttcttcagtgccacctcttccaaggagtggcccttgtaaatgtccccagtgctttcctcattgctatagccaaagggtgcatcgcaggccttatacttctcttttcagatttgatgatactgactgctccctccacaaaaatcttactgcccacttgaaactgtctatcaataactatgaaaggcctaagattttaccttatttggaggctcacaaggtagactgccacagtttcatagatgctggcagaagacatgaaacttctgggtcagagacaaagaactttgttattcaccacacagcaagcagcrttaagtttcatgttctcattagtttcctttgtcccccaccaagccctgtgggacttatgccaggtccctcctgactctttgcaggagttctaaacccagaaatcaacccaaaatgagcagtcagccacgtacatagagggctcttggaagggtttcagcacagctaatcaaaaatgatttatgtctacttctatttcttctgacttttaataaagaataatcaaaagctattctttagagactgccaaaaaggtacaaatgtgatcttaagagaatcaatgggctagattttagcaagtttctaaatgtcatgccgtggcagcagggtgactagaagtgaaaagaatacgcattacaagtgaattgtgggaatttcacctaaatattttctggccaggaaattcctggagcagttggaacaaatgacagctggaaatgctgggcctaattttattttgttttatttttatatttttatctttatcatttttttttattattttgatgccaagaagttcaaaccaacacactgaaggcttccaggatcctgcattagaatatcttctgtaaaccaggcatagtatctgttgtgcaaaaccagaaatggtttccttttattaaagacagtactgtttccacttctgccaattacaagtcaatttcaaggcttcctgctctttctgaaataatgacagccatttttgtagtcttgtcttacctctttgtgaaggaaataatgtcatgacactaaaggagagtggatggggaattgcaaaatggcaaggccattacagaaaccttgatagataatcagacggtaggaaaacagcactctctgtggcatcaggtgcaactcttgccttcctctttaggtggttcctgaaaatagaggggtcttgcctgggggtggaaggatgcacttgtgctggggacagaacattaaagtgtagctattacagctcctgttcttccaatgagtgtgtgctctcaaaccaagccgacttatccacataaaacaaagtaagccaagggaagttggaatttgagttgtttttaaagagcaaggcaagcagttgaaaaaggggaaagaaaaagagagatttcaaaggcaacataatcagagaaacataaacataaaatgggattaagcagaaccaccgattaggctgtaaaatgcctttcttcaatttagaacatgtatccctcctgtacggatgaattggaagaaaaggggttcaccttctgggcagatgcagctccatagatatgtagcttgatatgcagatagagcccttgggcaaagcacaaaagtgacctccctccaagggggctcagtaaggactcatggctgtagtcagaactcctggctctgccaatagagtatgggttgggtttgggggccacaactcccgcctcttagctgggcactgttggtgcagtgaccagttgctcatcctcaggacatggtcttagatttaaggaatttttccattcatgtgttctgtggtattatttggccccttgctttccattaagggacttaagaggacatcagcttttaagtccttgagacccagggtaaagtcagcagaatttagcatcaccagggaaccaattagaaatgctaattatccagcctcaccccagacctcctaaattaccctctaggtgattctgatgcacattaaaatttaggaactactgttctagtctgaaagagtggggataaggaaacctcaccccaacctaatagtataccaggtatgccataacttaataatatattaaaagaatctgatggccaagaatataggaagatactctgttccttcttacatatatatttctgacctaaggtcttccaagatttccagaatgctaggcatctgggcttctatcacagcatttccaaaactgttttctgtgaagcagtcattttctgcaagttatcattagatattctttgaacaaacaaagtaagtttctggaacactgcactctctaccctcctttcacagagttgctaagtgtagctgtgtactgtttagtactaggtggcagatgggtgatgtgattaatgtctcagtgtctggtatcagatcacctgggtccaatcctaactcagcccctcagcaaagtgatatcaggttttgttcctcctagtaaggttcatggaccagcagcatcagcaagacctgaagaattccaatccccatcacaggccttctgaatcaagatgtgcatttttaacaagatccccaggtggtttgtatgctgtagtctgagaagtactactaaaagccatattgcttgaccgctctctgcctcagtttccttattcattaaataggaattactagtaggacttatctcacactttatcagacattggaatccccaggaaggtttgttaaaacaaaaatggcctggccccattcccaaagttcctgattcattaggtctgggaatttattagatggcgctagatatttcacttttttatttgttttatttttttttttttgagatggaatttctctcttattgcccaggctggagtgcagtggcacgatcttggctcacctcaacctccgcctcccgggttgaagcgattctccttcctcggcctcccgagcagctgggattacaggcatgcgccaccatgcccggctaattttgtatttttagtagagatggggtttctccatgttggtcaggctggtcttgaactccctacctcaggtggtccacctgcctgggcctcccaaagtgctgggattacaggcgtcagccaccgtgcctggcctgagaattcacatttttaacaatttcccaggggatgttagtgcagcctgtctggggaccatggttcgagaaccatagctctagatttttctaagagcatttctgtctccatgccagacctgttttcctccatgaagtatactatttcaatgctcgacttagtgtttatgttttactctttctactgtttttacaatcttaatccagcctataaattcctctgggcagaaattataccttccacactctttcattttctgttttgtaaaataatgagtacatcttcagcatgattaataatagaatggagaaaggggaaaaacctcagactatcaaccccagtaaacaacatctccaagtggatatcagccctagaattatcttacaaatttacatttctaacaagttcccagatgaggccgatgctgtagattcagggaccactctttgagaagaactttgacagggactttaagaggatcaagtgaacagtctattatgtaagccattaacacagtggctggcacaaagtcagccttcaaaactgttagttgatgtgacttttacttgataaacgctcagataaatcttgttaagttgaacaaaatgtttatcaagctcagctacggagtgatttatttatgtgagatggagtgacatttcataggaagcagtgcttaattacagctatgctcacacctggtattgccagtgtgctactgaggtcagttcccagccccatgtgtaaaaaaaaaaaaaaaaaaaaaaaaaaagcagatttagaaacagactgccagaaaatctcaaggcagtagctcattggatttcaggaaacmcaacgtataatttactgtaggagaaggcagagacaggaaagtgccaagtggaatgcatgcttttagtgtcctggacagatcccctttgcaggcaagtgccctcaaccctagagcactgggcatgtcggctgctaaagcctcacagcttccttttcccagagagctgccctccgtcaagtaagaagtttcctcctctctctgcctcgtgagccctgaccaatgactgatggacacagtagttcaaccacaaggtaccatccactctggggtacacttcatgctccatgactccttgtgggaccaggctggagcttgactccagttgtgatctcatcctttcttagccccttttctcactctgtcctttatatcctttctcctgaaagcacttgataaatctccatgtgtcaaagtctgcttccagtgagcccaaccagagacaccacctgttggggcccactgggacatttgttgagttgactcgtggaatcagagggccagacgatgatttcactttagaacaacacacatattgacttgaaaatcttgccacagaaggaaaagaagcatgccctaaaagttcagaggaaggatatacttaaatctgaaaaactactgcaggaaccagaagaaaatttccgagaagccaagtggtagataagggccttatctgacggaatttttcctggacttctgtgtgcacacatccttgctatgcttctttgtggcatttcccaggactttgggctttccttcaatgtcttgctccatcttcctgacatcctaacatttgtatctctgtgcatttttatgctacctgatttctgggtttcaccgtattagccaggatgatctcaatctcctgacctcgtgatctgcccgcctcagcctcccaaagtgctgggattacaggcgtgagccaccacgcccagcccagtttcctcttatatatgacagcgataagaagtgtgcctaccttatttttcatggggaataaatgagaaagcatataaaacatttagcacatagtagtgtttagctgttattagcttaataaagaaaaaataaaagtgtttatgatgttataaataactcatattagaaaatattgagccaaagcctcaccactaactcattcttatcccccatggtggccctgaaatgccttgctcagcagtggggaagatgggctccttttgatgaccccctgcttccaaggccctcctattcattaagtgatctcttctccaaatcaggatacattcctggtgtttgccggaattttcccgcctttctccctgcactactttgggaatttccggggcattgcatgtggtgtctcctaggttctcatagtggggtccaagttgtgccatctcctgcaaagatgcctcaaggcatgaggaagctggatggcagtttccgcccaagtgacctttctccccttccattaccttgtactggtttttattcgggcaagcgaatggaaactttccagctcagaacagtgaaattgcctgctcaagtctgcatagcttggaagctgcagagctggcatttggcttcagattctcctcttacagccccatgcatgttgctctgatgtgtactaactattccacatgttggttagtttctggcatgagagggagttatggctgcctctcattctgccatggcttttgaacaataccatttttttttatgttcaagtataaagcaaatacgtgtttgagacagaaagtttgaagaatgtgaaaaagtaaaaagcagcagcaaaatattacctacaatctccctgtagcctggagcctgtagcctgtagcctggagcaagtctctcttagctgccctttgatgggggcctgggataccctgggtttctggccttcatgatcactgccttcccctggtattggtctcccctcatttgctgccatagagctgagcagtgtggctctacctgtacctgtgcccctctcctgacaggtcactgtagagggtgaggaaagatgacatagatgaaagtaggttatgcacatggggaaactgtttacttggtgcaggaaacaatgaagatcgcgttgcgagactgggagactcagggcatgagaatcataagtcataaggtttccctaagtccagataattaaaggagtcaatttcactttttggggaaaaacgttttcaaattaaagcaggcactgagaatatggtcttagtaaaaacagtgcttgacttgaagttggaaaacctggataaggggcttgtgtactctacacatttagttaaactgttagacatttggatttttcttctgagaagagcagcagttgtacactccccaaacaaggctgtgaagacamaatgaagatttatacaaaaatacccagctcaggggctggcacatagtagataaatatccagttaataacattaataaacatccactcaaactgcaccaacatgcatgtgccttaccagttctcataacctgcaactgtgaaagaggtttgttcaaactcaggatatccctcctgagattcaggatgctgaagacaaaagcccacgtgtattcaccttgattctagagatgtctaccaacttgggaagctttcagacaagcttctaaagatgaacagaggaaagtccttcagtgtaaaatgggcaacacttgtgggcaaatgtgtgtggaaagtttgtatcatacatagataagattccagagatggtgtgacagttgtgagaactgactagagatggctgtgagctgaacgtggctttttacggaagacggagtgtccccagggagaccagaccctccaggcagagaaaagagcatgtgccaaggaagagaggtgttggaaggctcccatcccctccctacctgtggtgatagcttagggcaggtggggctcagagcctgtggggtggggtagcagggcaccagccacagggcctgtgagccaggcggtgtttattctccatgggctgggttttcactaagtctgctgaagtttgtctgaaagaatgctatgagttctgcttaagggaaaaaggaaaatagggaggaaagttaaggggctacatgccagccccaaatgcaggctgagccaaagtgtttagaaggagcctttttcctctcttcttaccaccaggcctgtgtcctcaaatcagctcactagcaaagtttattcttgaatcagctcattagcacaaaccagccatgaaaactcctgcccttttttttttttttttttttttttaaagaggcagggccttcctctgtcacccagggtagagtgcagtggcttgatcatggctcactgcaaccttggtttttgggctcaggcgatcctccttcctcaccctccagagtatctgggactgaagatgagtgccaccatgcctggctattttttaaaatttcttgtagaggcaaggtcttgcttgctacctaggctggtctcaaactcctggcctcaaatgatcctcctgcctcagcccttgcaaagcactgggattacaggcatgagccactgtgcctggctggaaatcccttattatagtggaaagtcttgagccccaggggtgtgaggatgggtggatatccgtgttgggagtcacctagaagcctatgatgctatgattcctcctctccctctcttcctctgttctgcagcaatggaatggcagggacacggccctgatggtcacccgtgtrgtcaaccacaggcgcttctcagccacagtcagtgtggcagacactgcccagcggagcgtcagcaagtaccgctgtgtgatccgctctgatggtgggtctggtgtgtccaactacgcggagctgatcgtgaaaggtgagtgcctccagcctgcgcctctactgccatggaaggttggcattaatgggccttaaagccccttttctcatctgctgatcctcccccacattcagtaaaagaggagattaatttctagtcactctggcctccctccccaacacaaactccccaaacrggagaaactatggtaaaatcatgcaacattgcattgctattccaacttgagtctcacatacaagagccatacgtgaaagactgtggaatatataacacagaagacatcttcaaatttggctttattttgtatttaaagttagaatgaacaaatgtccttgtatttgggtggcatgctgtggcagtgttctcgtactattgtttctgagggatttttttttaaaaattgaaaactcaatacaatgacaatattttggaaggacttttgaaatgaataattcctcaccccactggccttgattcaattcttttcaattttcttgttcttgttcaccttgagatactgtttacatgctttccattaaaatatgcagattgttttctgcttctctcaaaaagccagatatcccatttctttctgcaactttgtcatctttgttatgatgcttagtgatcgtatgctatctcatccaatgagttatcctattttgttaaacccccccatttgcagtcatttcgataattccaggtgtcttgtttttttctttcctttgtgtatgtaacaattagcacctccatggagttcttctggagagaacattttattctattgaaccagattatttccttaggataaattccctgggggtagagttgggaggccaagaatatgagcatctttatggatttttctttgtgttgcaatattgcttttgcaaaaaaaaaaaaatggtttgacagtttacactggtaactgcagtgtatggatgtactcattttaccaatgttatgtttgccgattaaaattttaatatagcataatttagtgaatgaaataatgaagcttttcttattatgctagctgtagaatgagacctggtgtgtttgaagggaaaaaacaaaaagcaaacaaaaaaaaccccactgatcgagcctttgaggcctcctaagttagtttcctttgtcaaagtatgggtgggtgtggaaactttgacctcattttgctgacccagtgtgactgggatccttgggccaactggactgggggttgcaggctgggattctctatgctggctgtcttgacttcatacagacattcacatggctgatcatgtgccatcattcaggtctcagctgaaatggcagtatgtcgtcttctcccagagaacttccctgaccccccgcccacacctcccttcctggtggtcacarttccttctcattacctggtctcctcttccacatagtttttatcacactttaaaatgctggtttgcctttatttgtttacttggtgactttttgtctccccttttaggatctaagctctgtgagaggagggctgtctgctgggttggaagtccctgcactcagcgcagtgcctggcactggttctcagtttgctaaaccatatgaagtgttagtgttcgcctgttttgacttgcacaatcagtcatttcacaaggctcaacttgaaaaaatgtgtggactgatagaagagtgaatgaattattggcctcagcaggagtttattatttcctcaccacaatgccatgaacacttaagccaaagatcaacaagttaggcacttatgaaaaaaaactttaaaaatctttaaatttgtttacattaaatgttattaacatagaaaagaagccaccactttgatggcattaagctcctatctttgctttgttgatgccataagattaatttgtgtggcccggtatggtggctcacgcctgtcatcccaacagtttgggaggccaaagcagacagatcgatcacctgaggccaggagttcgagaccagcctggccaacatggtgaaaccccgtctctactaaaaatacaaaaaatagctgggtgtggtggcatgcgcctgaggccaggagtttgagaccagcctggccaacatggtgaaaccccgtctctactaaaaatacaaaaaatagctgggtgtggtggctcgtgcctctagtcccagctgctcgggaggttgaggcaggagaatcgcttaaacccaggagacggaggttgtggtgagctgagatcatgccactgcaatccagcctgggcggctgagcgagactccatctcaaaaaaaaaattttttttgaagatttattattattatatttgtattatgtgacacaggggttattgcaggccattcaggttctcagtgaatgtgtattttcagatgtcctgctggaatgtgtcttataccttccgtggctggtctcccacaccagattgagagtcccaggagagggtgtgctgtgttcattcccgctcctcatggtcttgctagcaccttgcatgtacatggggcaaagttggtggcaaaagaatgtgaccagtggctatgggagttagtttagcactctgaaattcccatgagcagacaaatggaaccagaaaacgcttggtttattatttgcttatatgcccccattcaggggcaggatgggagctatgggaagagaaaccaagaggctactgggacagaggatgtggtggagcatccttgctttattcggagaggtggccagggtttacggggacactgatttgtcctctgctggttgtgcatcctgggcccaagtcaagaggaggggctggtgctagcctgggtgcagtagccaggcctggcaatatgactccgcagctaccactgctctgaagccactcacctgcagcccctgccactccagcttagggagggtggggtggtgggtggcacccagtctccttcacattgaacagtggggggttggcacttcctgtaatctggtcaatcaaggtgtaattttattacacatcgatgaaattcatccatatttttggcataggttatcagttttttagtgcccatttttcctccatttaaatattatgatggtggtaagctaggagcctggtcccttgcatgtaaagaagtcccttcaacatatgttacctgattttttcctaattgcagctctgtacattggttttattttaactcatttcatgagtgggagaattagcacagccaggttgagaaacaggaccatcccaaggggtacaactggagtccgacctgcatctggctcatgctgtttggtcacacctggagggctggtgggttgtggtcttgctgttacctggtgccacaatgtcatgagcagtgctgaaggggcccaggtaccaggcaagcaggattccctgggtccgtctagctaacttgccattttgacacgtgatattcccttcctgactgtcagctaacttccagattgctggagaaatacatttaacctaccctcaccccctgccccgaccccaaacacactgctaaagagttagtggcatccaagcaaaacaagaaaataaaaggcagggaccccctcaggagcagaagcaaccagaggaaacctgtcaccctggagtgggtgcccagggacccatttgaaggcagcaaacccaagcgtttggaagaaactgtgtgatgaagaatgactcacttacctctcaagagccctttgcctttgcggagccaggatgcttaagtactttaatactgaagtatttgtacttgtttaaaaaaatacaagggaaaagcattaatcctccttctttcagagaagggagaaaatctgaaaaacagaccaaaaaagaaaaaggattctcaagggccaagtgctgtgttatgggatgggatctggattccttcttggactgacrtcacccacaaccctgggatatcacagaaagaaaaccatgtcttcaaggtcttcctcctcacaggttcccaccctttggttccagttcagggcaggagataactctgcagccaagatgcttgggtctgaattctggccccaccttgtcccaactctgtgaccttgaacatgatctaacctcttggggcctcagctggctcatctgggaacaggaatgtaggattacctccctcagaaggcrtcatgaggatgacatgtgataatggatgtaggagttcttagaacagtgccctgcataggcactctaaggtatttgttaaataaaataaataaattgcccataggggtgggatttatcagacaaagaagtaagagagatgaaggactccatgggtggggacaggacattggacccaggtgccgatttgatgactgtctctgtggctttggggaaatcatgtcaggcctgttctgtaaagtgtggcccagttctctgttggtacacggtgatgtgccgagtataagaagagggagggaggaaatatgaaagtgtggactgggggacatttgggtcatggggtcttttattagggttctctagagggacagaagtaataggatatatgtatatatgaaggggagtttattaaggagaactgactcacatgatcacagggtgaagacccagatgggccgtctgtaagttgaggagcaaggaagacagtagtggctcagttagagttccaaaacctgaaaagtaggaaagctcggcagtgtagcctttagtctgtggccaaaggcccgagagcccctgggaaaccactggtgtaagtccaagactccaaaagccaaagaagttgaggcctgatgttcgagggcagcataggaggaagacgaaggcaggaaaactcagcaagtccgcttctttcaccttcttctgccggctttttctagttacgctggcagctgatgggatggtgtccacccacattgtggttgggtctgcctctcccagtccgctgactcaaatatgaatctcttctggcaacacctagaaacacccagatacacccagaaacaatactttgcatccttcatttcaaccaagttaacacttaatattaaccatcacaagtccctgtaggtcagaattctctggtcctttcctgtgttcacccctactggatcgggaaagctgattcccgggtctggggacaaaggaaaagtagctagttttgtttgtgctcagccatctagttacatggaccacccctctcctggtattgttcattcaaaaccctaaccactccacagttgggaggtcactgggcccttcagcacccgagggttctgggagctgtaaacccctgtgctggcttccacagcaggtactcaggctgagaggaacagcagaggcccaggctggtctctctttctccccaaacaggcgtattcatggctgactggctcacagctcacgtgtgatcctgagatggtaaagattagcacttcagaagatgctgcctaatgtgagggtaggtaatatcaaattctcagggcgacacacagaccgaaatgaaagcaaattggaattacttaattctggggagctgtttattgagttgtgataatgtacctgggtatacattagattactctgtaattgaggtttcgctcaattgacaattcggcccctcaacctacctggtccagaccagtgctcagcaaatgcttattcatttgctttgcttctggttttctgagtgtcttcaatttcaaggtgtcttagctggcctcaaggacttgagtgtctgcaaccaaagttatgcagatgtatcttgatgaaaattttctaattcataaaaagtttcttgtcggtggtgatttttaaaccaatctttcaactccatttaacaacctattatgcactcagaacactcatcagtatgagaattagtgctcagaagaaatgtgatactagtgctgttagaggttccgatttaaacactgatgtgacttcctaccaagggaggttgttaggatcaagagtagggattattgttctaaatacacttgagtttccatcttagtcctgctccctggtacctgtgtgattcagcaaatcatgtatttactctgggcgtcattttccttatctgaataatggaggtgaatatatataaataggtcctatgagagggagaaaatataacatacatataatatataaaacacatatatatagcataatatatatgtaacatatataaacagatacatcctagtactagaaagtataaaattatgtctttagtagtaatcatattttttacattactattaaggaatgtttcccaaagacattgtccattgtttgttttcctggattaaaggaatgatattctgtacatactatgaaaatttaaatttagatcatcttaaggtctccctcttctgaaatgggattgaggtcatccaatccaatccattgtttgaagtcagttgcgaaagtgctttacttacattgtactgtcttctctttcctttttaagttttttttcagcatttacaagtttcttgagactgtatcaggcatagctacctggagcctacattttaggatggcaacagtgggctcctcagcgtccctgttttggaagcacacgttccaccgttgactgctgtcctggctggtcccgttttgctctctcactagtctggtgccagcagtgatttgcatttatagcctctagtttaaagatggaatgcctggagtagctgactcattcctgtattcatttgcttaataaaggtttatggagcccaactgtgtcaggttctgtaataagctcatggtctagcaggaagaatcatgcaaatctgtgctgcatggtcagttaatgttagccacctgccacactacctccctaatcctaacaatggccctatgacgtaggtgctgttagcaaccaccttttaccagtgagagcatggaaacccagagaggttctggacctttctaagatcatactgctcataagtggcagagctaggcttgccttgccttggccatgctgtctcttttataccacatttcttgcaaaatccagtatggtagaccctgcattcaggtgtgagctaaaggtgtacagaggttggaacaatgagcgcagtctggaagagtctgggatagcctctccgactggccccatctgagatgggtcctgtggcttggcaagctcataagcaggacagcctgggttagttttgagacactgagtgggtgacatgtttggggctggataagtaggcaaggggacatttgcagagtctttgtaccagaataggarcctgggcttcatcctgtagtagtctaggggctgtgacggaccctatccatggccatggatagtagtgtgcacactcataaggtgggatctctgcatccagctgttcttcctttctctggtcctgcagggaaaaaccattgtcagacagctggctatggtcactggcacagactgcgttggaaaagaagagtgaagataaaaggcacatggcgttgagacccctagaagcagactcagggcaggagttccgagtgcaaggtgcttatttggttttagggacatgagacagagaatcaagggcagcgaataaagggtacattctcaagtgagtaactgctgtgaccgtctggagctctatcctactaggtaattctgggattcagtgtagaacccctggggtgtggaggagggggttatttgtaccttaaccccctccagtcattggttgagagctgctcttgggggtcttaattttctggctttactgtcttgtcatacaggatgtaaccccccgctccccagggctttggcagaagcccatgtctattagctatttgacagttggcagaggcagttggaggttggactgcactcggtgcaataataagtcctgaggtggcggtgggacgcaacagcttctgctacagggatcctacagcctctgtggccttctaaggtgaccaaggctgctggctcctgcctccttggtggcagcagccatggaggacaagctcatgctaggaggagaggcaaagccaccttgagctctgtgcttgtatagggagtggaacaaagcaaaggctggcctcagactggactccagagtttccattcaygttctccacaagtcctcagaagtaaagaggagctggagggctatatcacccagtgatcagagagcaggcatggtatcagagagcctgggctaacatctggcctctgctctacctcctaagtttatctagagcctgccaccttccaccacctctattgtcaacatcctcgacaaggttggcagactttctctccagggcattagagtcaatagtttcagctttccaggtcatatgatctgtgtagcaaagactcaactctgctgttgtagcaaaaacagccataaaaaatatgcaaatgaatgagcatgggttatgtgccaataaaactttatttacagaaacaggcagagggctggatttggccacagtttgctgatcagtgcatgagtcaaaactctattctgttctcaactgcatgactattccagcttcctccctgctccactcttgccccattgatgtctattctcaatgcagcagcctgagtgatcatttgaaaaagttagataatggcttttttcctgttgaaaagcctccagaatttcctgtcacactcagaataaaatccaaacttcttaacatggtctccatatctagtccttgatttgtaatgccccacccccatatttgccctcttattctcttttctagccatgctgatccatttcctcttccttgaaccacaccaaactagttctgacctttgcacttgctgtccttgctttgcctgacatgcatttcttccagataattatgtagctcacttgttttatcgatctggtctctgctcagacttcagcttctcagagaggccccctctgattaccttatctgaaataacactctcccccacctcccaccccttccctttgtaactctgttcctttgcagggtgctttggttttcctcctagatcttgtcactatctgacattgtaatttacatctatttgtggattacccatctttcctactagaacatgagctcctggaggaagaagctttgtaagccttatttcctgctagaccagcagtacctgagtcagtacctggcatatagaaggggcttaaacatttgctgtatccagggaagagtgctcaggtccttactttacaagcatgtgacgagacccctcaccatcccttcttttttaaggttctcgttattgattgagctcctggttttccttctacctctgagaaagttctgtctcctttataggtatctgtttctttaccttttcctttaagtattacgtttccttaattcttttcttccttcttatgggagctgtgagctttgtaattccctgtgctcctcttatggtctttctttgctctgatttggctacaaatttagggggctcagttgccctgccagagccatgctacttacccaccccaccatgtgccccttagagtggtcattttaaaaactcctgggccttcttcaatgccttttcaaggaaggcttgcctcagtgtgagttctacccattcccccaagagccctgcatatggatcatatatgctccaacttaggtctggaagtttttttgtggtagacttagcttacctcctcctctcatctcatgcctgatcttgactttcctggaaccctatttcaaagcagagaaacctcaacatgctcatcttctgcgtgagtttcattctttgtaggaaaatatgctggtgctttggttcttattttttaatctttctttggtcttaacttttattaataatacttgcatcattttttttcccatgactgctattgtcaagaacacatagatagcaaatcagaggtctcgggttcaaatcctgattctgccttgtgttagctaagtggattaggaccatcatttcatgactgcctaattggaataataatgccggctcccctagatttgggtcagaggccatggctatgaaaattgttcctaaacaaagtgcgtgcctatgtttgtgcttctcctcatcattccccatcctcctcatgggtgcccggttccccacccttagcctctgactccttcactctttgataacgtcaccattagctttttatggaaagagaaaaatgacagatgggagaaaagtgggaaacttcacttgaacatatgtgtggaggggaggctaaccgggagatattatgtatattgtaatctatatgggcacaaagaccagcttatttttaaaaaagtgtaaatgtggataaataaaacctgataagtattggtttccttgaattattttgactactttatcagctgcatgctgatgtgttgcattaacacttttaacgcatttggaaattaaatcaaatggcaactgcattaaattctcattcacttggaacattaccctcctgtgttcaaatggaagaatgatctgaggtatggaacaagctgcaaagtctgtagttagctaccatttgtggaccatttattgcatgccagacacttcactgactgtcttctcatgaggttgtatttaatcttcaccatggtcccctgttaccactgaggatgctgaagtctgattacccagtctcatcagagtcacacagtccaaggcctgccctcttcctataatgagcccataaatgagactattttctgaccctccttatgctaattttccataatgtattattccgtgacagatatatatggaatattttttctgagaacccaagttccaggctaggctaaactcagttaaacccatgggctccagtttagtaagaatgctctagatcattgcctttgtccagtcactggagcctaatttatctctgaaacactgcagcctctgcctggaccagtgattcttaattgagggtgattttccttccaggggacatttggcaatgtctggagacattttggattgtcacgatgggagagggggggtactgacatctagtgggtggagcccagagatgctgttaaacaccctacgatacacagcatggccccctgacaacaaagaatgacccagctccaaaggccagtcgtactggcccagatcctgycccatgggaaggcttttgtacttagtgccctactattcatctaggacgccaggtgcagaaactggatgggaagatacttcctctgtgggcctctggccaatggagctgtatggatgggaaggcagagctggtgacgtggctgtgaagaagtggttccacttatttgagccccagaatccctttctggaaaattgacatatgtcttctggtttactctgactagtgatgcttggccttccctctgccatttccccactaactatccagggaaatacagcaaaaggtaaatgcagactgactccccatttccgagatctgagagaaattttctgctacctttcaggccaataaagctggccaagtgcccaccaagcacatgtgcctcccttccataggataaagtggtgaagcagctgcctaaccacggacctcattcccagcctgctctgcaatcactagggccctgtgataatagttccagtttaaggaatgtgagcagaactgctgcatgtcctttcagagtcaaagagttaaaaagcatgtagtcattcctcatctgctcacccccctctttggttagctggatgcagacaatttcaaggtgaggggagagtcaaaagattgaacacgcctgggtccctgaatcaccttgtggaggaaaattgtctgctaagcaggcctgttattaatattgaagtgataataaactattattgtgttaagctactaagccttggggtttatttgttacagcaattagtattttcctaattaatacaatttggatcaaaaaaagccattagaaacccccacaggcttaatgtcttgaatgaaaactttctagcctacctgaaaacagatgggaagatgtttcttcctttcccactgatattgggcttaaacgtccaaattctgtacgatctgaaagctgagcaattatctttttcttgtcacgtattgattgtttttgaagatttttttttaaagtctcctcccaaatgttctttcttgatgtagactttacaaattccagaatacatgagggcaaaaattgtgtgttctgtgttatgggaaggggttagagacagacttggctatggccacgaagcccaagaactacatgaactcaggtagagtctggccagatgtggcagcttggaagtctgatcctgaagggtaggtcttgcactaggagtcggaggactggtgatcctcctgtcaggcagggcctggtacatgaggtagggtgtccaggtgaacagtcccagccagcccagctggtcatgggaactgtccttgtacctggcctcacccagcttccagcccaagccagttggtccacctaccggcaacccagtgactccaaccgcaggtgggtgggtggagaaaaggaggtagagtaaaagattttgcagttcaaaaacaagcaccgccaatcatttagaaaggattctcatgaagaaatcgtcgcaacacattcaaacattgaaaaaacaaaacagtagcaattctcaggaagcagatgccgaaaacagccgtatctcaacagttggggtggctgtgggttcccartgtaatcgatgaggttcagtatgctcacgttgtattgtttttaaacttcacccatgccccttgcacaacatgtgctcattttgatccagggagctcagaagccgtgcttagcggacatttacctaagaagagatgtggccttcattctcctgctaattagacttaagtgaccattgctcagggccttgacttgactatttgtcaaaataatgggttgtattctaaggccaggcttcacgcttattcccgccttaaaacaatggaattcctttctaaaatagtataaaaaacaaacgatgcagctctgcagaatcacaaggttcctagaatagaataaaatctctgctttcccacctcttgggcaggtagatttctttgcttctttaaagtttcttttttcccccctaacccatatgatccttctcctttttcatgctttcctaaacctggtagaaaaggaggctaggatttggcctcttctcttttaaaatgaratgtgcttgcaccagcttttcattattaatcagagtagcatgcctgttgctttatatgtctrtccaggggcagatgtgactcactttcaacccagtaaatggaaactgtgcctttttgatggaatgcggcctggtggtacggagcaggcagttattggcagagcagctgatcatctgttctcagtgagggaaagcctcctstttgagttaatcagcggcaaaatgtgctctgtggtttgttcttttaatctcttctgcacgtgagtgaggaactgctgggaccccagcaagacagggctgcaatttgctgtgcctgagcaagcaattggaaaggcccttcgtaaggggaggtgaggaggctgcactttagaagcaggcaaacctggggttcattcttggctctgttcattttatgttgctgaatgcaactctgcatgtgactgagcctcagtttctccatctgtagaaagggacagaaggatgtttcttgcctcatgttttctgaggatcagtgaaataaagtgtggaaatcgcagagtgtgggacctgcttcataccagcaagaaagttcaaagactcgtgtgacaatgttacgttctctgtaccatttatttttccttctgggcacacaagcttcctccattcagatggggccagaggagtgtgtgcagaagtgatatacactccttttgggccagacctattaaaaaactcccctatgcaagccccctctctttttcccctcctgctgtgacatttgagaccacatattaagtcaggcagcagctccagatcggagcctgggtccctgaatgactatgtggagtacagcaccacctctcctcatccagtaacttcactgggctgtgatgggaatgagaaaaagctgaaccaactgtgacttgtccaacccgtgagggcggggcaggtggtgctactgcagggaggctctgtctgttaccstggcccttctcgccttgatggcttagaaacctcattctggccatctatgcagtggacagatacccacagcatgcagacaatgccatagtttccagtcagcattttgtgggagctgaacagtgatcagaagcaggtttgctgcgtctggtctcatagtaggcggagttagctgattstrtctacccacagtgctattgggattcaattgtctgaaaggcgctccttctccctgagcacatctgcactcatctctgtggcttttcttctatgactcacctctgtgagctgaccgccaccttttattcttcaatgtttgtcccaagttagggtaatatagttaattaagtgaccaaccaactttttcagatatatttgcatgcatctgctgaattccaggctctgttgcctttatttcttgacttctgagataagcagagatgaaggaaactacagggtaccctcctcccaggtcttaacccatatctagcagttattgacccgtatctagtacgtctaggtattgcctgtgcctatggcccttacctttaccaccccaactccargctaccacctttctcaccctctcttatccaaccatgaccataagactcttggttgactactagtccatgatgtcatcaaggaattgccctactgtcttcagaaatcacagaaaaggccrggtgtggtggctcatgcctgtaatcccagcactttgggaagccgagtcaggtggatcacctgaggtgaggagttcgagaccagcctggccaacatggtgaaaccctatctctactaaaaatacaagaaattagccgggtgtggtggtggttgcctgtaatcccaactactcgggatactgaggcaggagaatcttttgaacctaagagccagaggttgcagtgagccaagatcgcgccactgcactccagtctgggcgacaagagcaagactccatctcaaaaaaaagaacagaaaagacagctcatggatatacccatagtgattgcttttgcacaaaagggctcatgccaggcattcctggggctacatctgagaagagttcacccagtcccaaatttatcaaccatgatgccaacagaagttaccatgacctttgagattgcagtatcattagctctctcttacctttgtgcctattcctaggggtttcttctatggtcacttctgacatatctgtttaccattccttctgactttcatcctcaattccctctcactccttacaccttctgtcctctctaaaccttccaaatttggaactcagctccccttaatattctttatcctttctccagcatgcacatgcacatgcacactctctctctcaagttctttggggtataatagacytctgaggatttagggtactggaaggggtttatagcatagaaatacaaatgtcctcaatgggatctgatgaatttctgcccttacaagtgcccttgccatcccaggaagaagttcttggtggcagctctggtctcctaccatgttgccctggctcctcccctctctctccttcctcggaggctcttagagcagtctgacagcagacagttgcctcaggacctgtttgcacagctcatttctgccagccccacttgccagttcttcccccactggctctggattaattccctctggcagatgcatgacttttccctgcctttcttttgcatctcggaagcagggctccatttcactgccaggatggattttgccattgcctcagtccttgacacctacctgggctgggacatcactgcgtatagtcctgctcttgtcctgccaaaactgtgcggtcattgacatagttaagggcaggaggactcggcaggggctgcacagagcaggaggatggagatgaggagccattctcagcctggaccctggcagtggtaagtggcagccacccaactctaactggataaaaccccagaggaaggttgttggcccacgtccctggaatgctctggcatggagctgtctctgtgcagatcacatcctagggctcaaatgaggacccagggctttgtctcctttgtcattttctgttttgtttgttcctcattggcactattatcctacatgctgatgggataagttgggggccatttgggggctggcatctccagatccacaccttgtagtttaacaacctcaagggcaaaaggattatgtctccccatgtctgaaggccagtcccagggaaggattctgcctatccctgacagggttgagcgtccgattctagacccaccatctgcccagtggcagatggaaggacccagtctaagtcatgtgcccaattctttagccagagtgtgtgaacccaggccctccaggaggatgcaaagtgagacaagagcccttccactcaataggaatgctgggcataccaaaataggacatgcataggtggggctcccactggcatgcacctccccactttctgtaatagagcaggaagggagttggccgcatgaagtgttagggctgattggtaggttgtggtgtgtagtttgtgtctcctgctttcaggcttaaataacaatgagaatgatctattaataccttaaatttttgttgtaatgaatttcacactgatggaaacccattttagaactaaatatgttcagaactaagttgtgttatctatgtctatttcagagtctcagtccctctcagcttctctttctgcctgtccctgtgcttccctgacttcctgtctaacacttccccatctttctttctcctctcctcagtgtccgccagcctctgccccttccctctctcttgcaaccattcctatgcattcaaaaggtcacaaacaggtaacttggctcaccactgccatgcttgtcagtgtctgctgctactgatagtccctcctgaaaaacagttcctcttcctcctacctcttcctcctctcttccccctaccacgtcctcctctcttcccctgttctcccttccttctcattccctgtaaatcctgcttttttttgtctctccctttcatttcttattaatgccttgttacacaccaatgttttgggtgacacctgtcttgtccactgccatggagctgttggccatggcttctgcagactctcaggtgcaggggtcgagcctgcacaaatgtgtggcattaacattttcctttgagtattctttgattgaggacagcaagcaattagtaccatttgccattttgtttttgttgttgttgttgttttgagacagggtctcactctgtcgcctaggctgtggcacaatcatggctcactgcagcttcaacctcccaggctcagcgatcctcccacctcagcctctttgagtagctgggactacaggtgccaccacagccagctaatttttatattctttggagagacaaggtttcatcatgttgcccaggctagtctcaaactcctgagctcaagcaatgtgcccacctcatcttcccaaaatgctgggattacaggcgtgagccactgtgcccagccccatttgccactttgttaaattagtatagaaatatacacctggacagtgccatcttagtctccaaatgccccctattagttgactgattaatgtgacaaatatttattaaatacctgttatgccccagtaatcttctagacacagggatacagcaaacagccatatggatcagggcttcgactattttgaagcagatattctaatggaggggagaagaaaaatgagctcataagtgagaccatttagagagtggtaagaatgtcattctttttttttttctaagacagagtctcactctgttgcccaggctgaagtgcagtggtacaatcttggctcactgcaacctccacctcccaggttcaagcaattctacctcagcctcccgagtagctgggattacaggcacctgccaccatgcctggctaatttttgtatttttagtagagactcagtttctccatgttggccaggctagtctcaaactcctgcccttaagtgatccactcacctcggcctcccaagtgctaggattacaggcatgagctaccatgcccagccaagaatgtcattcttaattctgtgaatagtgaatgctttgtggacgggaactaactgcttgtttataattttacggctcaaaagcaagtcacaggatgacttgtattcagatcccagctctggcacttgccacatggacccggggcatgcacctacacttctgtaagcctgtcataccctctacaaagtgagcacagtgaggtggacccttcaggtttgttgtgaggtatgagtgagatgatgtggccagaacaggagtcagcagctccctacccctcgggctaacaccagctacttcctggccctgtcctgcaaggtggggctaagtatatctgaatgcaattattgggttacttcaacttgccacccctaaggctgttgacccatccaaatttaatctgtacaattgtgaggtataatttactattgtattagtttgccagggctgccataatgaactactatacactgggtggctttagacaacagtatattctcttacagttctggagtcctgaagtccaaggtccaagtgtcagtagggttggttccttctgatagctctgagggagaatctgtttcatgcctttttttttttttggaggcagaatcttgctctatcacacaggctggagtgcaatggtgtgatcttggctcactgcaacctccgtctcccgggttcaagccattctccctgcctcagcctcccgagtagctgggattacagactcccaccaccatgcccggctaatttttgcatttttagtagagacggggtttagccatgttgaccaggctggtcttggactcctgacgtcaggtgatccgcccaccttggcctcccaaaatgctgggattacaggcgtgagccaccatgcccagcccatgcctcttctaacttctgctggttgccagtgatctttgggtgttccttggcttataaatgcatcattcctgtctctgcctctgtcgtcacatggccttcttctctctgtgtgtttctgcatccaaatgttcctcattttagaaggatgccagtcattgatttggggcccaccttcttccagtaggacttcatcttggcttgattacatctacaaagaccctatttccaaataaggccacattctcaggtaccaggggctaggtgttgaacatatctttctggttgayacaattgaatccgcagcacccatgtgtattggctttcatgaatttgaaatccccctcccaactccttttgggttattcttgtatgtttttgcttctgaagaattcagacgcctccttttatgcccatacagaggtctgcaccttcccaggtgtgagaagtgaccacagattcacagcagacaagagtgtgatgaggtctggctgagaggctgggggctggtcctttccttccctccttccatctctcctcatcttttagtttcttcctttgtcttactgtcaggccagagcctgcccccttcccctgccaaggccctattgcccacagaagggcataaattgtaccccgtgtctctctccagccatagtctctctccagccatagttctcaggaaccccttccatgaaccccctttcttgaccacacaaattctaattccccaatgccatcacccttgttatccaaggtgacttcttgaaactacacatgtatagcaaacatgccaagttcattaggttatgggttccacgaggacaggcactgggtctgtgcttgctcggcctgtgtccctggtgcttggcacattgtgggccctcagtggacatttgttgcataaatgaagcaactgcagggcttggatacttctctattacttgctgcttctttgcaaaggtggacaaagcccttcacgatatcttttccttcagaccttttcactgcacacgaggctggagaccagcccagatagttctagttagcctcagagcctttgcacatgctgctcctttcctttggaatacctttccctacttcatcaaccattttataattcagcccatgtattttccctgcagggaagtcttacctgaaactttccccaccattgtaaactatattacatgcccccaaatcaacagcaggaacctctgctagactataattgttcgaaggtaagggctgtgtccaactatctgtttattctcagtatccctgtgtataggaggagctcagttggtggcactcccatgaaatcaaatagttctttgatgtgtacaaaatgatgaggatgcctcaaatatcccaaaattattatgattcttattttctaggtgaggaatcagagacttagagaggcttagtgacctctctacattaagacctaaggttaaggacagacaactagagtraagttgagggccgagtggctgcaagttctcctggggttagcacagagtcaggcacacaacggagcaaatgctagggtatgggcgacccacagagaggcacgagaagccccagagcagggctggctcccagccatgtccttgggagactgtaggcatcaggagctgcagccactgccttccttgcgattcttgggagacttctgttctaattgctcttttcaagtgtcgtgcgtgcagttcaatgtgtgggggacatagtgtttgtagcaactgctaatgacagggctactgaaaaagactatttttggagttaagcttcagcctaaaagaaataaaaataaacactgagtttttttttttaaagaaaaatatgtagaaaggaatcaattccatctcaaaatgttctttctcctagtgagggtggagtaatctagaattagagtaaggcaatctgggtttaagtcatggttctgccatgaactcagttttccgtgggatgccttttcctccaattcctcctggtcctaaggacagctcaggggtcaagcctgacctggctgaagccgtttccctctcctctagtcacatttggctccatcacagttcttacagtcagtcttgaccttgaccaagcaatagaggttaagctttcccagggccattcccaagtagcaaccctccaaactgtgtctcatccaacccaaccttatctgagcttcaatgaatcatcagcaaagcctgttactaatagtgatagtaatacacatgttgataataactaacattttctgagagatgactatatcccaattccttattgagcacttctggaacactgtgtggtttttctgcaaagattcactcttcatgatccctccccatgggcagagtacacttcctgattggctttgacaaagccccattgaccttgagcttggccatgtggcttggtttgaaccgtagaatgtgggcagaagggatggtgtgccagttcccaggagagatttcaggaggtatcatgtgtccctgcttgctctgttgcctgctgccatccgtcactggaagaacctgcccctggcagcaacagctccttcagactagttcctggaatgagaggcatagggaatagattcaaacacagcctggagctaactgagaacaagaaacaagtatctgcgtacatcaagattcggggttgtttgtcactaagaaaaagctaagtaatacagtgctttaaagagatgatctaggtaattctcacagcagattttctgaggtaggtgtattattactccattttgtatgaggttgtgctaattcttttcccctgggatcctgccaagctctgcccttctataatgctaagtcttggtatctggcagcctcagctctccattaggttgtggtcagtgggccttgaagaacagcattgctttattggatttggataagaaggatgatgctattggagactctcagggctagagggactctctcttgggtccctgctggtgattggaagggctaagagtggtcctttatatgcctttattttacagagaggaactggcttctggaaggctacacctgcagggttggagtcaatgtcactccccagaacctactgtcccagaggtctatgaggatcccagtcccaggatcttgtggctcagctgtagtgatgacctcccagagggatggggccaaccaggccacatgtagaactcaaattctcctggtccctagtggccatatgcatgacagctacaagctggctcaggcattacaggaatcagtaagggaaaagcatctcagacacagcgtttcagggcccctaggtctgaattgggagacatggcttcagggtctgcttcccagttgagactcctgggcctttgcctgagctgaccataggacctcctcatgcaacacccattgccaccaaggccttttcctgcccacattgccagagcacctggccaaggccttcctccctactcccagtacatccctcrtgcctgcttctccccagatctggaccctgctgtgttatgagcccagaggaccaatgtgcaaaccatggaatgctgcttcctgtgaagtgaagatgtgtatgttgataaaccccaacagttcttcttagaagcctgtagcctccgatggctgcaagggcagtggatggagcaactgcaaaagcagcatattgattgcaaggaagtaactgaagggagagttcaaaatgcctcctggaaggcaggcagccctcggctctggcgaggtgctaatgagctccccagccagctccagttcgacctgccttttcccagcaaaagacccagggcctatgtcgagaagggcagcaggaagtgggggcgatggagatgattaatgtagagcagcttcatggttcataccagctctgctctctaagtcttttgtttcttcctccttttatcttcacaaggcaaagcaaagagcagcgcatgccgtgggaattccttcctgtaatgtgttctgatctgtttgcttgtataaatgagcccgtgtttcagaagagagtgaacccccctcgtctaaagggacataaacccaaggatttgctccatcctcccgctgtgatcttggccaccctcctggctttctaagactgagttaccttgtttccatgcagatgtcagaatgtacacgtcatctgcagggcaggtggttaaaccccatgtctagagagggagttgcttgaaagcaagcatgtgccagcgtattgaagtaagtgagggtggaagtaaagcacctttatttccacatgaggttgcatcattgtgtttccatgctgagaaggcctctcgagatatcagtgttcccatttattcatcctaaaactggtactttgtcttctatacaacctgtgtatgctaaagtatgtctgcaatacaaaaacaaggaagatgtaggccaggagataagtatccagggatcttttgtagtgtattaaaatatgaacatctgcattcccttttcaccttgaattttaaaaatcagtacatttttccttcttttcagagataatactttaccaccacgtttaagttctgggccctgaggcaaatatttcagctgttgagcccccaagcatcggactttcaatgaaaggaaacctgagttctaatcaactttgcagcaagaaacttgcaacaagaaacttgccaaacctctaagcatgaaacagcacgatctttcatcatttgatgcttttacctctgtggttttctttgttctatgcctgccccttcaccttcttctcgcagtcatccttcaaagctcatgttagatgtcatcctctctgtgaagacttctacagcttccccaagcagaaatgaacattccttcttggctctgccaaacatatctctatttaaaatatgcattgttcacttgttaattcatttactcacatatttattgcgtgagtagtatatacccaggcactatggataggtatccagagattcgattcaagggtcaatgaaactgatcaagcacatactatagaccagagctgcctaatagagctttctgctgtgattggaatgttctgtatctgtgctgtctggcatctctggctcagtagccacttatggctatcaaacacttgaaatgtggttatcatggctgaggaatggaattttaaattttatttatttttttttagaaaagtttaaatagccgcacatggacatagctggtggctaccatattgggcatcactattctacagggagagatggactttgaaagagttaatggaacaatatagaattacaaattgtgattgagactttgttgggatcaaatagagcatcacgacagaaagtaagtagggggctcccttcggtaagtggacaagagaagcttcttggaggaagagacatttggtttaaaacctggagaatgagaagatgtcagccatttaaagagtaggaagatgacctttatggggaaagggatcagtgagtgggaaactctagaggtaggaatgagtgtggcatgttgaaaggactgagggtggttgatgtggctgggatagatgggtgagtagtgggagtggaggctggataatcaggaatcaaatcacttaagaccttagaggccacaggggagggaaaggggcttgctggacatcccagcaccagtcaaagagcagagcacagggtgcatgtctcctagctgttagctccatagtttttctgctgtaccatgctgcccaagcaatgtggacgcacaaccttcacacagtgctgggcctggtggtgagcctcatctgcattctgtttccattcctgtctctagcctgacttatttaggcctgtctaatttatgtagcggctgtacatgggtagtgcatgtcaggctcgggggcctgcctgtgtttgtgaaagagaaatactaccatctccactggagccatcttttctgatcttgcctgctcggtaattaagattctggaagcatttagcacaaggaggaattgctgtaatgacaagtggatccttctgtaacctccacttaattggatgaagtgacagccccagcgaagactcaaataaaatttggtgcaattagactgcgctgaacgtctggtgccagaaccagggtggaaatcttgcagctggctcgtggaaccatagaggaatctggttgcacaaggggaggctgtgtttgcaggctaggtgaagatgttcttgcttcaccttttacctgcacccctcccttccattctgtaggtcttctctcaagattacttgaagggtggtggggggcacagaggtacagggagtatcttaggttgggttccctagaaacaaaatctgagacagagattgggtgcagaagatttatttgggaaagctgtatggacacccacctgtaaagaagtgggggaggctgggctgggcagagggagaagctgactcatgatgtagttacaaccgagggatcagtcaaccctgtgggagaacccaggagctgggatgctcctttagaattgcccccaaactgaggttagaggaccagacttttttattctcaaaccaatcagtcatcagccatgtcctctcacctccaagaaagcaaacatgatcttggctgagagagttcccagggaaggatgaagctgtgagcattcagcattgatagggtaggggtgcttccagcagcagaactacacagtgtttaccacaaagtgaaccagaactgacagcatttggttccctgagaatttctgatcttcctcagacattgactgcaaggtaaccacacaccctgaactgctctgttcctctcttccaattccctttgctctatcctctatctgttatgggtgaaaatgagaaagtctcttggctacctcgagtccaattttccctctattctttatccttcttgcttctaacactttcccaggcctccagtgcctctctcttattgctttctgcttttgtgtcccatggctgatcagctatgtctgaagtcagctattcaattcacttcctactcatgccatgattcttcccttttggtggtcttatttctagcagtgagtctggaagcccaacttctaccatctatcagagcaccctcctggagaaatatggaatgtgtgggctccaggtcagtcagaccagaataaggttctatgttctgccaytttctagaagaatgacgttgggtagtaagtcaggttttctctttgtcaacattaaggacacagacatggattcatgtgtttggtgtcatactttcattttgagcctttctcatttgtaaaattagggcaaatctacctgcatcagagagcttttgggaggactaggwattgtatgctgggctcatagcacagtgcgtggcatatggcagaggttatcatccttgttggcttcattggaagctgtggtcaattcagcctggccaagggaagtccaggccaaatctcagcttagaacccagatgctggaatcctgagtgtagcacaaaatcttgagaagagaagaggtagccatggggaaatcaggttatctatgatttcatgggagagcctccagtcaagtccaagcccactccccaagagatctgaatggatggataccttgaagggtacatctgagtgcaatcctgtgtctcacagccagggaccaagctgcattcattcctggatcactcctttcctctgcctgtactgtcttcccagctttctcgttatatagccatggcctcacctttcacgtgggagaaggagattgtgagagtcatgtcaccccagtcccgtaactctggcttgttgtaggcatctttctgtccttgcatgcagcgagagctgacggaatcccacatctcagtcctgttcttcccctattgttggacacacagcaggactccacgggcaagtggaaaagaaaagccttgatcactgtttattttccttaattttcattgtgcttcttttatttttacccttgattacaagcaacagaaaatttcctctgtttttttctccccttttgcagctgtgggttttaatagcatccgctagaccgacccccctgggtagactcagaaaggagagaaattagctaaaagggaaacaagagaagcatttttagttcagggtgggagcctcattttgccaaacctgaggtcttttgcctggttccagagccttctttcagtgtcaacctacagcttctggagatgaagtgttttttgttgttgttattgttgttttgctcctttttttttaatttgaagacaaactcacctcctcgaagcccctctatggattgttctgtgagttgagtcacatcatttatagagagaaggtcaatctacttgtcaagtggctaagaatgtggttattttcctgttctttgttcactctttcagtcttacatattcattcattaaacatatgtaggtacctgctaattgcttgcattttgccagtggctaggatgtgaagttaaatgagatgatttcccctaacttcaaaggtgctcgtggcctggccagaaagacttggtgtgtaaaccaagaattgcaatgaagggtgagcaacgtcacatttagaaaatggtcattgttagcgcatgggcccgtggtcattgtcccttcgctcagttccgtgtgactttggctgcgataccttttctgcccctgtttcctcatcagctgtcgtgtaggaacaatggctttaccttagaagattctgaggattaaatgagatactgtatatgtgtgcttggtggaatgaactagaggtaactgctagtcaatgttggatgctcttagtgctgttgctgagtaaaggagccaggctgtggcttcagagactgggtttcaaaatctagcctcaccactggatcatttagcctatggcaagtccttacctctccccccttgcaagatgataatgtaattttgctcacaagtgaggcactgctactcaaagtgtgatcatggagcagcagcagcagtgatagaaacttatcagaaatgtaaattctccggccccaccccagacctattgaagcagaatctgagggtggggtttaggaatctgtctttaaagtccttcggggcattagaatgcctgggaaaaatttgagaggcactggcttagagataaggtatgacagttgtgtggcacagaatctgcccaaatactgatgcatggtaaaggtatttacagctgttagtgaagtgagagcaaacataatgggcaataattcttttcaagggtgctgcaagttgccctggaaggtcgtctggagccagctctagagagataattgtgggttttgagaaggaagagagcctctggatggaggcacaatgtgaggaaagatacagtggtatttggaggatggtgccaagtttggtgctgctcatgcacaaaattcaagaagaagggtggttggagatgcagcaagagagatacaatccagtagagccagatcaggagggtctgatttgaccaagctaagaacgttggacttgtacctggagaccattaaaaggttttaaacacaaaagtaacaaggtcaaatgtgtcattagtaagatcagtcattgaggctgcagtatggtagcaggaacacctagtagaccagggaaaataacagtccctggagtctccagaagaaaactttctactgaattgaacattggtgggcataccagttgtccttttcttacttgttcttccatttgctttcctgcaagcattcactggatacctgcaatgctctaggcactcacggacacacacacatacacataagtgacacctctgtaccctcccatggtccacagtctcctgagaaagatgtcagttattagacagtgtgataaaggagggcatccaaaccttatcgaacacctggcacactgtaagtgttatgttaatgaaatctctgctagctattgtatcttggcagtgttcttggtgtgttccaactgtgatcttatttggcctcacagtgacccattttacaactgaagaagcttcaccgaaagatgtcaagtaacaggtcttacataggattagatatctaagaggatatcaaatttgggacataccctctttttttgcttgcattggaacgggggggatggaggcccaaatgagaagagcagtcaggagacaggcacaaggccatctgaggttccccacaatggaggcctctctctgtcctgtcagcagcagggcagtcttcaaaagatgttaaaaagatgggcgtcgtgatcagagatactctggtacctcagagtattggcaggcaaaaagtgaggccttgggaggtaaccttttgtgaggggcactgacatttattcatagcatgtctgcttctttgcctaattctcttaagatctgtgtctgtgtcaaaatctcagcaggatgaatgaggtactgaagctcttctattctcccactgcctctccctgctcacacacaaaaatcccattagtaacagctcatcagtctccaaagtatagtgatagcatctgctgagggactgaacgtgagctgcacgtgtgtgtgcatctagagaatggaaggcaggaggaggacaagagagatggaagagcccgaggccctactgtgtggtgagttcttgacacaccagctcgtgtcttctcagcatggggaccagatagtgttcccattttgcaaatggtaaagtgaagcttacaaaggttatgtgtctcactcagggtcacaaagctgacagtaggctggaccagccccttttgccaaaggccatctggcctcagaatcctggttttgtttgtggctgcccgtaggcaacattgctgcaggtaacacctcagcaataggacctagtctttatgatgggcaagttaccatccactccatggccgtaggcccctgtagtagcagaataatggaccccttaaagatgcccacatccaggctgggtgtggtagctcacacctgtaatcccagcactttgggaggccaaggcaggcagatcacctgaggtcaggagtttaagaccagtctggccaacatggtgaaaccccatctctactaaaaatacaaaattagccaagtgtgctgatgtgtgcctgagatcccagctactcaggaggctgaggcacgaggattgcttgaacctgggacgcagaggttgcagtgagccaagatcatgccattacactccagcctgggcaaaaacagcaaaactcagtctataataataataatawtaataataataataataataataaagatgcccacattctactgtccagaatctatgaatgtattctctcacatagcagaagggattttgctggtatgatggagttaaggattttgaggtgggcaaattataccaatttatctgggcccaccgtaatcaaaaggggcataaaagagggagggagggatggtcagagtcagagtttgtgaacacacacgtgcatgtatctttgtaatagaatgatgtatattaatttgggtatatacccagtaatrggattgctgggtcaaatggtatttctggttctaaatctttgaggaattgcaacactgtctcccacaatggttgaactaatttacattcccaccaacagtgtaaaagtgtttctatttctgcgcaacctcgccagcatctkttgtttcttgactttttaaatcaccaagtttgtggaactttgctactgcagcaataggaaagtaataaaagtccctaggacttggaaggcaaatgtcacagtgagctgctttgcatgcacaracaagactggatttgcataaccttggccacccttcccttctctgaacctcacttttctcatttgtaaagtggaggattttaatactattgtacaagtgtttgtctacctcatatacattcttccaatcccacctgagatgataaatctccctgcctagatgaaatgagcctgtcattaaacattctcaaggcacctgctctttcctttacagcatgtttgtttctagttagagtttawtgaggaaggtttttttttctttctttttttgagacagtctcactctgtcacctaggagttcaagaccagcctggccaacatggtgaaaccccgtctctactaaaaatacaaaattagccgggcgtggtggtgtgtgcctgtgatccctgctactcaggaggctgaggcaggagaattgcttgaaccagggaggtggaggctacagtgagccgagatcattccattgaactccagcctgggcgaaaagagcaaaactcagtctcaaacacacacacacacacacacacacacacacacaaaagatgtccacatcctgctgtcaagaatctatgaatgtattctctcacatagcagaagggattttgctggtatgatggagttaaggattttgaggtgggcaaattatactgatttatctgggcccactgtaatcacaaggggtataaaagagggaggcagggatggtcagagtcaaaggaggagaggtggcaatggagagagagagaaagaagaagagattggaagatgctatgctaggctggagcgtaatggcaggatgatagctcactgcagccttgagctcctggcctcaagtgatcctcctgtcttggcctcccaaagtgttgggattacaagcatgagttaccatgtctaggcatgaagagattatttacagggatatgagcagaattgaggaaacaaatgaggaatgaggaggcagccagggacaaacaatagcagggagctgttacttcccaggtctcaaggggcaggggagggagtggtagaaactaagtatgaaaactaagaactttggggtaggggatggtggagggaaacaagaaagaaatgccctgagctttgtttttgttttaaatttaccttctacctcctgctgtagcctctcactggctgagccccactgrccaccagagggtaagagggctgagagatgcagtgaatagatttgggcctccaggtgcatgagggaggacagagactgaattaggggagcaaacagaataattgaaacaaccacacagctggtgttgatgcattttcattgttatgtaatatttcttcataagattgatctcagtggttaatattacacttagctgattagattaaaaagtgagctttctgaaggcaaggattttattgctttgcctaccattgtctctccagggacagaacacacagtgggtgttcaatgaatatttgctgaatgaacaaatgattcaattcacacttgtgaaaatactttaaaagtcatgcattgctacatacaagcttattttcactcattgagacagcctcggagaggtaatatgaactcactaagatcaaacaggaagtatcaaagcaaggatttgagtcccagtcttctggatccaagcccagtgataatcccactccagtccagttgcctaccctgtccagataggagagcaaggattctgcctttggctttcaaatcacagccttctgatctgcccatcccatgtgggctccttgggtggctagctccccatgactgcttcctggggtagggtaccttctgcaaggaatgacaatgaggatatctcaaaagcacgtggcatcttgctgggatctcctctgaatttagaaacacacagttggctacattgggtagaaagggaggtgtgtcctgtccctgtagggtagagtggaagaggggtattatgcaggccctgaggatctgggaaggggagctacaagtccttttcaggcccctgaggatagaccacaggccacaactgcactgaacatggcaggtgcccgcattgctacatctggcccaccagccacttctggggatatggagatagtgagctctgtgggagctgccccacagcccagctcaccgggaaggccgccctgggaggcagtcactgcagcttcgaatgggacatccggcccctggttgacctgccagctgcttccgagctgggcaggaccatattcaagccctcgttttctgtgtgttcttggtgtggccccttttyctttaatattggcaaaatgaagatggtaagacaataatcccttctttgcaaaaccaggttggagacttaatcaaaatcgtgacaagacagcactgattgagcatttatatgttargcattgacctaagcactctatatacatttacttatttaacactcccagaaagtcaatgagataagtactactcttacccctaggaagacattctgaggttatattcatattattaccaatgaagacaactgaagttgtgacttgttaaagtcactcattcagtatcagaagcaggatttgtactcaagtcatctgagtctggcaggcatgctttccatccactaatgtttaccaccttccaggataactgcagacttgttaaagtttgccatagtcctgaggaacatgtggtatgcgatgagctcatttctggggtgttgtgcacatagatctgtgctgtcctgtatgtcagctgttggccatgcgtggccttttaagttaattaagcttaagtaaaaataaaaatttcagtttcttggccacgtgagctgcatgtgcctagtggcaaccatgtgggatagtgtggatatagaatatctctggcattgtggagggttctgctggatgctgctgctgtagatgaagacattctcctacttttggacagagagcagacagagtgacccagagcactctgagactctcagaaaggacagagasggggagtcagctcccagcgagggtgcagaaagtggaatcgacaggcatttcttttgggaagtttctagscagcccatttacagtagaagcagatgtctcatggagcttccatccaatgtcagatcagagaagagactatttccaggagcaggagggtcagttgctaatgtccagrggatttagtcacatagaggccattagtgaattaagccagagatgttctggtaaggaggtgggcattggaggtgggtgtgaggcagtggagacagtgggcatgggtaaatcttgctggagaccagcaggattggcatcaccttggagtttgaaatgcagaattctggacaccccccaccccaccgactgaatcagaatctgtgttttaacaagttcatcaggtgactcatagacccgatatggtgagaagaatgtgcagagaggaagggaggacacttgggaggaagcaaagaggccagcaagcaggatttcccaatgcagctgagcacagtgctagatgctgcaaggaagggaaagggaacaggtgcagatacctctggcaacatgggggcattggcatccttccacaaagtggccccagcagagtatcaagacagacacaatttcatgagtccctgggggatgtggsagcagccaccaaaggatcagacatcactgggaggttatcactaaatggcattttactgatggtctgaaatgggttggcctgttgataagtggagggaggtgtctgtgcaattaggagatggaggtgagggatgcacctgtgtgtgcgtgcatggatgcacatggcagcagggatttccttggaaaaggccagaaacctgactatgaaactggctcatgataggaatgacaagggaaacttgctgctctgatgtcagccccaggatgctgcagagcctgcaggtcccacagtccattcacaccccaaactgcactgactgaccctcttcccctaacctgcttctttgtttgtgtccgtttctcagcatggctgtgtatccacttgtccaaccagaagcctgagggccagcccgactgctccctccccagcccttgtctgattggtcgcctgattacaacagcattacacatattcgctgcccacccaccacgcttccatccacccacaccgccaagacctgagtgacacccacatcctcccatcacatgaggcctccacaaccctgcctcctgtggatccatctcatctccagttcaccatcatgcacttcccttgacatccccttgttccttgtctttcaggggctccctgctgcctttaagatacattttaacttttgagtctgacttcaagtacccttcatctcctcatttccaggcatcctgtccctgggtttgccttctttcaggcccaagtaacttttgttcatgaagttacccttgaacatgcaaactccctgctttttgttcatgctgcttgaaccgtggtctgacctccttggaggagtgctgtctgtgtagagctaacacttcgttctgtcccacattcctcttgtttgacacttgttacactttgtcagttgtgtgtttgtcttttcacattgacaggctgtgagctcagagcatctgggacagtgtgcaggcagacagggtaagcacagggctgcatgccaggaggtctctcgagcttcctaagctcatcaaggttactggaccccaactctctagtgagagacagttatattcaaaaatgcctgcgacacattattctatgcctctatgacaagcaattctgacaaaatatcttgaaaacagctgctaagtatgtgatctggggatttgacagtgcagaaggacaattctgcatactcaggaaagcttggagaaaatccagtataacttcagtcatgataatgaattgtacttattcaagaaggagccacattttgataatggggaggcaagcacgacttatagacaacttctctctatacaaggagtgagctgtggacacatatattctggtgacaatggaacattcgtcagttttttcttgcctttgaccctttttctttaactcttatttcggaatctaacttatacgtcagtttcttcattgacccctccataattcccacctctgcaacacacatctcaccttacttccttgcaatcacttgcttatatgcattctcttattgcactaccagtcagacrcaaccatgtgaccttgggctaatcagttaaattttcatgcctcagtattcacatatgtaaaatgggaatagtgatttttacctcccattctgctaagggatacacatgatatcatttatcatgcatgtaagcccacggttcggtacaaaggcaatgttcaatatatattcactgcacttttcttccttgttcagcatcccagtggaactgttatctcctcaagggtatgaaggatttcttttttccctgtaaatcacccagtaggcatttagtatgtgtcaaaggtgagtggctaaatgatgagtaagtgagttaaatgaaacttgttatttcttacaatatctctagtatctgcaccgattgtcccacacctaggggtcttgcccaaatgcatgtgagttcatggtggaggcctttggtaggaatgacccctttcgttgcttcatctaccacttctttgtcagatgtgtctttctccacatccgttcttaccctgtgtcagagtggcaggtgtttccatctacctggggacgtggggctgccctttctgcttcttctctgggtatccagtgacgtttatacactggctcttctgtttggtctctaaacatatccctatctctctcatcctgagaaagaacaccctgcttgatttgctcatagtttctataggtcaccatgaccatagacctttcactatttgctaaacacttcatatgcattgtcttatttacttctcacaatagcctttaacaatactctttagctrtaacattcccacattggagctgaaaaaaatgaggctcagaggggagaaataacttgcccaaggaccacggctatagagctaacttcttgccttcctgccaagctgttggagagaagtcactttattggccacagtttttcaggactttccctcaggactgggcttccataactatatctcttggtttcttaacaatttctacagctgaaccttttctgtcttggtcacagctttctgtttctgggcctttcccttaaatataatgttccccagagtgctggctaccataccccttcatatttctctttgtgagtgagtctatccaatctcattattttaattatgaccagggaggctgatgactcccacacccatatctcttgcgcggacagttctgctgaacttacgattaactagctgttggagttattcctgtggattgccacaggcacttcaactcaacatgttcttctcgaagttttcatctccatcattggctcaaccattcatttcttcagcgaagctaaaaagaaacctaagattcatttcagattcctgccttttcctcagtcctcgccctactccatccctgcatatgttcaattaaaacagacccaccaacttagctcctgaatatttcttgactatgtatctttcctaccatcactagtatcactgcattggctctcgtcagctctcaactggactcttgcagttccttattttttggtgtgtgtgtggataaacctttattttgaagaataataaaaatgcaggaaaagacacattataactgaatataataatgtaaacaacatcctgatcgagatacagaatataaccagcacctcagaagccctcctcggtytcactccaagtcattgattctcctttgcaaaggtattgtgactactagaattattttccctgtttttgaattttatataaataagagcataaattatatattttttggctagtttcttccacttgaaattatatttgagtctcatccatgttgtattcactttttaatttatttttaatttattttttttaaggcagagtcttgctctgtctcccaggctggagtgcagtggcgcaatctcggcccactgcaagctccgccccctgggttcacgccattcccctgcctcagcctcccgagtagctggractactggcgcccgccaccaagcccggctgattttttgtatttttagtggagatggggtttcaccgtgttagccagtatggtcttgatcccctgacctcgtgatccacccgcctcggcctcccaaagtgctgggattacaggcgtgagccaccgtgcctggcccacgttgttactcttaaatagtatgtcatggaatgaatataccaaaatgtatccattctactgcttacagacatctgagttgtttctattatttagacataatgaaccacgtgactgtaaatattctgtacgtgtttttggtagtattggactccatttctcttggatatgtaactaggagtagagttgttctttggcttaagcagatactgccaaatagctttctaatatgacagattgcatattggtgttgtctgtgttttaatattagccattctggtaggtatgtggtgatagctcattgtggtatttttctgatgactagtgaaattgagcaacctttacatatgcgcgtgtgcacgcgcatgcacacacacacacacacacaggtgatcttgatgtcatgtgtttgaattggatattcaggtcttttgtttttttatattgagttgtgtcttattgatttgtagttctttatatttactagatctgagtccttgtatacatatcataaatatcctttttctttctgtagcttgccttttcacttaattaatggcatctgttgatgaataacagttttgattttaaagatgtcccattatcagtcttttatttatttttgccatatttaagaaatacttgtgttccccacaataaaaaaaaaatcctgtctcacattatctttagaatttctattactctacatttcaaatataggtctatgtaatccatctaaaattgattttcacataaagtgttatatagatactataaaaactgtcactttgattctgtctgtatggatatcagttgacccaggactcttgttaaaaatatcatctttccccagctgatttcagttgaacctttataatatatcaggtgtctgcatatgtaagggtttattttggatcttctgctgttgttcttttttttctgtagatctattttttatcattattttgatgtcttgttgtcttaattgttatagctttatgacaagtcttgaaatccatgtaagacctacacctctgcttttattattattattattattattattatactttaagttttagggtacatgtgcacaacgtgcaggttagttacatatgtatacatgtgccatgttggtgtgctgtacccattaactcatcatttaacattaggtatatctcctaatgctatccctcccgcctccccccaccccacaacaggccctggtgtgtgatgttccccttcctgtgtccatgtgttcttattgttcaattcccacctatgagtgagaacatgcggtgtttggttttttgtccttatgatagtttgctgagaatgatggtttcctgcttcatccatgtccctacaaaggacatgaactcatcattttttatggctgcatagtattccatggtgtatatgtgctacattttcttaatccagtccatcattgttggacatttgggttggttccaagtctttgctattgtgagtagtgccacaataaacatacatgtgcgtgtgtctttatagcagcatgatttataatcctttgggaatgggagaaaatttttgcaatgtactcatctgacaaagggctaatatccagaatctacaacgaactcaaacaaatttacaagaaaaaaacaaacaaccccatcaaaaagtgggtgaaggatatgaacaggcacttctcaaaagaagacatttatgcaaccaaaagacacatgaaaaaatgctcatcatcactggtcatcagagaaatgaaaatcaaagccacaatgagataccatctcacaccagttggaatggygatcattaaaaagtcaggaaacaacaggtgctggagaggatgtggagaaataggaacacttttatactgttggtgggactgtaaactagttcaaccatgtggaagacagtatggcaattcctcagagatctagaactagaaataccatttgacccagccatcccattactgggtatataccctctgcaatttttttttaaatagcaattatttttttgctcacatgtctgtggtttagttaggagtcagctgatccgagctatttagcagagcatctctattcaagctgtgggtctggccagctcagatctatgctcttttttcattctgagacccagaaccgtgggagcagccaccaagagtggaagattcttacaacagaagtgcaatagagcaagtcccactgcacaagtactttttaaacaatgtattttattttttagagcagtgttaggttcacagcaaatgtgagtaaaaagtataaagttcccatatatctctggatttgcacatggactcttttaatcaagattgttttaactatttttggttctttatacttccatacaagctttagcaccaatatgttgatttatttaaaaagaaaaaatacttttgggattttgatcaaaatttacgctaagtctgtagagcaattttgggagaatctaccacttaattggaaccttccaatccatgaatatggtatctctcttggttccttatgtttttttaaaattctcagaaatgtgttaaagatatttttctrcactgtcacgggttgcaaagtctctttattttttaatatttgtgtatatgtatccattgttcagactggattagttctgttgatctgcttttatattcaaggactctttcttctgcagtgcctgcactgctactaaccccagagtaagctttttattttagatatggtagtttttagtcatcagatttttatttttattttcttacttctgatgtctctgctgtgatttcctagctatcctcccattatatccaattttctttaaatctttcaaaaatatttatagtatctattttaaagttctcatctgcaaattctaacatctgaattatcttgggatctgttcattttactccttatttgtttgcctatctaattacttatttatgtcctgtttgttacctaagaatggtagatagtttgctgtaggtggtctggattatattgattggacttaaatggtattgaattttatcctggtaagcagttaaattaccggcgtgtccttctgaaactgtcattattgtcttatactttgttaggagggatctattttggcttatcagttatcttcatgtgtgtgccttactttgattttgatgtaatattcactactataacctgctctttctgaagcctcaactgcaactccactgcaggtgggccaggattccagaggttcccagcactggtcaacctctsacatttctgttcagctctcagccctgcatcaaccactcttttctagaccttacagagttttaccttgcaaatatgcaggccagccaatatccaaattctaacaggtactccccatatgaactctctggtacccttcctcacaaattccagatgagtcagcagcccagaactctaattcrggttcctcagttcaacaagactgcgatgctgtttggcctccacctctctgtgtcgggtctagaaaataaccaccaggcagaaagccaagacaaacatgagtctcacttctgtatttcttcgctatcaatgatcaaaatactgtgctggaaaaaatcactcatatatttttgtagtgttttgattgttttggcaggataccaagttaagtgccagttagtcagttgtggccagatgtggacgtgtttgtcatgagatgctggagactgaaatcacctttttgtctgctacatagtgtactttatactatgatctctgtccaggcagaattgtatcctgtttatagttgtatttctggcttctaatactgcacctgtcacagaatttgtacataaataataagtgagtgtgtgttgatttgactcatagtttggcccccatctggacactcattggttcatttaggatgttgccagatgacagtaaagtgagaaaatgctcatcaggcagctggtccaaagtttcctccaaaatgtggtcttgccttttctctattccacatgattcttagaaccccagaaacataaagctggaaggaagtagacctgagacctcagctatcccatagctctttttgaaccagtggggaaactgaggctctgagagggcaaggtgctcacccaacagctgcatgggaaatgagagccctacctagagcttggttctgcttacttctttccgtgttgtcttagtccattcttgcgttgctataaagaaatacctgagactggataatttataaagaaagagatttaattggctcatggttctgcaggttatacaggaaacgtaatgctatcacctgctaggcttctggggaggtctcaggaaacttatagtcatggcagaaggcaaaggggaagcaggcatgtcacatggcccgaactggaggaagagagagggggaggtgctatgcacttttaaatgaccagcttttaagagaactcactcactatagtaaggacagtaccaagagggatggtgctaaactatttgtgagaaatccgctcccatgatccagtcacctcccactacatcccacctccaacaatcggggttacattttagtgcagtctggcagggacacacatccaaactgtatcacatgtcttccttcacttatccctaagttcatttttttcaaaattgaaaagaaaatgttaaaagtcttacagtttcatttaaggtatatggtgaaatttctgaagagcaatggatgataggaaggcagataatacaatgtatactgggaatagagaagagaaaaattttgcccatgagaaacctttgggtagtgggctccaggaggaagatacttgagattcgtcagcatcttcagaatgtgcttttgggaattttcttgattcttattcaacccctggctggcagcagttaaaaatattgcaatgttactcatttttttgtggtaatatatttatgtggttcaaaaaatcaaaagaaagaaaaaggtacactgaaaattactctttttattccttatcctagccacacatttctcttccctggagattaccaatgttactctgtgtgtgtgtgtgtgtgtgtgtgtgtatgtgtgcgtgtacgtgtgtatgtgtatgtatatctttccaaaggtatttcatgtgtagattaatcaaaattaaatccccatcatattatcttctttttcttacataaattgtagcgtatttcaaaaactcttttggctttatttttttccacttaatgtatcttggatgtatttctgcattcagacataaagagcttcctcctttctcatagctctgggatattccattgtatgcacgcaccatcatttatttacttgggttctataggtgggcatttggattgctttcagttttttcctgttacaaacaatattgcaatgaattactttgagcaaacattatttcactgtgcaagcatatctttagcataattcctaggtctgagattgctaaacatttttaactttgatagatatggccaaattattctccataggggatgtaccaatttataggcctatcagctatgtgtgagagttgacatcagtttttattattatattttaagctggaaatcaccttacatatcacttttccatttctcttgtgctatgaatagggagtccagggctcagagatagaaccaaggtcacgctgatagtctgtttttgaggtggtcgtgaatctgggtatcctaactgtttagcctgagtgatcttgcataacctcagggtgcacagatgtgtactgtccctggcaaacatgtcatctcactgagtatcatcaactgggaggagtacatagaacctgtctcttagtacccaaagttctcagtaggggcttcttttttgggctgctacataatgtttgcttctcttaaaatcagggctaacatacccactgccaagccagttgtggcctgagaaaatctaagctgacatccaggcagggcagaacccacaattagatcctgtgggacttggggaaagggactatcttggcacctggacctcttcgggagcctgttgagagaagaacaatgtcattcaggattattttcctaatgagatacctcttgctgtcagaatgccctcatgcttggcatctcctgcatcacctttgtctcattagtccaggtaatgaatggcacagtatactgctcattttaaagtgggattcttgtgacatccctgcttccacttgaacacaatgttgggttatccaggcatcaaggggcagagggaagtttccacagtgaatgagagtcatgggctgtggagtcaggccacctgaacttgagtcttggttctatcagtggtagccatgtgcttttgagccaatgatttcatctgtcagcctcattttctccacttgttagagggggagagtagcttaaagctatactagataggatgcaggaggtaatgctgcagtaacaaacagccccataagtccgaggctagaaaaaaaaaagttcaatttgttcatattccttggcatttggatagggctctactctatacatgggatccaagatgtgctagttcattttgaatcactataaagaaatacctgagaatgaaaaatttataaagaaaagaggtttatttggctctgcatggttgtgtaagctgtatatgaagcatagtgccagcatttgcttctggtgagggcctcaggaggcttccaatcatggtggaaggcaaagggaaaccattatgtcacatggcaagagatggagcaagagagaggtggaggtgctgggctcttttaaacaaccagatctcatgtgaatggattaccacagggagagccttaagacattcatgagggatctgccccccatgacccaaacacctcccaccaggtcccacctcccacactggggattacttttcaacaagagatttgtagagggggcaaacattcaaactatatcattccacccctggaccccaaatatcatgtccttctcacatgcaaaacacattcatttcttcccagtagttccccaaagtcttaacttattagagcatccactcagaagtcaaaagttcatagtcttatctgagactcaaaacaagttccttccatccatgagcctacaataccaaaaacaagttatttatttcaaagatgcaatagtagtacaggattaggtaaacactgccattccagaagggagaaattggcccgaagaaaagggcaacaggccccatgcaagtctggaacccagcagggcaggcattaaatcttaaagctctaaaacaacctcctttgactctatgtcccatatctaaggcacattggtgcaaggggtgggctcccaaggccttgggcattcctgtccctgtggctttcttggacacagcccatgtggctgctctcatgggttggagttgagtaccttctgttttttcaggctcagagtacaagctgctggtggctctaccattctgggatctggagggcagtggccctcattcccacaattccactgtgcagtaccctggtggggaatctttgtgggggctccagccccacatttctccatggcactgctctagtagagtctctttgcagggctctgcccttgtggcaggccagagtgcaagagtgaaggatgcttaccagcttccacctagatttcagaggatgtatcagaaagcctgcattctgtgcacttgcaaacataacaccatgtggaagcttccaaggcttatggattgtgccctctgggctggcaacctgagctgtatctggggccctttgagccacagtgggagctggagcagccaggatatagggagcagtgtcctgaggctgggcagggcagaagggtcccatgcctggcccctaaaaccattctttcctcctatgcctctgggcctgtgatgggaggggctgkactgaggatctctgaaatggatttaaggcctttcccccattgtcttggctattagcccttgtctcccttttagtcatgctaatctctctagcaaatggtttctctatagcccacttgaattcctcttctgaaaaagttctttctttctctcccatatggccaggctgcagattttccaatgttatactttctgcttttcttttaattataagttctgaacttggtcactcctttgttcccacatctgatcataggctattagaagcagccaggccatatcttgaacactttgctgcttagaaatttattctgccagttaccctaagtcatcactcttaagttcaaccttccacagattcttagggcatgagcataatgcagccaagttttttgctagggtgtaacatgagtgacctttattctaktccctaataaatccttcatttccatctaagacctcatcagcctggccttcactgtccgtatttctatcagcattttggtcacaaccacttaacaagtctctaagacrttccaaactttccctcatctccctctctttttctgaaatctccaaactcttccagcctctgcccattaccagttcaaaaaccagttcaacatcttcaggtacttttatagcaacactccattcctggtaccaattttctgtgttagtccattttacattgctataaaggaatatctgaggttgggtaatttataaagaaaaaaggtctatttggctaatggttctacaggctgtacacaaagcatactggtagcatctatttctagcaagggccccaggaagcttccaataatggtggaaggcaaaagggagcctgcttgtcacatggcaagaaagggagcaagggagagagaagaaaagtcctaggctcttttaaataaccagatctatgtgaacttattactgcaaggaggccatcaagccattcrtgatggatccacccctatgaccgaaacaccttccaccaggtcccacctccaacactggagattacatttcaacatgagattctgtggaggggacaaacatccgtaacacactgcaagatgatagagcagccgccatctgtaactttgctggtgactatgacaaagaggaaaagaggatgtggggaactgagcactggccctttctgtcccgaaggaccttaggtcctttgtactcacattttaataaccaaagcaagctacaagcttggcatgcctctgagtttacattacaccatgtagtatttggattttcagttctctgaggcagaaacctctctgtacacctccacctggcagcctccatttgcagcacttgctgcccattctctctgctatggatgggatttggtgtcctctctctggcttgacctttaacagtgtaattctgctcgttaatgccaatgctagcaacattcctatggaggtaggcatgggtagtcatcacccatttcaggtgttgtaaaactgaaactgctagagactgtattccctaagatcacacagcaaatatatggaaaaagagggaagtacaatttattaagtaatacattcataatgtctttattatgatagggcactgaggccacagaatgttaagcaacttgttcaagccactyaggaggtagctatggaaagagaaagaccaagacagagacctacgggaaatgcaaagtggaacgtgtagagcatgcctgctatcttgggcccttaacacaagctgcaattttagccccaagtatacggtgtctatgtttctttctcttgggcagggaggagaatggccacaaggagggcctgtgtggaatttctagagaaatgagtcattgtgatgtggtgatatattaatctaactgagaaatctctctctccagtggaattttataggatgtcagttctcatgtggttctctttttcaagtagcttggctcataggacaccatgcttcctattagagtctatcctgtctgttcaatgtgggctgggggcaagaaaaatcttgaattttataatattttatattcttaaaatgataaaagaagactaatgacaactttgaactaataatcctgtcaccctagtacatccaaagtctctttgattttttgttttatccacataaatatgtatttggcatagataccatcagaagagagtaccattttatttcagttattttaaagttartgctatattacacatattttgcatatttctttatgacctttagcatttttataatttaataattgcatacaattttaaggagtgaatgtacctacctgtattggttttctatttttgcataagaaattaccacaaacttggcagcttaaaataatttatgatctcagagttctgtaggttagaaacctgggcatagcatggttggaatctcttcaatataacacaaagctggagtcaaggtgttagctgagctgaattttcatctggagacactggataaaaatctgcttcaagctcattgtgttttgattttcgagatggggtattgctgtgttgctcaggctggtctgaaactcctgagctcagctgatcctcttgcctcagcctcccccagtagctgagactaaaggcatacatcaccatgcctagctctaggctcatccttgttgctggttgaattctgatccttgtgatggtgggactgaaggccccatttctttgctggctattagccggtggccactctcagctcctagaggccacacacattctttgtcatgtgcttccttcatcttcaaagccaaaaatggagcctgtctctcaaataaaaatgttctgacaccacacatctctttcgccagaaggaatttccatcttttttaagagttcaccttactatgtcagatctactcagaataatctccctttcttagrgtcaagggtgccatgtaacataacctactcatgggaatgctatctcggcatatgcatgctcccaaggattatacagggcccgtataacaggatgaaaatgttaagagccaacagaattctaccaactcattatcttttcttaccattctattaatttcctagggctgctacaacaaagcaccacaaactgtgtgtggcaaaaaaaacaacaaacaaaaaaacaacacacagaaatttattcactcacagttctgsaggctaagagtctgacagcaaggtgttagcagggccagactccttttggaatctgaagggtaattcttccttgcctcttcctggcttttggaggttgcctggcaatctttggcatcctcgtcttgtagattcattactccagtcctctgtcttcacactgcattctccctgtttccctgtctgtgcatcttctcctataaagacaccagccaaattggattaaggccaaccctattccagtatagtgtttcatcttgaacagattacatctgcaacaaccctatttccaaataaggtaacattctgaggtactgagggttaggacttcaacatattcttttgggtggacacaattatatgacaatatgctgtaattgtatttttaggtatttcaagattctgtatggcacataattttgtaataatcattgttgattctgtaatagtttcagttatttctttatctagggagtccctagaatgagatctttgcacataacaattctttctaatgaagaaagaagaaactaaatttttaaaatgactgctatgtgccaggtgctgagatgcctatgtgcccatatgttttactttctatgctcaatacaaaatgttgagatattagcaacttttcacaggataaaaatactttaatgcagcaagtaacttgctcaaatgtacgtacctagyacatccactaatcaaggcccagcaaaaaaaaatacaaactccagatgtttcaaacagaaggaatttaatgtagggaattggttgcaaagatgagccaattcagagattaacaacaaacagaagctatggtgggaagtccagcattggcctgagatgctacaagaacatctgcctaaagaagagagggttagtggggagagagacagatagacacacacacacayacacacacacacacacacacamacavrgagagagagagagagataaagagagacaaagagagacagacagacacagacagacagacatacatgacctggagtctccctcctcctaatctcctaagagtgcatctagctgatcaaatcagaagccagctgaggagcttgggaaacctgttccccaccccctaatctccactccaacctctccccattatacagagcagaacagatcaagggcaaggaatctatctaatggtraacaggcctaggaccatcctagtccataatagtaagagtaatgttcataacataatcatatcaatagctaacatgtactaaatgcttattattatgtgacagacaactacagttattccctgatttcatcccagccttgagtcccccatgtgtctaagcatcttggaagagtagacataacagaaatgagaagccacaatagaagccaaggttgccatgaggactgcattaaatgagacaaggtaatgaggaagtgctttgcaagtctgagagcattgtgcaggtgacaagtgacatgattacaacagaccaaagctgcactttcacaggagtcttgatttgcacattatcattattattattgtaaggtcctctgagctagccacaccatggtcaagccatcgtgacattccctgtccttgtgataatgtactttgtgatattccctttccttgtgaatgtactttgtaacattcctccccaccctagtgacaatacacccccgcacctccccccaccccgcccttgtgaatgctgcctgcaaaaattgctcctaactccaccacctatcccaaacctataagaaccaacgataatcccaccacccttcgctgactcctttctcggactcagcccacttgcacccaagtgaataaacagccttgttgctcactctaagcctgctcaagtagccttttatatggacgtgtgtaacaattattattattattatttcgagatacaatttcactctttttgcccatgctggggtgcagtagtgcaatcttggctcagggcaacctctgcctcccgggttaaagtgattctcctgcctcagcctcctgagtagctgggattacaggcatgcaccaccatgcccagctgattttgtatttttagtagagatggggtttctccatgttggtcaggctggtctcgaacttccgacctcaggtgatctgcctgcctcaatctcccaaagtgctgggattacaggtatgagccaccacgcccggccgcatgttattatttttgatgctyatttggaatatgatttgaagtatgacaacaatcgaataggaaaggtattcatttcagtgtaggaagaaagtaaacagccaatacctggagcctctattctgtatcagcccctacatgaccctttccttcagagagctttgcagtctggggttatgcataattacagttcggtgtgatgggtgcataacagtgtgtgtgcagcatagggaagtagcagagaggcatgagggtttgttttgtctacctggggtcagagaaggcttcccaaattagttctgtcagaggatcagagaagaggggttttccagttaacaggatctgaatgtggaaggtagaaaggcccagaatggtatttagtttgccatggcacaagatggcatgcatgacatggaggtggactcartaggaaagcttgattatggaaagaattctgtatcaggaaaggaagtggaactttttttttttttttggatatcaacgccttccagctaaagaccattaggaacacacccatagttgaacaagttgggtttatgacttattgtagtgagggagaatgtacaccacagagaaccatggggtgtctcggcaagacagtgttaagggatttgggctttggatggatgattttgggagacatcaagggggtggagttttttctagattgagctgttaggaagtggggacaattctatgattgaatatctgaggaaacctaatctagaaggggataatagtagagcaagattaaagctataattggtagagttgcggcagccactcatttgagctggacaagaaagatacatggtattttgcgatttgcacagtgaccttggttttgtcttgcttagaaaaaaaaatatgaagtcatcttgttccttatcacttcactgtggctacagaatgacctgacctgatcttggtgttgtgtaagattgtttaggtccaataggggaacaaaatggcctgggtgagaaagttgggccagcttccaacaacatcaagttttagctgataggaccaaaccccggatgacaggagctgcttttctatttcttagagcacagtaggaagccgcagagagctcgtgtgcaggggcaagtagaggtggcatctggttttacaaagctctctaaggcacacgtgatgtttctataagtgactgttccttggattcttgtatggccttggataagttccttccctctttgagataagcttttctgtgtagtaaatggaaggagtgaggctagatggtctctaagcttcgtcttccaagagctgaggtttaataaataaaacctgggttgcagtaaaaggagcagaaagaggagcatcagttggatcatgagaactctrtgttgctgggcccactgcacatagctctgcctaccatagccaagaccacttttaggttggggttcaacttccattcaccccactcctggtaacaatgctctttctttacttttctcttatttccttttctgtctcttttttcttttctttcctcctttcttttctactatctttgtttttgttactcaacagaggaattttttttatggaaatagtcaatgaataggttttactggcttccagtgtgagctaattaaaggttcaaacagcacttccatagaattctggtgtgtctgtctctgtctctctctctctctctgtgtctctctttccctttctccacattcttattctctggccccacatggtcagatgaagtctgcagcagtactaatcccagcattctcccttatggatgaataaactatttatgattgcagttgggcagaattgggtcgtgtgtccatccctaaactatgggagtgggaargtagatatgctgattgacttaagctaatctgaacctactctgatcataccctgctgctggcaggataaatcccaaaccatatgggctggctatgggataggggtctttaagagaaatttgcgaaggtgcttaaccagaagaattgtgaattgaatttgagaggcaaaaacaaaactaagagatgttctcctcagggatgctcagggaagtataaactgtgttaggtagagcctttgaatcaagaagatctggttctagctctgccactgactttctaagggaacttgataaacrccaccttgctacctcttggcctctgtttcccacygtaggttaatggtgatagaacagtgttctcaaagttctgtagggctgtggatctttacaatactttccatgggcctgcattcattacaggacacagggcagccctcccaggggtgctggacggccactgtttatggagatgcactgaagtagattgttaagagttttgctccctttgctagggggaaaaggatccatgggggttcagtgtgtcaagggagctttgtcagatgcagtacagagaatgcattcaggactggaaacattcaaatgacttttcaccccagycttttaaagcctctgcagcaaggttgtggtttgccttccttgcaaccttgggctctctgcttcctctttattatccgtgttgatccctggagatgttaatgagcattgcacattgagaagatgargagaataccttctgggcccaacaacatggagacaccccaaacagctcaaagaatagctgtcagaataggcccrtcatgatacaagcaccaatagtggaggacaaagaacactctgttcaaagttcagcaacactcccacaggaggtgggaggatactcatgagggtggaacaggatgtgattggtgggtgcagactgtgattagcagctgtgggaaatttgaggttaagcaagtgtgacaagtgggaagtgggtaaacagagagggaggggctgggattagagtcgggttagggtaagggttaacctcggtgacgcggggctgcacacactcttacctgttttgccacttgatacctctatggccttgcgtatatctctctgaatctcagtgctcgtatctgtaaaatgggcagaaacaagaactctagatctagctgttccacagtacctttggggactcaaatacctccaaggtatggagcactgtagcaggctacttagtgtgaggactatgaaaacgatgacagcwgagctcgtgatccaagtgtcttcttggtgggacccttctaaatctttccctgggacaccayattctccaattgcggacatccagtctctataggattgcccacatcttgctctgccttggaatttgtgcacaccatttcaagtcctgagttcaccctggccatgcctgggagagactatgggatttgcaattctcaatgtaaaccccaggtccacttgtccctttttggggaatttcttctctccgctggctttcttttctgagctctgtgaggttgagcatatgctaaagagtcaatgaagagaagagtctctgagcctgaaatttgaaaagggggccctctaattacattgcaccatgacattttctcagtaacatcatttaagcatcccacggtagcacctatcattactgactaatctactgttgtgtgggttactaatgcctactgttacatcagtgaccttccctgcctttctctgattctggtttggataacttaccttgcagttccaggattttctccagaatgagcaggaatgactcacattactgccctaaaatcccgtggaaatgtatccccactctcttccttcccagtgtgataaatttgattataacttacggatggccactcatgactctgcggtggtttaaaatacaccgaaagattcattcgactaaactgagttgtcaggtggagagccagagggaattcttgttgcagacacaagttgtgttatgtctgctgtatgtagccttgtggcggctttcaaattgctgttgggaaataaatccattaatcagtgtggaccgcccccactggctctgcctggctataggctcctaggaggcagaatgtccatcttactccctcacctgtcttagtgtgtctgataatatgcccttgataattgatttttattttactttaacattacgctcctaaaaaataagatctccagttatagtaggtggaaatggcctcagagacctccttgtccagcccctagatgagggttctgagagccagagagggatggtgacttatcccaggccacacagaaagtcatcaaaaagctggaccaggccctggtttctgactcccagcccagggctctgacatccttttgtgcttttcttggctgctcctgttaacgagggatgcgaggaattctatttgggctttattctactgttttacagtctcttctgagtaataaggtcggcttgtttaataagttcagcttcaaagtaggtcagggattttatttctgtgcatgggccattagcattcttaagtgagaacacatttttttaaactgagaaaatatccgcggtgtagtcgaggcgctctgcgtctgtttcctaagccatgtcagatccttttataccacacagcttgtgtgaggggggcctgccagcctccaggcttcttgatgggggctgaggctcagtgggagggacaggagaggactgcctgctgtggagagaccccaggagctgcatcacacagagctcaggcgagaagggcaaggtgacttccgtgggcttctcaagctggtggtcacatcgaaatgaggtttgtgtttcgttttgtcagagataattttctgaaaaatccccaaacgctaggttagagatggtcgagtgctatgtcaagaaatctttcaaatctcttgtgacttaagtgctttsctggattcactgcccagtggccaagctggtagagaagaaatcaggggtcagggtctcactgctgttgtcagggagaaggatcaagacctggaaagatgggtaggtaggaaagcggcacatgacacgtcatctatttagggctgcttctgagaataatatcaattttatatttttagcaatgacccaaattagtttgtgggcttactttttttgtcaattgcttttaacctaaatgggactggtaacacaatcacagaaaaattttgtcgattcagaattcctttgtaaggcactgtacttggcgtagtgaggagtgcaagcatgattggccataatccctgccctgtgatgactctcttgtaggggaaaaagacacagacatgatactgacacaatgcagagggtaacaggactatgtagactacaaaggcttctagctgagtttcccacactaaagtctttcctgtgtccccttcatgagtttttcccatctgttctcttatgtgtttcatattattgctttttaaaaatgacacatgctttccttgatttttcaaatgagagtgcatattactatgatagaaggaagtctgtcttcttttacaagttaatgtacatttttgactattaaaataatttataagtaaatatccatgagtgtgcaccttatttaatctcatgtactgcactttggaacatgtcagggaggctgctggtctcctagaaggctttctcaagcagatgcaatattaacagggccttgaaggaagaaactatttcagcaggtgcaaaatgatcacatatacttgagatgtgatttggtgtatgtgaccatgtatatttcagatgtgatcagtgtaaatatgtgaggtggcattgttcagatgtgatcagtgtaaatatgtgaggtgtctcaatgcctaaggattccgtgggagtatagagtaagaggtaatgcactggtcccttgagactgtgctttttactcctttttaggttgtttgcaaagaaaacatcatgagactagatttcttctccatcgtctctcctcttcattgccaagtttttcaggcattattactacatcgttgttagttgtttgttgggttaatctatgcagagctatctgtaagcattagaaatccttcctgtatcccaagtcagggagaggcagataagaagggccatttatttgttcgttcattcattcattcattcattcattcatgtatgcattcattgttgcctctgatgctagagttagacacacagagatgcataagacatgaccacccaaagacccgggcggttggggaatcacctagaggccaagcatataatgagtgttcaggaaatctttggatgaatgaataaatgatgcctcccaatgtttctccaacttggctgcatattggagacaactagggaatttttgacaattttaacttcccgcatagattctgatttcattggtaagggttgagacctaagcattaggaactccaaaacttctctgcatgattctaatgtgcagccaagtttgaggccactggtgcaacccatgaagatattttttttagagtgggatagcttaatacaaaggacttttagtaaaagcagtacttggmccttagttggaaatggacttggagggacccaggcgtttgccatttaggtgtgggtacaatttagtcctttcagaggggtcctgtaagcattaagccctgcagttttcataatgacacacctcatttcttagagaggcccagtttatgcttcttgtctgtaaaggaactggttactttagcttttgaattgaccttaaaacccctaaatgtgctcacatcagccttctgggcagaacatcgatagttcagggtcaatcttgagtacacactagctgttgggaaaccttgttgggtttccaactaggaacatayaatcaaagttacatttcctttcctttaggggaatcaaaggtaggagaggaagttcatggggcaatttgaagagtccataaatgcctgcaagctgtgaagagctctataggaatgatacgattagagatcaattctttttttaaaaaaagttaatacttygggaaaattgctacattaaacctgtgtgttctttgttatatgtggctttaagcagattgctttactgattaagatctagatgaggctttaggcaagaattttaagagarctttgttattgcttatatgtgttcttcctcaatgaagaatgatggcaatttcactgagaccatcaatgtgccccattgaataggccaaggtatatctttgaagcagagcatgctttcaaattcacttctcattttattgtgtacatgcccacaaaggcgagttttttccatttttcctacttttttaccaccccattgatgaaataaagaagtagattttaggacgagctttattattaagtgatgcttcacgtgctggaacatttgaattaacaatccttgctgtgtgtgtgaagacccagtgtctgccccatggccgtgtctgttttgtattgagttccatgtgtgcaaacatccatccatatcttactgaccatttccttacyggttatcttcctttcgagtaatttgcaagttaatgtcttccttgatatcaggatcatagaatatacagaggaaatgtataaaatggccagaagttgcgcatgtttatttaccactgtaaaataaaacactgggttaaccaaatgtttggacacayttgaagtgcattaaaatgcctcctttgacwgtgtccttcmataacagtaacccgtatcctyttatgtttatctgaaacagattcagccacatcttctccaggcttttgcctactttctaagcttcaccttcaatggtgattctgaaactgatgttaaaggaagtgtcaagtttttctgtttctttttttgtttatttgttttgtttttttctctggtgcatccgcttgtacctttttattatattaacttcaagctaagacttttttaagacacaaaaaaagtctggtaatattaagctacattattagctatctatggagtatgtttgatgtcttagttgtctatgacctatgttacaaaataaagtgycttaagaaacatttattatctcacaagaatgccttaggagctttagtgcagcttgatagctggttctggctggagtcactcagaaggctgcaagcagggtgtctactggggctacagttgtctcagggcctgactaggataggatctgctcccaagctcgcagagctcctggctgtcttcagaagactcacttcaaagatcattcatggccgggcggggtggctcacacctgtaatcccagcacttcggaaggccaaagcaggtggatcatgaggtcaggagatgcagaccatcctggctaacatggtgaaacccagtctctacaaaaaatacaaaaaattagccgggtgtggtagcaggtgcctgtagtcccagctacttgggaggctgaggcaggagaatggtgtgaacccggggggaagagcttgcagtgagccgagatcatgccactgcactccagcctgggcgacagagcgaggctctgtctcaaaaaaaaaaaaaaataattcatgtggctattggaaggctttagaaccttgttagttgttggcttaaatatgtgtttctttatgaaaccactcatgacatggcagagagaggaaacagagaaaggagaacgggagagaggaggagggaaggagggagggagggaggaagcgaaacagaaagataaaaagggagagaagagggaggaggaagggggacaggaggagagaaatagaggaaaaaagagatcaggggaaagtgagaagaaggagaaagagagagatgattgggagatagaaaaagagagggtttaggggagagggaagaaaagggagggaagagcagaggaaaaggggaaagggaaggggaagagagaaggagagaggcaagtaaaatggtagacttagtgtaacagaatctcagaaatattatcacatcgcttttgctgtactstgctagaagcgagtcactaggtccagcccactctctaagtgatagggttacysaaggccatgaatgacaggaggagggagtcactgagggtcattgtagaggctggaggctgcaggctgccaataattggtctttaaatatcaccacagmagtgatggtcttatgcagatgttgccagattttcttgcatgagagatatcaagttttagcsctttgaagatttacagtagtaaaagtcacatattaagtatctaagtctatcttacattttccagattgacagctgcttactaatgaatcattaattgaacttggggtagtgatcccatcttcttccttgttaagttcaatgaagagactctgaaggacagtgctgtgttggatacatgcytcccagtttgtaggttgttccaaattgtatggtcttccatcttttccacagttttgagtatattctttaattttcttattttaaattaactattcatcatcctgaccgaaaacataatttttaaaatatcaaacttctaaaaaataaataccactaaaactttcaaaacaatccagacatatttttcagcatatctgttattcagaaactctatrgtaggaaatagaatcaagcrtagttgtgtgtttgtgaaccaaatatttgaytgaacaccatttcatcaggaatctgaatggatttgtgagctctgatayatttgagtataattaaaagtaaaaagttaatacagacctgacatcaaaagcatgatttctaactgaaaaattgataaattgaaccttattaaagttaaaatttttgctctgtgaaagctcaggcaaggaggatgaaaagataagctacagagtgaragaaaatatttgccaaccatatatatgacaaaggactaatgtctagaatatatcaagaattcttaaaactcaatgacaaaacaattagaaaatttgcaaaagatatgatgagatatttcaccctcccgcctcggcctcccaaagggctgggattacaggcatgagccacccccgcctggccatgcatgatctttgcagtgrgtcttctgaagacagccaggagctctgtgagcttggaagcagatcctatcctagtcaggccctgagaggactgtagccacagtagacaycctgtttgcagccttctgagtgaccccagccagaaccagctatcaagctgcactaggctgtacagatggcagataaacacttgaaaagatgttccatgctattagccattaaggtagtataaattaaaaccacagtgaaacatcactacatacttatcagaatggctaaaaagaaatagtgacaatagtagtacaggtgaggaactggaccactcatgcattgatrgtagtaatgtaaaatgatgtagccgctgtggaaagcagtttgatagttctgaattccatatgacccagagattgaactccaaggaatttaccccagaaaaatgaaaacttatgttcacacaaaaacctatacataactgttcatggcagttttattttaatagcaaaaacctgaaaatagcctagatgacccttaacgggagaatggttaaacaacattcaacacaacaatagacccatatgtatatcacatgtaaactacacagcaacaaaaataaatgaactatccgtgcacacaaaaacttggactaggccgggcatagtggctcatgcctgtaatcccagcactttaggaggccaaggcaggtggatcacgaggtcaggagatcgagaccatcctggctaacacagtgaaaccccgtctctactaaaaatacaaaaaattagccgggcatggtggcgggtgcctgtagtcccagctacttgagaggctgaggcaggagaatggcgtgaacctgggaggtggaggttgcagtgagctgagatcgcgccgctgcactccagcctgggcgacagagcgagactctggctcaaaaaaaaaaaaaaaagaaaataaaataaaagaaaaaaaacctggagtaatttccagggtatgatggcaggtgacaaaaacagtcccaagagattatatattgtctttttggaaataacaaaattttagaagtagaaaacagattggtggttcccagggatgaatgatgaggtggggaagtggggagggaggtggttgtggttctaaaggagtagcgtgagaaacccttgtggtccactttaatttccttatggattatagtttgcctaccccagggtcagaaacattctattttatataaatcttattgtttaccttttacatataggtctatagtaccctggaattgactttgtttatagtataaagtagggcacaatgttgaaggttattttttcatatggatgcctaaataatcctaattgttttgktgagaatacacttctcctaccacagtgaagtgtcagctgtatcacagatcaagtgattatcaatatgtggatttgtttcttgyctccattgtttcttgaactgtttttcaatttcttaattactgtagcttaatacctcattttcttaattattgtagcttaataataaatcttaatttcctaaaaggtaagctctctaactttcttttcctttttaaatattgctttgaatattcctggccttttgcatttttatataaacttcagaataagtttgtcaaattgtctagaaagcctgacagatattttattaggatagcttatacttcaacataaggagaatatacaactttacaatattgattcttctaattcatgagcatggaatatctctccatttatttggatctttaaaaatgtatcccagtaatgtctggcagttttcagtgaagaagaatacatgtatatacacatatgcacatataggtatatatacatccccagatattttaatactttgctggtgcttttgtaagtaattattcaatttgtttgttattgaagtagaacagaatgcagtaaaggacataaagtgcgttaaccttatgtggatagctcaatgtctttcatatacatgtacacccatattaccatcttccaaatcaaggtgtaaattattgtggtacctagtttcatcatgtttcttcccagtcgactactccttcccctagaggtcaccattattatgatgtctattaccattgattgggtaaatggcactttttaaatttcattttataattgtttatatttaatctatggaacttttctaaattaacttgttaatttttatcataatttgagatttttaaagaattttctacacacacaattatgtagtctatgaataatgaaagctttrttacttcatttccaacatttatttcttttatttctttttcttgcctcattgcattggstaaaactaccagtagaattggggaaatcagggaaaagtgtgtagtattttaccattgattatgatgttagagtaatgtgttagataccctttgtcagattataggactttccttytatttctagttttctaaaagttttatcatgaatggctgttgatttccatcaagtgcttcctcagcatctcttgagacaactatgtgatttttatctttcagtttgttaatatgatgagttatactgattgattttctaatattaaatcaatcttgtagtcccagcataaacttaatgtggttataacctgttattcattttatatatcacaggattggcttggtaatacaatatgtaggattttagtttacgtgtttacgagggagattggcctaaaagtttcatgtgatatctttgtgaagtcttggaatgaaagctatcctgggcttgtaaagtaagtttggaagtaattcttctctttggagtctctgaaataatttgtgtaaaggtgatatttcattgaaaccttttgtgtgtgttaaaattcaaacctacccaacaccttcaagcaggattttgttccaagatgttctagctaaagacttgctttctatgggcccttggaaatcactgtatatgtcattgagttcccygggcctatgcttgagaaatacatgaataagatgttagaaatacctagaacagtgcctgcaatgtcataaacaatatatttaccttttccttcctgtttcctcatgttctcttcctctacagaagcacctagaggcagtgacctgtggtagacaacagcatgaagccactaattctrttcttggagcccagcgtccatctggcttagtcagaatcatggcttttggagacagggacagaggtctatgggaccttgcagaattgtgttgtttygaagtcctttcccaaagagcagtgagttaggctgtgctaagtctctcttcaggcaagatacggcaggggcagaggcagccctaggggaatgagggaggatttggaagaagctcgtttttcagttcctttgcataagggagggygtcatctcttaaactcttcccacaaactgagtaggctctatggataagcctcttaatccatctggacaccccttcctgacacttcagagcagtcgatacttctagtcatttctagccatttcagcagcttacagactaattatgcatctccccccttgcacatagggataggccaaggagaagaatttgcaaaataacaatatctctaaagccacagacaccttctgcgtaagcctttctttctgtggctggtagcgtagcaactgacgaagcttcctggactcaggttgccctgaattgcatgtttcttccctcactccctaccaccccctttctctctactttgtcatcttgtcatatttgttctgctatggcagctactgtgtttttcctccagtgctttctgaaagtgagttgcctgtcctggtgggagattagtggctaccacatgcataaagctgacattgattttatcgaacgtgatacatgtgatgcatgagcccaagatgccctgagagctcagatgctcagagggggcatctcaggaggctagaggcgctgggctgaatggcccattacaggagaaggctgtggaatggggagaaagaccagtgcaggggtccaaagctaatagccatgggaagaaaggaataactcacgtttatgtagggcctgtcatttttcaggcacttacacttgatcttcacaaggacccagtgaggtatgaccatgaccctgattttacatgggaagaaactcagccacaagggagttatatcacttgcttaatgtcacaccattaaataatagagattgcaaggcaacctctgtctgacccagtgatcttttactttccagtacamctcacttccctttgtaagtgaaagtgaatatgaaaatgcaaagggatgaagtgtattgggcatagtttggagaagctagcatagagtactggggtactgcacagggaaattgaggtagacttccacttatgtgggctgcgcaggcattgtggaggtcaaggggagactcacccagcatgttgaacactagctttgtactggtccatatgccttgctccttacattcaatccatgaccaagtcctgtcctttcagtctcccaacccaaccctcggcctagttcctctgcctctgcctctccagccccgtggccattacttgagttatgcctccatcatttctttcctcartgtaattgacacaacttccttattggtccccctgtctgtttctctcccttagacccattattcaccgtgcactcagaggagttgtccctaaaactcttgtgcctacgtgacaccactgcttacacagcctcaggatgaagaccattcctgatcaggtcacttttgacctctctgattgcctttttgctggccccccacccctgctccccatcacctgtgtttcagcaggatataccatccgtgcatgacccagtcttgtctttgtgaataaccccacccttgtgcctgttagactctccttttcctttaagaccaagatcatgatttgattgctctaggaagccttccctaacatcctccatctaatttggatatctctccttgtattagtttttgattgctgctgtaaccaatcacaaagttagtggtctaagacaacacaaatttatgatcttatagcattggaggtcagaagtctaaaatgggtcagtggggctgtgttcctttgactctagggaagagtccattcccttgccttttgtagattctagacgtcaccagctttccctgcctagtggtccctttctccaccctcacagccagaacatagcatcttccaatcgctctctccgactctcctgcctcccttcttcacttatccaggatactacatatccaggatatgctccctactcaagatccttaacttaatcacagcttcagagtctatacaagttttggagtctatgtaagttttggggattaggaattgagcatcttttgggaccactattctgtgtatgatactgaaatgagagatttcccttatctcccttgcaggatgtgaaacgggtgtggctcrctccttcagttgcccactgtaccagaagaattggatcacatgtgggctcaaaggatgagtgcgaggttttatcvgtggaggtggctctcagtgagatggatggggagccagaaggggaggatggagtgggaaggtggtcttcccctggagttgggccgcccartggcagattcttatctgactgcctccagctgaacccccctcagcgtccagacatcctttctcttctgtctttctctgccacattgttccattgtcactggtctgctggttccaacgttcagccacttgtatgtgtgcccactaaggtcttgggtttatatggggacaggattggaggtatggtgggccaaaaggcaactttttgggtgcgaaaacagaaatgtctgtgctgacttagctctgtgggtcttcaggcttgagggtggggccyttactggggaaccaccctcttctacccagtgcttccctgtcttctgtctgtatcaataccacacaactgtgtgagtccacaggactctgggcctgccacttcccagcctgtatcactttcttctatagctcattggtttctgcatccttccctagtctcttagtctcctccagggtagagacagttatttgctttgactccacatccccaaacatagcagagtcagccctcattacttgttagttaggcagaatatgatatctcccagccttcatgtacctgcctcactgtgtcgctgaccagggtgctgagaacagtggggcatcagctcactgtgtgagttaaaatcatggcctctagagcaagacagcctgagtatcccagcacactcactaattagccacatgaccttgggcaatttgtaccttggtctcctcatgtgaaaaataaagataattataatacctattgatataaatcacrgtccaggagggaaaccctaaatcacaccaggtatttcaaacagagggttttwattgaagggaatccattacacagtgatgaaaggctgtcagtgcaaaagtgggaygctaaggtagccaaaaatggcaggaagtggtgaccacacctggggctggggtaacaaaatggaataggaggggttatggtacctagaagtctgtaggaggagcacagcagggctgattctgagacctctgaggagggagaccccacagattgtactgcagctgtaaggggcatggcctaggttmtattagttcyttcaraaagatactgtgccatgggtgctacaaagaccagaaaagatgaaggcctggagcgtagcagcccctgttgctggaatgatgctacaaggaccttgaagcagaaagagagcatcttcttccttcttccagcatcccagtctccatctgaagtctcccatcactaggactggaccaaagccagctggcaaggtagtttagagatgttgttagtggggtcccagctccagaattacataactgatgtaacagggtgggcttgaggcaaaaagaccagagctgaatactagcacactcctttagtytcctcatctataaatgcatactagaatagtacttactttccggtgtgatatgaggaataaatgaatttgtatgtaaatcccgaaatagagccaggcacgcagtgaacattatgagaatgttatttgtccttgctgygtgacagtaataataacagctctcaccatcctgtgggtgtacagacgtggttgtctctggaactcttaagatccaaactggataaggcaagagtttctttcaccccattcttcatagcagggctgcttggctgaggtgggggaggggagtgaagggtgcccatttgtgaacccatgctgccctggaacaaggtgctcctgaagcatggcctttgattccaaagctttagaatccagcttctcctagcccctyctttggaggtgacagactcttgattcatgctttctgaggactcctgattagcaggcaaggaaaggaaggctcttctagaatgwttactctgctcttaattttgggaagtggcccagcaaagagtaatcttgaaaatgttgaggttttgggggataarggggagccggggcagacagagtgttgcagatcataaaacttcatctggtgctaagttgttattgaattatgcatttctgaatgacttcactggttgcaacatgatgttgttaagtagactgaggctgagctcttaaatttatttgctggtaggagttttggcaggagtacacactgacatgactgtagactgtcttgatcctgacacaggaaggggaatgcrtttgatgggatctttctgtctctctgttgggggggcacaaaataagaatatcagttaaggctgtcactgacagctgaatggctcatcggtggctggttgrgaggatgatgatattagtagcaaagacagtttacttgttacgtgtaggaactgttctaaagtatcractataataatttatataatctttatggcaattaccatgaggaagatgttactatatccccagtttacaggtgaggcagtttagacacaaagaggttaagtaactttccctcgttttcataatatgttagactggatttccccaaaaaacagatcctttagcatggatttgcgaatagtttatctaagttgtagggaacactggtaaacaggagacgaagtgagactgagaagaaagaaagccccttaaagagtgcactatgggctgagcagggtggctcacgcctgtaatcccagcactttgggacactgaggcggrtggatcacaaggtcaggagatccagaccatcctggccaacatggtgaaaccccgtctctaccaaaaatayaaaaaattagccgggcatggtggcgcatgcctgtagcacctgtagttctagctactcaggaggctgaggcaggagaatcacttgaacccgggaggcggaggctgcrgtgagctgagatcgcgccactgcactccagcctgggtgacagagtgagactctgtctcaaaaaaaaaaaaaaaaaaaaaaaaaaaaaaaaaaaaaagagtgcactatgagctggaagtgctagaggatatctggtgctcagtcccacccaggaccatctaaaagactgaataaagccaccccattgtcccactaggggtcaaggaaacctggatgtttatccaccaacttccatccctcactgggtaagggctgctcctgggagtggtaacacctgggcttgcgggtaggtgggaagtgcaatgcctgtagccacagagcaggcggtattgacacagctgctttctaggtaaccttggtgtcctcatctgtaataagggtgtagtactgtctgctttgtgttgtcactatgkagagaaaaatgaggaaacaggtaaactactgtgtggttgcaatgattagaggattatctgaaagtcaagtgtcaaaactcacagtggaggtctttgagggggtcccagaggtagccaggatgtctccttgttagtgaactattggtgaggaacttgctgggaaaatggatgtaatcgtggttcttgactcctgctacctgggcagataggaggggagattgactgctaaacactcctagtgattgagagcagagaactgcaagagaggtcacatccagatgtaaaagcttgaaatatataaaaaccttacctatttcaaatgcttatatttataataagcaactgatgcaggtttactaggcatttgtaaaaaaatcaaataagaaacagaataaagaaaaaatagtacctatattctcataaccctaagaaaaacrtcagcgttttcatrtatttaaatctagatgttttaagcttaggtagatgagatttgtttgttgaatttagttcagcaaagtgaaggagagactttttcataggaatttatgatgtcccttttcaggatgatggccgaagctaaagttaaccgttcataatgaaattgcttgtttttaagcattccctaaatgctgtgtggatgaaaggcatgccattctgccccttcttacagattgggctatgtgttcacttcagtctggcacaagatcatgctcctcttctagactcacatctgagaaaggagggtcttgtggtagctaaccatctcataggactgatcmttcttatatcacaattcccctatgctagaggtcatgattttgattcatcacaaggcggactagggtaaatcttcaagcagtttttctctaagggaaggcatgcacatagcattttcttctctgcgttcttcagaaactgagagcattttttctgctggctttgaaaatgcaccacaactaacctcctataaaactcttgggactggaaacatcccccttaagaccttttgtgtataccattgtctttatcataatgtaccattgtctttatcataatggttaggagtgcagaccccgggcatgttgccttggcctcagtcctggattttgaatgactaactgtttgactttggatgggtatctacccacccataaagttgctgtgaagactaaatgaatcaatactgtagaacactaagggcagtcagaggtgtctgaaagtgtgcagtacatgggagctgccccatggtgttatttgtgattattctcatcatcctcttcctcatcacatcccagtgtttgaaactgtaatgataaagtctggaaccagagtttttagtctttttattttgttttgatagatatctgttattttttctgaaggcttatgggaatttttctttagttttatatttcaaaaatattgccagtatgtacttaagctsaagtctcatcattgattttgcctggaacccactgtgctcttcagagtctgcaaactcaggcctttgggtatttcagagaagttttctttacatatgtctttgattgttgctttctgtcagttgtttgatgtcttctctctaaatacttccaatcctttgcttagaggtgcattcagtattctctacaacatcgtacttcttgttctttttcatctctttgttgccaccctcaacctttcactttgggaaaacttatcaaatattttttctacccatttaagtaagacatcagatatttattgaccactggctgtatgtttggttagggcacaaagactaatttttttttttttgagacagagtctcgctgtgttgcccaggttggagtgcagtggcatgatcctggctcactgcaacctctgcctcccaggtccaagcgattctcctgcctcagcctcccgagtagctggaattacaagtgcttaccaccgtgcccagctaatttttagtagagacagggtttcaccatgttggtcaggctggtctcaaactcctgacctcaagtgatcctcctgccttggcctcccaatgtgctgggattacaggaatragtcaccrttcccagccaacaaagactaattctgattggcacctactggaggatttgatgctatatctacttaggttgtgtccaaggactgtgagcccaagccagggaagaatgagaaggctgggctactgccgattgctcactgttagggtagtyattsagtacacatagaatccctgtggcccttggtagagaaaatttagggacttttatgacttgaatctttcattgtcaaggtaaaataaatttgaggaccatgaagattgagtagagtcacacatctggctagtggtaagccaaggtcaaggaaagcttgaaccctggccccaaggtagtcctttttgatcctcagtccattattgtatgaaaacagtgttgcgcataaatygtagaaagtttaatcagcattgaacatctactctgtgcctagccctgtgctacacgaaagtaagtcgtcatgaagcagttttgaaaagaaaaataggcatggtttagttaaaagtaattgaaggctgggcatggtggctcaagcctgtaatcccagccctttgggaggctgaggagggtggatcacctgagataaggagtttgagacctgcctggcaaacatggagaaaccacgtctctactaaaagtacaaaaattagctggacgtggtgacaggtgcctgtaatcccagctacttgggagactgaggcaggaaaatcgcttgaacccaagagttggaggtttcagtgagccgagattgcaccactgcactccagcctgggtgacagggtgagactctgtctcaaaacaaaacaaaacaaaacaaaacaaaacaaaacaaaacaaaacaaaaaaaacaagtaaaaggaaagccattctagttgggaaaaatggcacagacaaaagtctggaaatgagaatggcacaaccgtgtttctgtctgtgtatgaatgtgtttgtgttggtggctagggttgggtgggtggaggcattcccacagacctggagggtcagtgaatagaaaatgcagttaaaagggtgatcaggtggggtgagacgtgtggtgtaaagtgttggaggctaggttacactcaccttaatcatatcaaggctcacttcacgtcttagtaacgtttggtttttctcaaaacgtttgatttctatctagagcagacagtacatgcgcacagctccatctccagctatttgaaacacttttactctctgtaggaatttctagggagtcaaactgttacaagtgctcacagcagggaaaagaaagacagaattgttctggagattgatgcctgaggatgtggcagaattacaggaaggggtcacttcaccatctacatgttgaaggagagccttggaagctcagggccgctrmtgcccaggtctcatggatggctcctggcatccttgtcctcgcagcrctttgatgcctggctggaaggcactgatgtcatctcccagctcagccctcagctccatgaaggcaagacttcctcctccttaatttagttgcaaactttgtgagcagagggtgctgtcagatgttaaacacttactcctggctttgcacagatgatggtgtggagtctgttaagagggcattggttgtgttagaagtgaaaagcctcatggataagaaactggtgtgtgcctgaacaacctcttgtttgaaaaactgttaggaattcaagcatctgatggtgctgataagagggaatggtataggagtaaaggctcattttctcccaattttctgaggttccctttcaggtaattagtggcattctcttcatccagtgagtcacatatccatatttttgttttttttaacttttaaggtatcacttatatgcataaaaatacttctgtttaaagttcacagtttaatgagttttacataaccccagttaagatacagaaatggttataacctcccaaatttttcttatgccttctttcaggcagtcatctcccttatagtaacactattttgatttctgttatttaattacccaaatcaatatatagagaacattctaacatcccagaaacttccctcaggctctgtcccggtcagtacctgcccctcaggtcactatgcttctggcttttatcaccatagagcagtttttcttgttcttgaacttttcacataagtggggtcatcatgcattcttttatttttcttttgcatgaatttttttgagatytactcatgttgttgtgtgtgtctgtgtctgcagcttgttcatttcttgctgagcagcgttccattgtgtatatgtgtatccctttatggatccataagctcttacctaggtctggctcccagggcctctctattctcgaatgccctccttctcaacagcttctgagtcagcttccttctctcctgacttctctttgtcaatcctcgagtgaaggctggaaggggagctccatgcagccaagattgtgtctgtgcctaggacagtgtgtgaccagcagcagggactcaacattcatagaacgagtgaatgaatgagtgtccagggcacatcgtttgaattgttgaccagtgtagcccaagcaactgagaactaggggacccccaggaatttttctttgttcatagactcaacatgagtggtcccagcagaacactcccctaagtgctctctgcaagagcttccctaacctctagaccagattgggtcctttcacaggcttcaaaactgcctctgccacccgcatcatgactttactacactttgttatcactgatttacttggctgcattaaatttcatgcgctcagtgctctgtctggcaaatgagatacacaggggtttccttttcctccctgctgactctagccattggactggatggccctgtacatttcctatactgtcttcttgaagrgttcatcttagagatagagaactgctataaatagatagggtttgtctatgtatttttaaaataatgtgctgcttaccaaaaacattctgtgctatatttttgcttctctctctttgaaccaccagtacctgtgccttctaaacaatgccaattatgaatcaatggatcactgaaaaaagaaagaataaagcacacaataatctgatggcttccttggtgccagatagaggaaacaccgtgataaacttacatggtctactcttgaggggatggagagagagataaccgtgaggctaatctgcacacaaatgtgtgaagtcgcaagtcatttgagatagggacatttatatactcaaggggatgtttgttactatacttgcacatgccattagaaatacatgaaaagaagctaaccatttggaaagatttaatactttattttctttctggtggtcagcaaytgaatactgctgtctgaaataggagagcagaaaaccatggtgaaaagtcaatggaaaagaactaaatggggccactcactcagcctccaaactattgaagtctgcaactcttaattctgtagaggtctagtctgtgaataattatattaaggaattgggcagagtcatcacagagctgcaaaatatcacccctggggcctcattggagactgatgggagctctggagagttgataatggcaatcaaaggttccatatatttaacatgcacaaaggatgagcttagaaattatctgcctgccaacctagcttctctacctggaacaaattatccaaaaatcaatttgcaaacacctttgagataacaaggtcttgagtaataacctccatggctttgtaaagaaaagcatctagcttgactaatctgcttaatttccttctctgaccaaatggcaggctataatagaggcaatctggagttgtcccttaagatttgcttcgagtcacactgagaaaatattgtccacccctgtttcatagcaattattctgtttctagagaatctttgcttctaggtaattaattggaagggaaatgcttagtgcgtctctatctcaaagcccttacctgagttccaagctaaaatgtatacctrccttctatccatgtgaataacccagaggccctctataagtgaaatattctcaaacaaatgcacattgtattctaccctcatatgcctcctctgtgcctgccctttctcctcttccttgttctactcttcatttcctcttgttcataccctttgacatataatcccattcctcgcagttggttctargaaaacatgagataagacagactgaagtctttgcacaaagatgttcattgcagcattatttaccatagcaaaacatgaacaactcatgggtccagcaatcagagaatagttagtgtgataacctgatggattgttatgcaaatattaaagacaatgatgataaagctcaagcagtatatgaaaaaaaaaatccttacaatataagtgaaggaagaaaaatgaatctacattgggtctatgtgttattataacaacacaaaaaatgtgtcagtacataaatattggaatggacatggaagaataaaaatggctatgttggatgttagagatattttctctttcttccatttttctccattttcttccatttcttctcatattttctctttcttccattttctttattgttctgccatttttactgcaaataaaaataacaaatatattcagtttgatttttttaaagatgagtattaagaggcagacagctttccttggtgcaagttggtccaggaaggcatgcggatataagttttatcctacactaccttctccatgaccttggttaggtgacctgatttcttaggttgtcagtttttttttttttccccattaaagttaaggtgataatgctgtcccaagaattacatgaatgatacgtgtgagattttaaagtacataagaagtacaaggtaagtgttaatttttgtagctttgccatgggctaataattgcaaggaagaggctacaatccaagcctgctgaacctctggtctacttagctgactgcgtggaactcagtggaagagaggtggcagcacagagtagatgcacgataactcagcacaacttttcctttaacccctcattcctgctgggtctgctgtgacccatgactttctctgctggaagaaacctgctggggttgaggcagaagctgaattcttgctgtgccatcattctttttctacttaggctcatatcactttttggaaagaacttcactmacaatctgtgtgttctatgtaagaaatgtttatagacctcaggctcccctggttttgtgccaaactttacttcagcaaaagcaggttttcctttgaggctagaaaacagagtattcacccagcagctttgctgtgttctgggaaaaccatttcctcacatggccttctttctttcatttctttaaatgaaggagataaggtaggcattgaatatagctattgaagaaatactgattcaggtacttacatgcaaacccttaaagtagggcatgaatgggatttaaaagggttttcaggccaggcrtgttggctcatgcctgtaatcccagcactttgggaggctgaggccagcggatcacctcaggtggtctggagttcaagaccagcctggccaacatggtgaaaccccatctgcactacaaatacaaaaattaaccagccgtggtggcaggtgcctgtaatcccagctacttgggaggctgaggcatgagaattgcttgaaccagggaggcagaggttgcagtgagccgaaatggccccactgcactccagcctgaatgacagagcaagactccatctcaaaaatataaaataaaaataataaaataaaacaaaaaggggtttctgactattttttttgtggctacatcaagaattctgtcccttgtcgtcatgtgcttgtagtctgctctgtaaatcatttgaatctgacagtcctttttgattgcttgtcttacagagcctcccacgcccattgctcccccagagctgctggctgtgggggccacatacctgtggatcaagccaaatgccaactccatcatcggggatggccccatcatcctgaaggaagtggaatatcgcaccaccacaggcacgtgggcagagacccacatagtcgactctcccaactataagctgtggcatctggaccccgaygttgagtatgagatccgagtgctcctcacacgaccaggtgaggggggtacgggaccgccagggcctcccctcaccaccaggaccaagtgtgcaggtaagattttttttttttcccaggctccattatgagaggctgtgctattgccaagactggcyttcctcttgccttcctgtgacagataattccgaattttctttgaatgtgaatgtgcttcctattgtggataaacaggatcaaggccttggggttttttttktttgtttgttttttagaggaccttcttgctgtggttgcatttctaggggctttctagctctgactgtgattctaagaacttcctgactttagctgggtcaygggaggttcctggatctaatagtgtttctgatgagacacactggctctgtgtcttccagaactcctggtgccatttgtatgtctgaggctttctaatgctaataatttctccgagggctcttggttttgtctctgggggccctggccgtgtttctctgagggttcctggctctgtttctctgagggctcctggctctggttgtgtctctgagggctcctggctctsactgtgccccgtgaacgcttcatttagactatgtccttgggggcttctggttttggttgtatctttaatgwgtttctaattctaacattgttcctgaggctccctgagctgggcctgtgacccttggttttgaaaattttcttgatggctcctggttctagaattgtctccgaggggcttctgttgccaaccatgtcttaaatgcctcctggctctgacagtatctctgaattgtttctggaactaccttagtccctaagagcttcctgcctctgtatcccctggaggctyctatccctacctaagagtctgggttgggactattcctctgaaggtcctctggattccactctatctctatgggttactgactacacctgtctctctgatattcctggatgccatgtaagagtttgctggctgagattgtgtctaagaggggagagattctctggatccaactgtgtcccaggcctcctggcttctactgcatttctaatcaggggctattggctaacaacatgtgtctcactgtacctctgagatgatctggctctggatgcaactcaagaaattaaactaacttgctctttatttgttgcaaattaccttatttatgttatatctttttttcacaccaagtaaacttttgctgtaagtacttacattttatatatgcacaaaggaatagagactcaatacttttaaactttttgtccaaagtcatagaatggccagtggtacggtcaggaattacacttagattttctgactctcagcttttgacttttggccacatcatgatgaataaaaragagagagagagagagagagcattgtatatacagctggggatgttctagtggaggcgggtgtggctcaggggagcaggcagcatgggtttcagaaaacaaagaggagtcactgagggcatctgggtggaggggaaggacccatcagtacaggaaccatggaacaaacagcaagggaaagtgcatacagctctgccatgacttgacatataggtgcctaaaaatcaccacactatgtcaagttacgaaatgaaaaccacagggattatggaaaaaatggggctaggggccatattcatacttccttagtgacacatcaaaaaagaggggaatctagtaaaactggtggcacaattttatgcacgtgaaatggctaagaaatgcatccatccaggtggaatattcctaacctgaacctcggaaatccaaaatgctccagaatctgaaacttactgagtgccaacacgataccaccaatgaagatgacattgttaacactgcagaaaaagtgcctgtagatgacatggcaagcattggtgatgagcttatggaaggactggagcagtatgcattcatagcagaacaggaaaccaggtcaatttataaaatcagagacgtctaagacaaaaatcattgttaatgaggcagatgactctggaggaaacatttttaaaagccatccagcagaatgcctctttatccctagaggatccacttcctggttcctcaactgcttctgatgtttgttctcacctaagaaaataaaatgtggtgtataggaacccttcatcaaagcacaacatcacagggagaggactgaaagccaggatgtttgttgctgacattcaccagctgatccaggtatctgctgagtctactgtgctgctcagttaacctgaacacattaatatttcacagtattaatgacatatcatttattcttttttactgttaagcacttatgtgtgaataagcttaagaagatgattgcttatcgatagcatatacatttggagtcaggaattatggtgatgacagacaagcacagagttgtccacgtaagtggctaagataattacacctctgctttctgatggttcgacatacaaaaacttggttcatgcacaacattatttaaaatattatgtaagattgcctacgatatatataaaacataaatgaattttgtgtttggacttgggtcccatccccaagatatcgtattaggtataggcaaatattctgaaattcaagaaaatctgaaatctgaaacgcttctggtcccaagcattttggataagggatgctcaacacagatggtatgttaccttgaaaaagacctgaagtttgctgtggaagtgggcatcagggaagttgcagcctgtgagtgacttgcagcctgtgagtgactgtgaagtggtggaaggaaagctgtctgaaattggggaaaaaggtgtggctcagaacacaggcagtgagctgacgggccaggtaggggttggaactgtgtgtgttgcatgtattcgtaggtggctcagttctgctgggtgcaggtttctccttcactaatgtttctcacatacaaaatcacacataagcaaatgcagaattcgtgttgtgctcaaattgccctttcatatattaattgggttggaacaaatttgcgttttcaaarcaagagttgtagtggaattagctgtaaccattcttaagtatctcagtggtgtatcgtggtagtatgtaacccaggtatttttgttgcttggaaatattccttgtaaggttattgaaccactatgctgaacagagatgccattttcttgattattttcaaaacaggcctttggtaaaattcctcattgaaacctgattatgaaacttactactttaaaaggacataatgatatgttactaaactgggtaataccttatctcagctttgcaatgcaatattcatccataaaaataattgatttgatcctgctgatgagacttctctctttccacagggtaaatgtaagagtttccagggtttttgatctttataaatgatattcaaagtactttagcagcccccgtggacttatttgctgatgatcatataatacattttgaaattcaatcgcaagatgatcatctcaataaagatttacagtctattgcaaactgttgccatgactgtgtaatggattttacatgttgaaaacacaataatctggctatcaatataaaaattatgagttggaatgcaattgtggtattttatttttaaaaaacgttggtgtttaagttacagctaaaatcttgaataattcacattttacaaaatgtgtcatcaagaagataatcttccttccygcatcgccactgatggtggaatgttttttgcctcgtaattaatttttaagagaattccagggctggtatctatttgtaggtggtgtttattggtgttggtagtctgagattttcctccttttcctattctattattaatcacgctggaaatgtactcattattttacaaaacagaaagtgagagagtatgtagagtggaaggtataatttctgcccagaggaatttacaggctgggttaggattccaacaaaacagcaaaaaaaggtaaaacataaaggcaagcattgaaatagcatgcttcatggaggaaaaacagcgtcagcatggaaagagaaatggtcttagaatcatcttgggcggtggttctcaaagtgtggtccctcgaccagcagcatcagtattgctatagactgaatacttgtgttcctttaaaattcatatgttgaaattctaaccctcgaaatgatgatattaggaggtggggcatttgggtactaattatgtcatcagggcagaatactgatgaatgagatcaatgcccttacaaaagaggccccaaaatgctccttcatgtcttctgccatgtgaggacccaggaaatgggccctcactagacacttaatctgctggcaccttgatattggacttkccagccctcagaactataaaaagtaaatttctgttgtttataagttacccagtctatggtattctgttactgcaacctagatggattaagacaaatattcccctgggaacttgttagaaatgcacattctcagacctgtcccccgacgtaataaatcagaaattctggggttgagcctagaaatttgctgtaaggattccactgagtgatgtcatttcatacccaagttttacactaacttatgtatagtgacaagccaacatggctctttggaaggatgttcattccatagcttggtctttgcagcagctctgagatgtagatgggaggaaaactgagactcagaatagttggatgaaggtcaccaatcggttaaatgctaggtctcttggccagagaaactcttcaccacaggacttgatggagtcttcagccctggggacctcctctgcccacaagtgtcctcttgagagtggcattgggtagtaaggaggttggtgactatggagatcagctgagaatgaataactactacacaaaagtttcactcctttctatcaaacatttacttagtcttttctttgtgccaaattctgtgctaggcactggtggcagaggttggcttagtaaggacatgctagtagcaggcagagacttggcagcagtaggctacaagcttgggcgtagcacaagaagatgctagagaggcaattcagctaaggcaggtggggatgcattctggctctgccagttttgagaggtcactgattaagaaaattctggggtactaagggaaggctatccttcccttaacccaaaggatacctcctccttaacccttaagggggagattgtcaagtgtttgcctgtagcgcagcatcccagcccagtaggctggagttcagagcaagactcccagccagttaaaccagaaactgtacagatgatcagataggaatcgagggatgtggggttgggagtagggagtcaaaggtgatactcccatgcttcagtttagatggctgagagatgagtggttgtattagtcagggttctttatagggacagaactaataggacagatgtatctataaaggaaagtttattaaggagtattgactcacacgatcacaaggtgaggtctaggctgtctacaaactgtggagaaaggaagccagtccgagtcccaaagctgaagaacttggagtctgatgtacaaggacaggaagcatccaatatgggagaaagatgtaggccagtagactaagccagtctagtctttacatgttctgcctgcttttattctggccatgctggcagctgattagattgtgttcacccagattgagggtgggtctgcctttcccagtccactgactcaaatgttaatcttctttggcaacaccctcacagacatacccaggaacaatgctttgcatccttcaatccaatcaagttgacactcattattaaccatcacagtggtgaaacaattttctgagccgaaaaacacaaaaggaaatgagctcaggtctgaatatgttgtgttggaggtgaagatgtatagcaggtgatgggaatatataaatctggagctcaggagagatcagcagataactgcctcttccatgcggactacctgatttcacttggactttaggatcaaagggacttcttagtactgatgaaagcaatttaagtctgtgtcttcatgctgttctgttgagataatccatttcttatatttttatttatcattttgtttcttttccttagtttaatcattcaccatctttcatgagatataggtatgagagcaaatgcgatcatgtatatcaaactcaaaatgttctttagctgcctatagtgaaccaaagtgttattggttgctgctattgttatggatgctatgattatgaataattatatcaaaacaggaagtcttccttgtccacttctcagaactaattggcatcttgaaggtggacccatattcttttgttgttcatcatctcctggaaaatcccatttcagagttcatgctgtggtctgggatctcagagactctcttgtctagagcattgtgtggtttcctccagcacatccccaacagcagactttctgtgataggagttgggtcttagaattgctgtgtgttgcccacccagcctcaccttgaatgctgcctctgatgggaagtttacactcttccatggcagaccatttcactgctggagatctcgggtggtgactattatcctctatccagtgttagcttggttatcgtacagctctggatggattatacacagagtgtccattaggtttaaaagagtgggggcagtaggcaggctgctagcattaactattgggagtccacagtgagaaccaagggcagtggatgccgaggtcagtaactggagaaagcaggtgaggtgacaagagatagggacaccacatgggtccaacttggccctgtacctctcctgcaggtaccactttcaatggcttgggtaccagcttgttggtgtcttaagactatcatctagcattagatagaagaagctcttcctcattgttaccctcaaataggcctccttgaaacacccacttgtaagttttgctcccaggttttcctcctcatctcaaaaacaggtcttcagccactcagttgtctcacttaatccccagacattgctttcttttatccccccaaacttcgcttgacgcagaccccaggccactccgattatagttacagaatcacaaatcaacaatccagcaagtcacgtaatcttagcccgtcccccttgcgtgtcaatcaaaggccccttgcctgggaacccacttcattgtagtcttgcggagtcccagctctccaagtgaaaagtggctttgtacagccagagacaccacatacgctgttgatttggagggctctcttcctattccctccacctgagggttgattgcatgttctattttatttacatatttatggatttctacttgcagtgatatgtgtctacctctctcttttctccagggggataaaaaagataaattcaaattgctgggctcaatgaagtgagagtagtcattagaattgaatgaaaaggatagaggctttagagccaaaaataatctggtttttatttcaagctgggcacttgctggctgggtgaccgggatgtgttacaccatctctctgtgactcaatttattttcttccatctaagggatattataatgcaccattttgttggaaagcttcagtgagataagttatatgccttgcagagaaccgggaacttaggrgccctttaataaacattatttagaaataaatcttaggcctggggaaaggatgtcagaacctgatttccttcactgtagcatgatggaccctgttttaagaaggatttctctagctgctactctgtgtactttcttagacagtggtggtttagcaacaagctctgatcactgctgagaaggtaagacatgtggctgtgtgcatgttgtggagtcctcgacgtgtagctgtgagggtatttcatgatatagggcacggggtaagggggatgggaattgtcctttttataattgtctctagtctcaggtaagagggagaaccatgttacgcagatgcttctctctttgaggaggccaaggcttgtaagaatgaggcctttcaagcccagagcaaaaagggattggaagtgaatccagacyctctgcaataagcagcctcaggtgrtctctgtgttctctgaaaagcctgtgggtcccacaggcaagggtctttcagggcaacatgcagttctaggacagagtagaggcagagaattataaaaagaggtaattgaaggtctagaaaatagaacagcatcacttaactagtctcgtgagtttttcttcttcatttctctatgccttggcggcaccatctataaaatgggaggaacataacttggcctaactcttagggttctgaattagaagtaaaatgggacatccttctgggcaggagggtagtatgaacacagacatctaacctccatctctgctgtactgtaattctggtgagatgatccataaatcttcggggaacatggaaacagtagccagtagaaatgaaaatggactcactatcccacccagaatcaaagccatagagttaatggattctaaagaccaatggagaaattttcaagaccatgaggatctagggaaggaggggactttcatgcatgccacaccatgctcgaagggacatagttgcttgtgcagtgcaggtgaacctagattgaaggcagtcacagaagatggattatgaccagcacttcctcaaaaagatgtggagaaagggttctggcagttcttgcatcacctaccgaacttgttttgctgctgctgcactctctgcttcctctgggttgtaggaccacggaagagagatgaaagctaaagaagggagaaaacctgctctgatcataytcggttatggagcctctgattgagacgccataagaattatctgggcacggcgtggtgactcacgcctgtaatcccagcactttgggaggccgaggcgggcggatcatgaggtcaggagatcgagaccatcctggccaacacagtgaaaccccatctctactaaaaatacaaaaaaaaaaaaaaaaaaaaaaaaaattagctgggcgtggtggcgggcgcctgtagtcccagctactcgggaggctgaggcaggagaatggcgtgaacccaggaggcggagcttgcagtgagccgagattgygccactgtactccagcctggacgacagagcgagactccgccttaaaaaaaaaaaaagaattatccgcagacggacaagcacctgtgagggcataagatgttcatctcctcttcttgcagaccctctctcccctcccactgtcgcacgatgtctactgttggcaccattggagtccctctcccttggcttaagaaagaggcaaaacataaagctctctctctttaaacctataattcataatcccagagactcacttcccctaacccatgaagtctcattattgtatgagctgactgtagtgctgggagggaagagtgagagtccgcttgggaacctcttagtgttctctggaagaaatagctggaagtccctcaggtcttctctgtagaaggtggcagtgtttattttgtatgcttattggttttgtagtcttagataaaattccaaagcaacaggaaaagccctattagacatccagttgcacttttagatttttctgccactccatgctccttagggagccagggcctcctagaagatgaagtgcaatagtgtaacttagcacctcgtttttaaaagggaaaaaatcaattgtttaactttttttctttccccccaccacctacttagctgtttaggaatgaaagtataatctttaccttctctccaccagacacttccaacacagcaagtctgtctaactatgtgttacttagaagttccagagactgaaacttgaagcaaaccaggcacatccagaattctatcccaataggagattgccaccatttacaacctcactctgcccatgatggcactagtgagacctccggatagataagaaatctgaaaagtcacatagaccctgcacttcctcgccctctcccctgcgtgcccttcactccaagccttcctttaaaagcctctgctttctgcctggaagcaaagtggcaccctgaggaaggagactgcactactgcccttcagctagctctggaataaagtcacttttctttctaccagatcttgctcttgttaattgaactccgcaagcagcaagcaactaaatctttattcagttacaatagtaagtcaacaagtaatccctcaacttcttctaaatttcagggttgaaatttgaagaaaaagtgagtcacagagaagcattaaagatagtaaaagctaacagtgtttatcaagctctctggatttttaaaaaatagcatcccaaatatattaaaattagagttcaatcactcttacagctctgtcacacttgagatgacaatgtaaagaaagtgtatgattatagtgatgaaaacagtggctgccaatttgaggggtatctactgtatgcaaggcttatagtgttgagcttgttttgaatattttacttgtaattcttgcagcaagcttgtgagggaggtataattcctccactcactgtctaggaggtaggtgacttgcccaaggccacacacttgctcaaatggcccggatgaaaatggaacccttaactgcacagctgcaaagctctagctcctgaaatccagaatcattatcaatgcataatgcaccatggcccagttgggtgttttccaggaatacactgatgaaaaatgttgaatattagaaaaactatggatgtaatgcctcatattagtaggccaaaaaataaaaatcatctgagcctctcaagagaggctaaaaagtaatttgaaaagattcagccttcattactgatcagaattcttagtaagctagaaatggaaaggcaccttcttatttccagaagaaaacgttcttatagcctcaatgcctaagagaataaacttaactgaaaaaacaagctattggaactactaaaagatttcaatgctatggtcagacacaaagcaaataaacaaaaataaatagccatatgccagtaataaccattataaaactataataaaatgtatcctattcttaaatgtaattacagtataaacacttaagtgtaagctaagaattgtgcagcatgtatatgaaaatacaaacayctacaaagttttattgaggatgagaaaacaagacctgaacaaatggccatatgtcatgttgttggattagcaaatttaatattgtgaggatagcaatccttcccaaattaattgatgggtttaatacagttctaatcaaaatcttaatgggattcattttgaaacttaaagtgatttaaaagttgatctgaaagaaaatacaggagaaagaagtcaagagcacttagaaaaagtgattggagggtttctctgtgaaatgtcaacatttgtaaaaactataataattaaagcccagaaatgaatacagtacatagcaaaactgactttaaaatttttttttgatgcatgaatgaaagtatatttttttaatttttgaaacataaaccctttcacaaaaataaataggcattcaaatatcccaaataaatttaaaagaaactcatacatatagagtgccaaccacgtgtcaggctctgggtagcactttacaagtatggaattttcataacaggtcctgtgtgattggtcttataaacaacttatgatgagatgttacataactaattttattttattttcttctttctttcagcctttattttttatttttatttttttattatactttaagttttacggtacatgtgcacaacgtgcaggtttgttacatatgtatacatgtgccatgttggtgtgctgcacccattaactcgtcatttaacattaggtatatctcctaatgctatccctccccctccccccaccccacaacaggccctggtgtgtgatgttccccctcctgtgtccatgtgttctcattgttcaattcccacctatgagtgagaacatgtggtgtttggttttttgtccttgcgagagtttgctgagaatgatgatttycagcttcatccatgtccctacaaaggacaggaactcatcattttttatggctgcatagtattccatggtgtatatgtgccacattttcttaatccagtctatcactgttggacatttgggttggttccaagtctgtgctattgtgattagtgccgcaataaacatacatgtgcatgtgtctttatagcagcatgttttataatcctttgggtatatacccagtaattggatggctgggtcaaatggtatttccagttctagatccctgaggaatcgccacactgtcttccacaatggttgaactagtttacagtcccaccaacagtgtaaaagtgttcctatttctccacatcctctccagcacctgttgtttcctgactttttaatgattgccattctaactggtgtgagatggtatctcattgtggttttgatttgcatttctctgatggccagtgatgatgagcattttttcacatcttttggctgcataaatgtcttcttttgagaagtgtctgttcatatcctttgcccacttttgatggggttgtttttttcttgtaaatttgtttgagttcattgtagattctggatattagccctttgtcagatgagtagattgcaaaaattttctcccattctgtaggttgcctgttcactctgatggtagtttcttttgctgtgcagaagctctttagtttaattagatcccatttgtcaattttggcttttgttgccattgcttttggtgttttagacatgaagtccttgcccatgcctatgtcctgaatggtattgcctaggttttcttctagggtttttgtggttttagatctaacatttaagtctttaatccatcttgaattaatttttgtgtaaggcgtgtaaggaggggatccagtttcagctttctacatatggctacccggttttcccaaaaccatttattaaatagggagtcatttccccatttcttgtttttgtcaggtttgtcaaagatcagatagttgtagatatgtggcattatttctgagggctctgttctgttccactggtgacttttaaaatttatatgacactttgggaggccagggcagaaggatcacttgagcccaggagttsaagaccagcctgggcaacatagcaggaccccagctttacaaaaataaaaaatttatatgaattgaaaattgcttatcaaatagtacatgattaataaattgtacatggtaagatactttgtaaaaaatagaatttattgcatatattaccatgtgctaattaaattatgggtagtttaaaaacttaaaaggcaaaactagaaaaaaataaagaaaatatcattcttttattgggagagactctcagttcattaaaagcaagcaaatacaccattgaggtcatggtttacacattttactacatagaaagacaagaaaaagaaaaatcttctatgccatgttaactaaaatcaaaaagcaggttagtaaactggtgtgggaaaacatgtgacaaaactgagaaaagggagataaaatatctttacacataaaaagctctaactttaaaatgtaatcacattgatagaaaaaaaggctaaaggcataaagaggtaattgctaaacaaaatatgaatagcaaaaagcgtattaaaaatgtccagtgttacagatgatcaaataaatgcattttatctatcatattacctacctatatattttttaaattgttaataagcagtattggtaaggaataacaaagcaggttcttacaggcatttctgcaggtaagttaactggtacagcatgttaagaggacaatttgctaattttttttctagcaaaataatcagagctgctcaaaagagagtttcagacagagatcatcactgcattatttataaggacaaagacttggaaatcacttaaatgcaccaacgattggagagtagttaagtaaattttggtgcacacacacagtggaattctatgctagtattgttacaaactgtttttgtggtatatgtatctaatggcatgggttaatgttcatgctgtaggaagttttaaaaaaaagagcctacaaaaccacgagtgtaagtaattactgtgtcagttttgtgaaatataaatacacagaccgcatatcagctggggccagtttaccagtgaaatctatgaagtattgaccagaactccccatttcaaattctgcacatggagatttcaaaaagagcacatgagcccctgttcactgcctgccctggattctagaacatcagtcaaattcttctggctcccctaactgaaccaaatgtggacctgggcccttccacaccaccctgccgaagccacataacaaaggctgtttcctgcagcagcaaacttctcttggtgtttggtgggactcaggcaaggggtcgcattgccgtcctgcccagcatagaactcatcctttctcagactttaaaagtcctttcaacaggcaagaaattttcacctctttctgtttcctccctcccaaattgcccacaggtgcagcaaagtcttctcattcaagttcctagagcagttcaactttctctagactctatttccaggcccctctttgtacatcttttgcactgaactgaacattaagtggggttgggggagggcggctcattctgagatcaaagtgtttctttgaatggaaacaacccttcttaaaatatgtattttaacctatctgcccttgggtataggtacagagacagacatgccatatatatgtctgtatattatgtatatatattcatgtatatatataaatacacacacacatacacacacacacacacacacatatattcaggtattgagactgtgggtcacaaaaatttatataatttagaaattgttgtacccattggagtcaaatgtgaatgtgaatgattgttataaattgtaaaacactctatatgagggtatttttattacagttagtgaatcattgacatttttggacagtacagaaacagtcccaaatttgctaagccctgagatgcaaaccaagcttcaagctcagtgttcaaatagagtaagggacagttaaatagggggtttgctttcagtcccatcagagttttaatgctagattcactccttaggatgctggacagccttgggcaattgcttgacctctgtgaatcagtttccccctctgttaattagtataatgctgcttacctcactggatagaaatacaggtcattaatattaatgatggctaataatgctctgcaaggcttaccccactgactttgcctgcaaacctataaccccatgaggtaggttttatcatgaccattactaccaaggccagagagatttagtgttttgctccaagtcacacagtttaggaagtagctgaggttggggcctactgagkccgattagagtcctgctctggacccagctgaccatagaactctaagtrcaatgcttagaacttagtaggtgcttagtaaattggagcytttggtactttaacacctaggggctcactttctctctcattatcaatatattacctacttatatgtttcaaactggtagtaaccagttttggcaaggaaygaagtaggctcttaacaggcatttctgcaggtgagttaactggtacaacatattaagaggacagtatgctatcttttttcagtttctctctcattacctaggccctaggccttcctcaccattaaaccccaaaaatcctcattgccatgagtctgaggggctagccctttgctgtgttcacaaagctcactctatcaagagcttggtatgcagcctcagccaaaatgatgcctgagccagaggaagccaagggcaccctgtccattgctggccattctggaacgcagaggtctccctgcagtgagaagaatgggagagttatcctgagcagtgagcccaaacctggcttggtgcagagaaaaagactctgcctgacagaaaagaggaaaaccagagtgtcagttgtttctaaatcccacccactattggcttgagccacaagtcatcctgagattcttgagatgaggtgtagcaggaggtgagagtgggagttagggggtctcgaaggtcaatgggaatccaccagagagtggttgtccatccaccacggccatgtagattttccttgatggggcttcttaatcattagaagcttgtaacttttccagccaacccttttcccacctgggcttagggcggaaaatggatgcagccactataactactctggtggtggctgccattttacttctttatcttcttcatctttatacttgaaaaaaagaggtagcacatttttgaaatttgaaagtaaccttttgaaaataggaaatgtatttcatattccaattaaatatatattttttgcttgtgtctattcccttttagtcactgacctcattctcatgtaatcatgctccatatgccctttagtctcattggtcactctacagcataaaataaatattttacagaaaagttttgtgtgaactagttaactcatcattgccctttacatgtccctttaaaagtcacttcgcaaaggaccttgttggtctagcttcctcctcctcactctccattttaaccatttaaaacactgtttacggctgggtgcggtggctcacacctgtaataccagcactttgggagtctggggcaggtggatcacaaggtcaggagttctagaccaggctggccaatatggtgaaacccgatctctactaaaatgcaaaaattagacgggcgtggtggcatgcgtctgtagtcccagctacttgggmggctgaggcaggagaatcacttaaacccaggaggcagaggttgcagtgagccgacatcatgccactgccctccagcctggacgacaaagtgagactctgtctcaagaaaaaataaaaacaaacaaacaaacaaaaaacactgtttaccaaacttaccctaattcatagttgtctacttatctgtgtgtgtatttgtttattacttgccctttccattagactatatactccccagggatcgttaccttgtctgttctggtcaccagtgcctggaatcatggatggcacctggagggatgcaataaataggtgttgcatgcatgaatgaatgttgtggagacaaatgtgtgcactggagaaaagttggaaaatcataaaaatatacacacaacaatgaaaagaatccaacaaagcatcactcagtgataacaactgttaccaagttggcttttttaatggtttcatgtcttatatttagctcattaactaatagagggtttgttttggtctttggtataaagggaagtttcaactttgtttttcagtatttaacctattattccagcaccgttgctggaataagcttacaataccccaaacagtgatggactggggagggagagtatgggagtttcttgggagggagaagggatggaagcttagagcctgacccaaagaagcttcacagctgtaagagaacctatcagagtgggtgccatatttacaaatcttctgaacttgtagacataatggtggagcagacaccctgttagggaaatttattttgggaggaaagctccagccccttccacgtggccagcaccacctgctcttgcatagcctttacagtacaatcttcctagagccctttataagcacaatttctattggtcctcacagtttccctgcgacttaattcagatgatcactgtcattttacacagggacactgaggctctgaggagtaaagtaattttccccaaatctcaaatctcgtaatagctgtgaaatagcatctcctgaccccagactcacctgactcctgccgtctgttcactacagaaggtttctatgtgctgtgaatcttggattaaccagacagcatgggggaaaggtggtggcgatgggatggaggaggcaagagctctgattaattgaattttttttatttgaaggttaagcagcgaatccatttaaacttgacccacactattttatataggactgtatatgaactaaacacaataaaattgagcccagaggaatatcccttagaaggaagaagtcaataacataacccttaattaccttttatagttggtacatggatttgactttccccgcacccaccccaaagcatttgaccaaagccatggcagcttagacatctaaagacctcccacaggctgggaaagaccatcccactgtcttgaatagattagactctaactccctgaggacagacctctgtgtctggctggcgcatctggtagtttgaagagtggatgagtgtacattcttaattaggtgtggctatcaaggtaacggtattctgtattatgggagtttagggttcagactgagtgtgcagtgggatgcctgtaatatgtcacacaaaatatcccaagaccatgacatttaattctggccacatattccaaagatagatgaaagatattacctaggagagcaccaggccctatggggatgagctattaaagctgtcatatgagcaggctggaggtgctgacccagatgttttttttgmgagttagagagttcctggtgcctggagctgttcaaacttctgctgtatatagtggaaaagttaaggcaggtattcacrtcttaatggcatttcgtagcaatgatgaaaaaaatatgttttcattattttattttggaagatacagaaaaacactaaaaaaggatgtaaaaagaaaccatgaaccccaccacatggagattatacaaaattttgagacatttctttccattagggtttacttttcttaatacagacagatatatctccctggacaaaactgagctaatatgtaaatgttgttgagtaacacactttaaaacaatgtataatgaatatttttctatgtactcaagtacctttttacttcaataaatgcaaatattaaattgaataatatataatagaattgaatagatatggtcttagtttttatggatcctgaatactaatgggggagacatacattacatttaatatagatacagaaatacagttttcattatttgcagatttcatatttgcaagtttatctactcactaaaatttatttgtaacaccaacatcagtactcttggttctctcccagtcattcacagacctgcacggaacagtgaaaacttttggttgcccagtgcacatattactagctggggtcagaggtagcactctgccttcttgtttcagctcccctactgtaaacgagtgtgcttttcatggtttatttagtgttatgtttttcacatttttgtgctgttggtgattttgctgctttaagtggcccccaagtgtagtgctgaagtgtcatctgatgttcctaagcgcaagaaggctgtgatgtgctttgcagagaaaataggtatattaaatgagctttgttcaggcctgagttacagggctgctggctgtcagttcaatgttaatgaattgacaaaatctgttaagtaagctgtctttaaacagaaacacacagaacaaggttatgtacataaacaaggttctatattaatcatttgacaaaagcattgtgagcagaggctcacaggaactgaactttgtatttctcctaggagccatgggttcaataktcagtaattcagtgcaactttagagaacattacttccaataagaagaatcagttagatatatgtacaagtcagtgatagagacatacatttgggttctttggctctagatataacwtaaaactgttaaaagataattttcaagaaaaggtaaaatcaaggtacttttcttaagaaaaggtaaaaaaaaaaaaaaggtaaacctcacagagatgtaaaaatgaacatgattgcatttaattcattaatgaagaaactggtgaggtgttacagccagtacagaggaaaattcaaaggtaagagatctgtatacttcaggaatatgcaaatggaagcaaaactagctttttttccttgagggagcaaggttgtccctcttcctgatcatggaaccatttgcatatctatggacaagaattattctgcattattatcagttatctacaatttccagagttgggaaacagctcccatagaatcagaatctgataacaaggaagcatgagctataaacaatgcagtttttcattgaagcacagatttttcccccccacaaagccatactaataaatgccatcaacctagataaagcatgtggagagacaagagaggccaatcccagggaatgccaccaccataaggttgggttgtgaagaaagagcctgaaaagaagaccatgaacgaacaactaaaagcaggaggaaaacaaggaagttgygatgccctcaggtcaacagcaaaactgaggatggagaaagtagccaactctgaaggattgagtaagaggtgctccaaagggtccccttggtgtattagtccgtcctcacactactataaagaactaccagacagtgggcaatttgtaaaggaaagaggtttaattgactccctgttccacagggcttaggaggcctcaggaaacctacaataatggtgggacaggaagtaaatacatcctttttcacatggtggcaggaagtagaagtgtggagcaaagggggaaaacccttataaaaccatcagatctcatgagaaatcactcaccrtcacaagaacaggatgggggcaaccactcccatgattcaattacctccacctggtcccaccctcgacacatggggattatgggaactacaattcaagatgatatttgggtggggacacagccaaaccatatcacttggatttgtcagtgttggagtgatgggtgacttggcattaacagatattaaaaatataagcaggcaaaagccagtgtcatatgataggtgaaaagggggtgagagagtggaggcattgttttgattacagtcttaatatactgttatatrgatgtacaattgatttcatcctaactttgatttccagacatgtaagtttttcctaatttttaaaagctgtaatcagcatcctgaaagatactaatatatgtgcacatatgtaatattttttcctggaataaattcctggaaccgtccttgctgggtcagtgagcattttcaagactttgagacagttcttcaaaaattgggtcagttttcaccctgccttcaacagtggatgagcagctttgtttatttggacatgcccatctatagctattatgagttgacattctgcctttattcttctctgttttcctgagacaataactctgcaaacaagtggtttggtgtttggagctgataatcaatggcttttatttcttatcactacttgtaagtctcaaccccctatttggagcggaatccattctctcccttactggcgttaacacatgtcaaatatttgcaggctcttatctttcctttaggcttggcttaggcaggctctgaatttttagcacctgacattttctctcccacatccatccctctattttccttagggctttcctatcttgcctcagcttttctccctcttaaggaagaaaaggccatgcctccatacctaagaacaatcccatctaccagggtcartagggagattttccacctttacctccctgtgrgctgcatgtcagctttatttttaaaataaaagctctrtccagctcatgtgcattgagaacttgcttcaaggatcatatgtccactgtttctcatctctgatttctgcacttgatggtatttcttagggctgtgtcctctgcccaattctctcttcattacacaaactcttcctagatgtcttacctgttccatgacttcaacaagacatgaatatatccccacttctgaacttcaagtycttatgcctgactacttttcctacctgttttctacctacctcaacattataggttgatgctgaaaatggtctactcctatttggtaaatagctactccaatttggtaaacatcatmctgtttgcccagatcagaaaaacctgagagtcatttggaatccacccctcaccatccttagcctttacacccaatcagccatactactgtgcatgttccctccttatcctttagatctgtttcttttttctccagttttactctcccattcacagatgtggcctgaggagtctttgctgccactattcattgaagtctcatgttttattttacacccataaccaaggtataaatatgagatctggtaaatttctttttttcttaaaaagatggagtcttgctctgtcacccaggctggagtgcagtggtgcaatctcggctcactgcaatctctgcctcccagtttcargtgattctcctgcctcagcctcccaagtagctgagattacaggggtgcactaccatgccyggccagtttttgtatttttaatagagacaaggtttcaccatgtttggccaggctggtctccaactcctgaactcaagtgatccacctgccttggcctcccaatgtgctgggattacaggcgtgagccactgcacccagctgagatctggcaaatttctaaggcagattattactattttttcttttccagtagatgatgatgtatttttaaatgtgatttaattttgctacttccatacctttccatttttggtccattgaaatggaccttttcagggtggaaggggtattacatgtctcattgctgataggatcaaatacaccatgatatgattggatccattgaattgtcattgctgaagaaggtctcgtgatgactaaatgggaaagtgaatttaaatgcatataacattaatgcaataagatataatctataaatttctcttcaatgcgggtagtagtgatattcttgccctgatgttagtgggctttgggaagccacaggatattccaaggagagtatgaccttccagatttaaactctcatctcactacttaccagctgtgtgaacctgagcaacttactaaasttctctgggctaattccttatctatacatttggaataactgtacccatctcagtgggctcctgtgaggctttaatgaacagatatgtagagagtcattcaaggtgcccagaacatgataggtacacaggaaaaatagttatccagcaaagctggtattgtctggatgtgttggacgtagtgcagtctgcaaagagataactctttcgcttgtccctacccctctctgtagtaaccatccgcttgaatagtttcgtgccctcaatgagtgggttctgggggtagagtggccctggatgtctggtgtgggatgttctcatttgtggccagttgctacttccttgttccactgcagctttttgagaggtcctccctaagttgcctgcctgcctgcctgtctgggacagtgttttttgttttttgytttttgttttcttcatccttgaatgcactgtgctagggagagccttcttgcatcattcttggacctttctaccagccttctcctcctgggtgctaattaccaacttcatgtccttgctgctgttcattctctatgggacagcaatggggagcatcccaacaccaaacctagcctgatttctccctcagtttacatagtttccatggcctctaacatcctgggagtgttgtcactacctttcctgccatttgaagccctgcaagagcttctccagcctcccctgtcctgtcctgctccctttctgcgccctttttccttattttactttgtggtcaggagatttcaggacttatggaaatgttttacggcctggaaaagcaatatgttgactcaaaaatgtaaaaagaatactgaataattgaagctaacaagaattcgttatctatgacatatgtgtctacatgcctttatagatattgtcaaatttactgttcaaaaaatttcattacacttaacgataaactgtgggttagttttcctcgcagatcaagaattcccaaaggaacaaagtgattagagaaaccacagacagtgataaattattaagttcttggaaaccaagtgatgttgaaaatgaaactattttttaaatagttcaaaataattttatgacaaaaatattccagttactctcaaaggtagaatgcaggtgtatcttaatacgctgtcagggagaattccacaactagactggcctgtgaagatcagacacatctgtgggcttctccttgacctccagccttccactccttagctgcctgctgccatgaatttgcacctgatgattgcaagatcatctacctttttctttttattatcactcaattctgtgatacttgatgctgtccttgataggctgtaagccatacaagactgaaggtgtgtgtattagtctgttctcatgctgctaataaagacatacccaagactaggtaatttataaagaaaagaggttgaattgactcacagttttgcaggacttaggaggcctcaggaaacttacaagcatggaaggggaagcaaacatgtccttcttcacatggtggcagcaaggagaagtgtagggcaagtgggggaaaagccccttataaaaccatcagatttcatgagaactcactaccatgagaacagcagcatgggggtaaccgcctctatggttcaataacctcccactgggtccctcccacgacatgtgagtactatgggaactacagttcaagatgagatttggttggggacatagccaaatcatatcagtctgttagtcttatttatctgctgggttcccagtacagagcacaggacttcacacatgatgtaggctgtcagtgctattaactggtagagcactggtcagtcctggaaagttatgatggagaaagagaatgctgggaaatttgccttttatgaggtccttagggttaggtctgagtgttgccagatccattctgattattctaccacatgcacctcatatgaactgaaggacacactgttcaggaaatctgcactaagtgatgtgacacaaagatgggggaggtgacacaaaggcagggactcacccttggcaaccatcaggcccttgatttggcctgctatcagaggcaccataggcatcaatgtcttcagtagcctcccagcagcaaagaaaggaatgtgatgagtaggattggttctgacagcacagattggagtttctaggagctctgggactcatgagtgaaggggagggggatgctctgagagggaaacaggaaatcagcaaccagtggcagaaagaatccagagagccacagcaatcataaccagatgcaggctggaaagttacaacaccctgcttcgtgcaccatccctcagcacattcctcagggtagtgatcacagtgtcttctaagctctggtacctcagtgcccagcatggtccagcattgagcaagtaagtactcaaggaggttctgttaaatgaatgaagggctacgtggtctaagcatgcaaatggcaatgtggattcagagcagataattccccttaaaggaatctctccaagtatcctgatttcataatgaatgtttaatagaccattttttttgtcatttgaatagaatagaaacaatatgtggcaggcattttacctacattctctacttattaatagcaattgaagatatagtatcatccatcttcctttttttttttgttttttttgtttgtttttgtttttgtttttttgaggtggagtctcgctctgttgcccaggctggagtgcagtggcaccatctcggctcactgcaacctccacctcccgggttcaagcaattctcatgcctcagcctcctgagtagctgggattgcaggcacacaccaccaagcccagctaattttttttagttttagtaaagatggggttttaccattttggccaggctgatcttgaactcctgacctcagatgatccacccacctcagcctcccaaagtgctgggattayaggcatgagccactgtgcctggccatattatcccttttttaaggatgagggtgaagcttggagaaggaagtcacttgtccatggtcacagagctaatgagtggcacacccaaaytttgaacctagatgaagcttccagtgtctctgctcagcaatacaacctgccttgaatatcattagtaatgttctagaaaaggcaactgctcaaggcacagaaacctcactgggcttgtaatcacagcaagtggattccagacctgcccctgcctctgtcccttaatgactgttgcttaatctctttgagcctcagctttctcatctgtaaaatgggaacaaaatatgactagctcatagatttgaaacagtcactaaatggaaaacatttgagaaaatatccatgacagttgttggtaagtagaagttaaacaaatgtccattgattctgacatttgagatcaatagggtatgcctatattttcttatatctgactttgacaagcaataggggtttggccatgtttgttaattcctatttattctagtttaatatatgtccgttgtcacattcaataccatcatttttagactttccatctgtaaaggcatttatctttttctctcacaataatatataccaaattcactttcctttatcaaaatgctttttgtttatagaaccctttataatctgacaccattcagatataagagccatttaattacacgtgtaaaataaactaaaggctactttattcactcacccatttgaaaagtgagtgaataaagtagcctttagtttattttgggggcctctctggagagcttcgccagagaaatggaggtctatgcacttcctcaagaattcaggtattgctggggtttcttaattgtgttcttttctcactgtgaacacataagatccaattgcatttgcctggccgttgtcattctttgacacactggcagagatgagtattttctccactgtggttgttttcctgagaacttaaaaatataggaaggaaattgctttttctcttctactttatctttgcataagtattcttgggcatctcagagcagcttaggagatgacctctgctttattgtccctgcagagccaagacagaaatgcaagcagcagagaataaaagcacttttcttgtgcatgctgagtctttcaacaaccctggcctctgtgactgtgtctkcctgtaactgtcaaggtgatgattgaaatgaatctgctggtcaattccagtttagtccaatccctgatttgaaaaggccccctctactgcagctgattgagcaattgtttttcatgattgatggaggtgacagatttattttagaaaatgaggtgatcctgatgagcccagggagatggaggagggcatatgtatgtgtgtgagattgcttgagggagggaggatactgccttgttaatagcatctggcagtgatttgtgcagaaacctcagtggtgcagaaggtcagttaaggaagtagtggacagggtattggaggttggttgggaaaacctggatttcaagtcctggttctgctgtttacttggacaagtttcttaatcattctgtgcttcatcacctgtaaaaaakgagccaagtggaagagactgctaaccaatatctgtttgtaccttcttacttcctgagatgggattatttttttctggcaatgatgtgagtgctaaaagactatgcccctcttgcagctgagtgtggtcatgtgaccaagtgttagccagtgagatgtaaagcagagtggtggagggtggggccttttggagagctctttataaggggaccacagttggagcaggctcttactgccctccttgtcttccccttgcctggataacatagacctgaggcaagtaagccttgcctgcatccaggagctaaggcaaggctctgattggctctgtgctgcagatgcttgagtgctatgcaaatgcaaagaggttctcttgttaactgcacctgggttgtctctccaaacatgagagagaagttgagggagggatatgtctgctctcaaccagcaaacactttttgcagtaaatcaagcataacttagggkctctttcaggaccttcccatactccccagagatgagggagttattactttaaccagcattcatatctttttctctgtgaggaatctatggatacrtttatagagatggactttcaccacataaatgtgtgcctccatgaacttggcttataggatgtggtgagaacatggagtgtatgattctgaaatcagactgccccagttataggtgagcaaagagagagatgagtgttctgcatggccatcaaggcatgtgatatggtttggctgtgtccccacccaaatctcatcttgaattgtagctcccacaattcccacgtgtcatgggagggatccagtgagaggtaattgaatcgtgggggcaggtctttcctttgctgttctcatgatagtgaataagcctcacgagatctgatggttttataaaaaggagttcctttgcacaagctctccctctttgcctgtcgccatccatgtaagatgtaacttgctcctccttgccttctgacataattgtgaggcctccccagccacgtggaactgtgagtccattaaacctctttccttggccgggcacagtggctcaggcctgtaatcctagcactttgggaggccgaggtgggcggatcacaaggtcatgagattgagaccatcctggctaacacrgtgaaaccccatctctactaaaaaatagaaaaaattagccaggcatggtggcaggtgcctgtagtcccagctactcgggaggctgaggcaggagaatggcatgaacccgggaggcrgagcttgcagtgagctgagattacaccactgcactccagcctgggcgacagagccagactctgtcaaaaaaaaaaaaaaaaaacaacgacaccaaaaaaaaaaatccyctttcctttagaaattacccactcttaggtatgtctttatcagtaacatgagaatggactgatacaggatgtgcccacctgcagggctgtggcctggcctccctccaagaagcatgatttacatagccttccacatgaatggtacaccttggagtcgaagagtacagtggcgctagacacgcaggggcctcagcacaggcatggaattgcagctgtagcggccttcttgggctgtgttttagtcacattcgggggcctagggcaactcttcatgtgggcagcttctcacttaatgatagaacctgctgtttctcttctgaaccttagcagctgccttcygattatctgtgtagtgattcaacacattccttgagagcatcaggctgctgaggccaactgtgttcctgtgatggcttctctctctgccgggcttggtttgctgggaggacagcagtagtcttgcagagctgagagggggatgtagagtaaggacaaagcaccccaacagccctttttgctgttaatgaagcatgttcgtgaaggaccccttgattgaagtgatggaggwgtctgttcttcttgagccattttttccttggatgcatttgtcttcaatatgacagccaataayccagtaaattaaacagcatgccccaaggcccagggtctttagaagagctctgtaaaaaccccagacaacctcaggggagccgtttccccagaggatcaggggaaagtgttttcacctaaagtctaaggaaagacccacttcagggccatttctaagctgctrtctccaaagtgtccttggttgccatcttgagtagggacgagaaatttccagcaaagcttacctcagagaagaaactcctgactttgttattacttaatgatttctcttaaccctgactgctgtagattcgacttgcagcatcttatgataaaagaagaagtcaggataaccagactgttcttttagttctgaaatctgagaggaacaggctactagagccttggtttaatgagcgtcagccggtatcacagacgctgtccctgttagcgggtttctgaagatgcagacacatcctccagccttgtgtctcccatgactcctttcacaagcgctgagggtggaatgctcaagtgcagagtctgtggaggtgaggtcatagggctgagagtggagacctaggtgtggaacttcctgaggatcwggctgattttacagcagagactcaggggaacttgcaaattggatggtttcatctattagctgtcacagctggacttccgggtaaagtgaatgtctgagaaattgaacctgaaacgtgcagtgggaatggattaagaggagctctgggctgttgacgggacaccaggggtacagcatatgaggggaccatttatttactttatttattcatgtattatttactgaatgctgctctgtgacagacactgtagtggagactggagatttagaggtgaacctggcatcctcccctgtgtcttagtagcccacactctcatcacaagaatggcaaagatatgaacctggggatgcaatacaagcatatcataactatcttagtcattggaggctgggcatggtggttcacacctgtaatcccaacacattggaggccagggtgggaggggtcacttgagcccaggagttggagaccagccctgacaacatagtgagaccccatctctacaaaacaatttttaaaaagtagctggccatggtaacacaccctgtagtcccagctactcaggaggctgaagtggaaggattgctcgagcccagtagattaaggctgcagtgaaccacgttcacgccactgcactgcagcctgagcgacagagcaaactccatctcaaaaaaaaaaaaaaaaaaaaaaaaaaaaaaaggctgtcttaggttgggatctctagatatagagcctgagataggagaacaggtacatgtgatttattgagggaggaacctgttgaggagggagggatgtgggtggggttgagtcagaatgtggtcaggttaagtatccccttagttttacccagaagctgaagcctatagtgcagcaccatccaacagaacttcctgtgaagatggcagtgttctgtatctgggctgataggagagtcaccagcgactcatggctactgagtactcaaaatgtaatttttggagttgaagaactgaaatattaattttatttaattttaatgaatttaaattgaaatatccacatatggccaatggctaccatattggaagtgcagctctagggctcggtggacaagtttcttccatcaagggccagagtaaatactttagatcttgtggcccagacgacctctgttgcaataactcaacttctgttgtagcaggaaagcagccatggacaattcaaaaaggaatggggtggctgtgttccaataacaatttacaaaagcaaatggagagctggatttggtccatggtccataaagcacactgaagagttgccccttccacatacattctgccaggggccagccttgcatagcctatgccagtttgcccttggccgtgggtcccctggagaagaatggtagtttctgggcaaagtgacacctaccagttgagggcattgcctggagcaagggaagggtgggtgggatgctgtgattcctgggcacctgacctcacagcaatggggatgggtatagtggctgggtaaggagaatctaggaggtacactacagtgtctactacaataatcaacaattctttttgtgtgttcactacaagccaggaagagtggtaggtgcttcacatggattcttttcattcagttatcaaaatagacctattgagaaagtaattgaagcatctccagcacatttctataaaactcactgagtttcatcacttcagttttgttggcttgtaaccaatgaccaagatatttattctgcctctctctctctgtcacccctccctacacacacacacacacacacacacacacacacacacacataaatacacatcccatctgaaacatacatatggtgctagtggcagtcatgtccttttttcctctgggtggctttcctctattcccagagacctccgtgacctgatctatctttgttgtagccgcctgtacttactctgactctccgtggtattttacagcccatatttccttcttcataggaaacccatctctccatgtgttatgttgggttccctcaaaaacagatcctgatttgggtgtaagtcatttccttcggaggtgatccctgaaaacacagtgaaggctcagggaagggaataaagaccaatgaagggtgtgttaatgggcaggttaccattgtggccaactgtggttcatccccactggaggccctgctggacacacatataccttagaaagttagggtatttatccacccattcccagccracattggatgagggtcgctcatggagtgttaacttcctaactcttccacacgacccagagttgagcacattccctcagggagagccccttcccctccattcagggagactcaaaaagcaggctgcctgtgacctccaggctgcaggtagggttttgtcagcctttgtcacactcctctgtcttgacttactagtagttctccaaacatggacttttctgacttagggatctatagccaaattctacagtgccatagactgcgtgacaaattgcactgtgaaggagaagttacagacttactaacttggggtgagaaaataaggaaaccacttcatgagccttggcttgtacttctgattgatgtagcaaggttctgaacttctctaggtctcagtttcttcctctgtataatgggagtgatggcaaggcttttactgtaccttcaatgagaaatggaagagcacatacttagtaatctgtgcaatacatatgaatataagttattgcttaaggactaagtgttgtgattaaggcaatgtaaatgaattgctgatcattatcccaggtctttaccttaatgtgtatgaatctggagctccttactcacagcctacctcccagaaagtccctgagtgctcctggggccaggctctggggttacactgaagaccactttgctgagtctctggactttgagggctcatgaccagagatgaggaagacccagggtcattaccctccatgcaaaacaccttattcttcattgcatcctatagcccctgtcccctgtatctgtgcccaaatacaagatgcacaggtaagagcctaacctagtgatgaagagcatattgataagagaaggggcatgaacatagacaaaggaaagccctgtactctgctttggaaacatgaagatcagtgcccaagacctggaaggctgtactgataaattgggaggggacttggatgatgttttcaggtatttcatctcagggacacattgcagagctttaagcagagagtgacatgtgttttgggaagtctctctggtttggagtgtaaggcggattagaaaaggtgagtctggaggctgcaggccctaagaggaggctgtcacaaaggtccaggtgacagagacaatgaggcctggatgagaacagggctgtaaacctgcacagcctgttgaaggctcagttgcagattgggattcttgggactttactgagaagtggcaagagtgcagttagggcccccttggttttctgcgggtctcttcaggcmcatcacacagcctggattttaagagcactgcatcatgaagagcacttcactccttcaatctgtggatcttgtgtttgctagaaggctttctttcctgatggtgttctctcttcccagagcaccttgtcaaagaaggagaaggagccataagctcagagaggaaggcagccagctcttgattcatgatgcctggcctggctgaaaagggaggtccatagaggcattatgctcaggcaaggggagggttgcaaccagtcgtataaagcagcttggtatgaggagctctcttatagtgtgcacaaagcaatgcatagtggttgtggcggaggctctgaagctgagctgcccagcttgaaatgcttgcccatcactaactgtaagcttgggtaaggtatttaaatttttgcaccttatattttcatcttgaaagtgaaggtagctgggcatggtggctcacacctgtgatcccagtgctttaggaggccaagttgggaggattgcttgagcccaggagcttgagaccagcatgggcaacgtagcaaaaccttgtctcaattaaaaaaaaatagctgagtgtggaggcatgtacctgtagtcctagctactcaggaggctgaggacaggagaatcacttgaacctgggaggttgaggctgcagtgagctgtgattgcaccactgcactccagcctaggtgacagaacaagaccctctctcaaaaaataaataaataaaataaagtaagggtaataacagcatgtacctcatgggtttttgtataaggaataaatgatacaatccatgtagaattttggcaaaatgcttattcaccaggtgttatcagcatgtatgaagaaaatagtatgtgtgaagtaatggaactggttgcatcagtcagctattgccataataatgctgcgtaacaawactcaatgtgcatcttggattaactagcaggtcagctggaactrgatggtctcaggtggcttcagctgggtgactccactttggtccacctggtctgacattcaataagctagcctggccttggggtgtcttctcgtggaagaagtagggatccaagagaagaagcagaaatgcacaagcactttttcaagcatccacttgcccacagtttgctgttgtcccattggccaaaacaagtcatgtggccaagcccagagtcaaagtgggaggaaactacccaattacaagtcaaatacagatccaaggagagcactaaatgtattcattaacacaatcaatatcactttggttttttacattaacctcccaaagtggggttaatccttgaggcaatactcatttcaacaatcctgctctcccactaactaattaggttattcttccttgggaattattggtattaaagagtgtaatactagttaccactcactgggtacctcattgatctcaggtatttaatgttcctacctccggaggctgttatgaggattaggtgggataatgtacatacagtccttagtttagctcagagtgagcacattgtattaactctacagattcacattattattcacattattatcattgttgtcaccatcaagattattactattccctatcttactccaaatgtaggcatttttatctccatttaacaaataagtcactgagactcagggaggtccataactctgtcaacgtcccacaactagtaaggatcagagctttctcagtcagttggaaaataacttggaaatagttggaagtcattcatatagtgtgatgtgaaagaatgatcattaatatgcagaaaatctaattctgagcccacacccaaggccctctagctttggcccaataacctgaactgctctgaagggtttccaggagtgtgtgaatcctcttcttagtggcagccttgcagaaacagaccatttggcactcacttgtctccccaggctgaattcccagacatattcaatattatctggacaggcacactgytggtgtaaacagtctggttgctgagttggatttaataaccttgtagttccctgcatctttcaaagcaagctctatgctctcccatctcagctccatgttagcctgtgagacaggtatctgggtcctcttggaagagggcactctaagacgcttagaagtcagtatgaggctgcatagtcaagatagagctgggactggaaactgggacttcaggctccaagcattgctccctctgtcracaccaggtcttgcctgggcatggaggtatcatatcatgcctctctagcctttgccttgcctctctttaccactcttggtctctgtggctgcttattccaactgcttaggttcttttccagggaatatcagtcataaatggctcatccaagccatttgcaagttctctgggtccactggaaagaattacattcagccttaatctggctcccagtgatggcaaagyatactcacagtgtttgtgtggatcacagacttagagggacttttccaaagtctgtaggctttggtttacagaaaagctgatgcctgacctatgatagagaccctcattaatgactctgtaaatgattttcaggcgagggagcgaggagacagagagaatgtataaagcccccatcaaagacaattcttgcagacctataattcttcaatatatcctatactctcagctctcactgctgcttattcatccagggttccaggctgttctcagtgcacactttatcagttcatgcaattacccttaggaaggcctctcacacatcgctagtgacagattagcacagtccttttggaaggaataggaaatgtgtatgaaaggtcttaaaaatggctcatgctctttaaaccagcaatcaatgctggagaaattatcctaaagaattaattcaaacctaggaaaatgctatatgcagggcaatttatggtagcaaaaattggaagcaacctaaattcccaacactatggtaatggcttagtaaatcatgaccatccacttagtggaatattatgcagcaattaaaatggtaattatagatgctattgggcaaccttaaacatgcttatgatataatgctaaataaataagccaggagacaccattgaacatacacaatgattaaaatcatgtaaaaatatgtgtttgtgttgtcattaatggtggggcccgaggaacaatccacatttcaaattcccagatggagtaagggtggtttccagctagaaagcaaaatctgactgacacagaggcagcccaggcaagctgaatggtgatcctcaatgtagatttaagtcttccactaatttcaaacatctctagacatttttttcccaatgcttattttcaatacttgtgttgattaragaagattctcgctgggtggcatggcaggtaatcctagcactttgggaggctgaggcggtggtcaggagttcgagaccagcctggccaacatggtgaaaacctatctctgctaaaaataaaaaaattagctgggcatggtaatgcacacctctaatcccagctactcgggaacctgaggcacgagaatcacttgaatccaaaggttgcagtgagccaagatcatgccacttccatccagcctgggcgacaaagcaagacactgtctcaaaaaaattttttttttttaaagaagtctctatacttaaagaytggtgcccagtgaatgaagttcccagtgaatggtaactagtgttacactctttataccaaacaatgtgactaaaatgtaagcaaaaatgtatagacaaagaatagattcatataactaccaataaaaaaataaattttactggtgcttatgaaatctctaatattctaatgtgtgggatttacacttcacgttggttcaagtaacacaaggtgcaacatgcccatttgattaagaacttgttagacttggtgagggcaggtacagaggtgtggtatgggcagaaaccagattgtagcrggtaaagaatgaactccatctgtgtagacaacacttttatgatgtttggctgtcaaaaggagatatcatataggtccatagctgctgacagatggcaggttaaaattcccagcttcattcgggttggggggagagggattttctggttattttgtaaagcagaagcggcgtagacaatttgaaatgctgacggaccatggccagagtaaaaagacaggtgcctggaaagaatggagtaagattaccaggaaggtagaagagagggatctaattaatgtctagataatttgtaaacactgaattataatacctaaaagagcatgtgaaatcttttgattggtttgtgtctcctagtgtcctgaaatttaggagcaatataacagacagggacatcaagaagagaaaaagtgggaaagcttggaaagcccagaagactgtgggctaaggaggagactttagggaaagttctctgggtgctttttagtgaaatgctgtaggctgtgctaggggaatgtaccctcctgtgtcccctacaaaatgattcgtgaaaggaatatgcttccttagagttgagacccaaggaatgctctgggaattgcggagagagcggattcagggccagaacagaggctgcatgcaaaggcagtggatggccagggcataggagactcagggctctggtttcaaattcaagtttcttactttaccacgaggaaaacagggaatgaggaagtgcattcgtcagctaaaatgggtgataagacagaacagaggcccaaagttacaattaaagcaagtgactaccagtgttccttgttctattatttcttagcttatttaaaaaaaaatgtaaatgccactgtcaggctgctacagagcacctgtgagtgggtaaaattgtattgtgactaaaataggctccttgtagaagaggtcaagtgtgcatttgggcctttttctgagctggttcagatttaaaggtcaacttgtccttctattggagacattaataacttaaagaaacaaatgggaaggttctttaaaatttatgtttgagttacaaaaatctatctgaaaccttataattaatgtgctatagcaatctctgttgcaagagattttttttctagtgtttgtttaaatatgtggtatttaaattggctctgccattttaattctccattaattcatgggtttatcttagacatctttctaaygtgtgggaaaacagtttataaacagagaagaaaattgaaattcaacctatatattatggattttttaattgcagaaacaatgtgactaaaatttaagcaaaaatgtttagacaaagaatagatttgtacaactaccaacaaaaaaataaagaaattttactggttcggtgcttattccattctgtcacttgtggcttgagtatgtatttgatttacttgtgctcaaacttgggtttgtactattttatatcctgcttttaaaaaagcacagcatagtcaggattcatttagtcataagtaagacagagggagattttatggacttgtgtaactgaaaatccattgttgggcccaactttagacttgaataatatgagtcatatrttctatccatagactcaagattaggatcagtttccccataatacatgtagagcaggagcgaagggtgagtatcttcaaaagcacacatccccatgtccacctgttttatgtttcgaccgctcaggcagggcaaagtagatgttcagccccgctaaatggacatcctgaartaagatttagataagcttcccagtctatcccaatctgttatactgagatgtcccattttccctcctttaattggcaacaaacctgtctcacctctggtctgggtgacaggtacatgggtgaggctatcaaactgagtaatggaatgtgtttatctatggatagaatcagtagtgtgctgataaaaataagccttgaattgtaatgtttgccaatttcctgggtgtaaatattcctactgtgactgatttctccctatcagtgtaaagttattgaatattgggttgggaagagatgtgcacaattggctcctgtgagtagatacaattcacccttctttatgtataacagaaattctctcatatagtgtacattcttatttatagagtgttttcatagatgcaagtttgatttttaaatctcagacctttaccctcttagctttgtcagtttggaggctggctaatatatttgcagttgctctttcttaaaattatttattcaatcaattattcatccttttctttaacaaatttgtattgaatgcctactgtgtgtcagatactttcttatgcactgggaactcagcagtgaatcaaaccaagtccctgttcttagaggagctgacaatcggtaaataaatattattcttcaggtgaaaatgatatgaaaaattttcagggaagggacagacagtaatgaaaggggaactgtggagaagagcgattttaagtaggatggttatggaaagcttctctgcacaaagaactgaatgaagtgagatagcaagccctttgaagatctgcaggaaccccattctgggttgagggagcaagcagcaattgcaaaggatgtgaggggggaacaagcttggcatatgtaaggatcagcaaggaggacaatgagccttgagtggtgctagcaacaaggagactggcaggagatgatgtcagaaagattgttaaggcccagatcacatagatccttgctggcaatggttaggactttggatttttagcccagtgagaaggagacagtggtgaaccattctggcttctaagtgaaacacgtagaccagtaattctcaaagcatagttccctgaccagcagtgtcagaataacctgakaacttgttgaaaatgcaaattattaggtcctcacttaaacctatggaatcagaaactctgggggtggcatccagcaatctaaatcttaggaaaccctcttggtgatgctgatgcatgatagacttggagacctcgactatggctgtgtgctctctctcctcattgtatccctccagagtcagaggcaccatcttccatgaaggtttgagtgctatatttcatcatatatatcaacactgttaggttcctgtaagaatatgakagaatccctacagttgatactttcaaaagccatcagatccacacatgctggaacttgcacatctcaccatcacttccatccttcatctccattttattttaattaattgattaattaattaattatttttgagttggagtctcactctgtcacccaggctggagtgcagtggtgtgatctcggctcactgcaacctccacctcctgaattcaagcaattctcctgcctcagcctcctgagtagctaagattacaagcatgcgtcaccatgcccagctaatttttgtatttttagtagagacagtgttttaccgtgttggccaggctggtctcaaactcctgatctcaagtgatgcccccacctcagcctccaaagtgttgggattacaggtgtgagccactgcatctggcccatctccattttaagatcctcccaatggcattcttaaagccattggtgattatatcacactcttcaccaaaggtttgcttctcccttgaacagttttatgaagtatatcctcattttggtaattttattttgtaaaatgattctatctgtttgaagtatagcaggaagagcagtttgcaacacagcatgaaggttatttaacttgtatgtaacgggtgtgaattgttccatgatactaagtttaaattattaagtatggctcagtccctacccacttcagacttttgccctcccttgaaactgtaaaagaatgccaggscttgggcaacctccatgcagccataataaacaacccttccycaggatttctggattgttttaccatgtataagagtaatcaagttcgaggttactgtagcctaatattattcaaattgtcggtcaactctattaatttcataagtacaattttttagaaatatattcagcattaactcggtgactttccttaaaagccaaagaaagagtcctcacagtctagtagttaataattagttcttatgagttatatataactacactgtatgcaagtccttaagattccaatgtggacactcagcttgcagaattcttggtgacgatatcaagctggcagtttacagatactattcagcaggtgttttgaactccatctggatctcrttctaccaactagacctagaattccattagctgaaagttggrtttttacttggtcttaaaacaaaaaataaaataaaatctaaggcttcaaaaaagagatgccacaaactgtatgtgtaattcagattctagcatttccaaatatgagaattattaccatggtatttgttcaaatgtaatcatctgagcatattactacacatatctgtgactcctattacaagcagttttagcaacaaaaataataacaatttttcaaggattataagttcatgtaattgcacatgggagaaaaatatggatgttaaagcctcttaaatgtggaaatgcagcacattgttgcctattatatttttcaggttcttgttcacgaatttcatcttaacctatattcttttttttcttcaattttgcccttttgtgcatagatttcaggaatataattaaccattgcatggaatttaaaatatttcttgatactggagttctctttgctatcaagtggttatttcaaattttatttacatagttattatttttcatctggggacacattcatttgttttcaatgtagttctaagtgtgactttccaaagtttatcatccatccattcatactgatttaaaataaaattaacttgttatgaaacctctcagaccaagaggatgcttgcctttctgaaaaatattttttttcagtatttctccatctagtgttcaaattagctctgagaaaccacaagcaagattaaaggtaattgactttaaactttccttttcattcagtcatccaaagattgtggatacctgctgtgtttcargcactgtgcwtggggctgaggattcaaagataagtaagaaatggaaatggctttggaactggaaataaaaaagacttaccttagatttcactttaatgtttgttttataatcaaactgaggtataataagtcaagttataatgatttgtttaaataatatgtttaactcccaaagcagactgcgttgcatgtgaatttacagtctggtcatatatacattttgaagcaaactcatctttttcatctctctaaaatgccagctattagactataatgcttcacataagcaggggttggggaagaaaaaagacatatttttcgtcttttttaaggtgcaaggaatctgaaatctttattttccattgacaatccttgattaattttaaaatgaaattagcatgcctgtaccttcctctacttgtcactataatgtagtctgtgctrcaaaacaaccctgaagttcagagattcaacacaatagaagttcattttataatcatgtgaagtctcatgtgggtctggtacctctcctgggaagctcttcttcaaacattggtgactcagggatttgggctgctttcatcttatagctctgtcatctctatcatggagctttcaaggcctctgtgacaaagaaagagagaaatagggggtagtgcaccaactcatacttacctcaacccagcaatgaacacacatcattaacgttcacagtcggtggaccagaagcagtcctgtggtctaccagaccagtcatgtttcatatttcagttttgttcctcatctcaagactgaattggcagttatcaagtaacccatcaaaccatatatataatattatatataattatatatataatatattatattattataatatatatattattatattatatatatattatatatatattatatatttataatatatatataatatatataatatatatattatatatatattatatatatataatatatataatataatatataatatattataatatattatatataattatatattatattatattattataatatattatatataattatatattatattatatataataattatattataatatattatagataattatatataataaattatattattataatatattaatattttattatatatatatatatatatatatatatatatattttcagagtcttgctgtgttgcccaggctggagggcagtggtgtaattacagctcactgtgacctccacctcccaggtacaagcaattctcgtgcctcagccaccagagtagctgggattacaggcgtgtgctaccacactcagctaatttttgtattttaagtaaagacaatgaggttttgcactgtctcgaactcctggcctcaagtgatcttcctgcctcagcctcccaaagtgctgggattacaggtgtgagcchtagctcctggcctgtcaaaccatattctaataaccattttctcctactgtcaacttacaacgaagtgttagattggggtttaaatggacactgctatgctatctagctatgcagtgtacatttcttaaaaactatgataccgttctccaagcacagtcatgtgtttttccaaasattgtttgctgtcatcattccagaagttatccatctatttgatcaaattccagtacataaaatatatttcaagttgctatattttagccagtctacttctgctctctggtgttaatagcatatacattttccaatgaatcaatttcagatggtttctattgcctttgaaatgaggatcttctcaaggacctagaatgttcagtgtaagctagaggggataaccagagattctttaagaataattcagagtttctccccaaactgagaggactgttttctccatatgtatagcaaatgaagatagatattggaatcattctcaaaaagcactcttattccatgaggcagagcttggctgggtacttcctaacttctactttgccaaatagatgtcctatttatgaatatttcacttgtttctagcttttataggtacatactgtgatgtgccacctggctatcccttcaagaaaggatttgttaccctagctgctgagactacagctagcaggctgctcttaagtgctagccctatgtcaggggtccctgagaccatccttaggcttgatgatttataaaaggactcacagaactcaggaaagctgctatactcatgttccagtttaatatagtaaaagatatatattaatatagtaaatattaataaatatagtaaaatatagtaaaattagtaatattacataaatttagtataatatataaaattagtaatacagtaaaaattagtaaacatagtaaatatagataatatagtaaaagaatacagattaacagtgaacggctggttttaaaagaagcataggatagtggccgggtgtggtggctcacgcctgtaaccccagcactttgggaggtcgaggtgagtggatcacaaagtcaggagttcgagaccagcctaaccaatatggtgaaatcccatctctactaaaaatgcaaaaattagccaggcctgtaatcccagctattaaggaggctgaggcaggagaatcgctggaatgcaggaggcagagattgcagtgagccaagatcgcaccactgcactgcagcctgggcgacagagtgagactccgtctcaaaaacaaaaaaacaaaacaacaacaacaacaaaaacagcataggagaaagcatgtgtgatcttggggttgtgccagcaatgcttcatcctctcagcaacagtgtgtgacaatgcataggaaggattgccaacaaggaagctcacctgagctttggtctctagggtttctactgggggctagtcacataggcctggggtacctccatgactgctcagtctccggcgtccaaccaatacagcatgaccagggccccaggtgaacaaaaacaggcattcaccataaatcacattgtttgcataaactatctggcatatcccaagaccccagatacacaaagacatttgtatcaggctaggtattccaaaggcttataggttatctcccaggatggtcaaggggccagtcttctctttaaaatgtgcagagtttgagtaccccaagtccactgggttaaccttgcacaagcttgcattcattcattcattcattcatttacacaagcttcttcaagaatcccctcagctttagagagttgccttgcccaagattgggctccttcctggggcagccaatgttcactgactcagagaatcaagagtttaaatgttttaccatttcatccccaaaacaggacaactcacattccagccttagagctccccagcaggttagctgaagatgttattgggcctacctcacagcttgacttctatttctgccccattcctgctaacttcccctattctgcatagctgttgaccccacggaaaccacttaaaacatctacatgctaaactctcagagtctgcttctcagggaacataacatgtggcaatatgtgaagctgaattgagtattttcatgtgtagatcattttgttacttctaaaagattatcttgatttaagtcttcaggaacatttttaactaattacatatagctctaaaattaatatggaaattgagtttagaaaaaaatgctttttcatagaatcccaatgtatttcatcaccaggtggtagagaagttcatccatctcaccccactctcgccagtgttagacttcatcctattgattgtagaccttctgtataagacaattggagttttcttcctgtttcctcaggttattagcttgacctcttttgataccattgcagatcttgtcaatatggccatatatctgagagtttgttcactggcacaattttattaggcgaggatttttttttctgtaatggtttcttgggtaagagtctcatcacttcatcataagtaagcttaggaggcctggggacaagattacttccatggtaccactcaccatggtagaagagacttcaatcactcagagaatatctgtggtgccaaactccacacatggttctttccatagttctgaggttattgatacttatccaagagcaacgctcttgatagtaacaacagacatgatgtcatgatggtcattgtgaattcacttaggcctgcatggcaatcgctaataaccctttgtttccatgccacctgtccagcaaatatttctgtttctttccctgtgtatcaggatttgtggataaataatgtatgattttaaattaaatgcattggatgaattaagttttgaaattaaggaaatttaaaaattgtctttaccttctgaatcaagcaacaccagagctgagaattggtgaatgaattagcaagctagcctgaaacccattcagctctttgttggggacctgaagtcatgtgttcatttcaactattcctcccatggtgagagggtggtggtgtgtggctctttcctttaccctccccccaagtcagggctgttgtattagtttatcattgctgctataacaaattaccatagacatagtggcttgaaaccacacaaatttattatcttctggccttctgggagtcagatgtctgaaatgggtttcactgggctaaaatcaaggtgttgcctggatgtgttggttctagaggttctrggacagaatctgtcggctgactttttctagctcctagaagctgtctgcactgcttggctcatggccccttcctctatcttcaaaggtagcagtgtagcatcttgacatctctctctgactctgaccctcttacctcccactttcatttacaaggacacttgtgattacactgagcccacccaaaaaatgaagaataatctccccatctcaagatctttagcttaattatatctgcaaagtcccttttgctaagtaaggtaacatattcacaggtctcaggggttgggatgcagacttctatggggacacccggcagtagaaatcacagctgagactctgtagcagttgtggactctaacgctaagagtatcatttttccccccattggtgtaggtgttcagcagtggctgttttgaatcatgcctggttcccatgtcgtttggatccttggcctattgccaggtcagttcccttattactactgcctggttctggatttgatcttctccctgttctttagaggtaacgtgtctgctttaagtcattgcttccttcataagctgcttgcttcttgcaggagacatctttgcactctgagtaccaagcagaccatcttaggacaaccctctcccccagaaaaattgagttctacaagtttggaggaacactcagaatatatcttcccccaaccaggcaacattagaaaacaagcaattgttggggcattatggtaggaaaatgtgtttgccaccagatcccattgtgtagaaatttccatttccatttagccacatttttctcctgttttcttctggctcacaggtgctcaatagcactcacctagttggttttgcacaagatactttgcggtatctctgcttagaatgtcacaccataaatgcagttgactgatctttgcattctttgacaactatagttccatctgctctatttagaaactaatgtaattacttaaactggagaagacagaactacttttgcagcaaagtcaaaacatgcatcaacactcgtctctataattacttcaccaggaaaaaaaaaaaaagcatcctcactggcttttcttacaaatgaagagagtcttccacagtaattggctacttactaagtaatatatgtcagatctgttcctcttaccataaatctagcctggccatctcaccctaggtgtcaagaagtcatgtagacaaaactcacatacttctgttgcatgacacagcattgaagaattatggccttttgagktaaatagatctgggtttgaatctttgactctgctactttcttgctaagtattactgggcaagaacaggggttggcaaactttttcagttaagggccagttagtaaatatgttagcatttgtggaccaaatggtctctgttgtaactactccactctgctgaaattgtgtcatacgtaaacaaatgggcatggatatgttccaactaaactttatttacaaaaataggttgaatttagcccatgggctgaattttgctgaatcttggacaagacacataaactctctaaacctcatataatattcataaagaatattaagagctaacttccagggtattgttaaaatttaatcagatattgtatattaagtgcttggaatagtacctgacacaaagtagatggtcaacataccttcaggtaaatggatggatagataggtggatggatgaataagaaggatggagagaggaagagaggtaaaaagaaagaaaaggaaggatcaaccatattaagattaaatatattgaacaatgatttgccagtttatgggagagagctctccctagctatagggataatggactgaatgaaactaattgagcaggtgactcatgttttgtcacgtggaatagagcaatagcgctatacaggtgagctgcagagacttgtggcatcacaaaaaaaaaggtggttgaaagcttctctgctgtcatctcccctgtcccactgaggagctattttctgtatcagaaccatcctaccttccctctgcctccttataacaacccactgtgactccagggagattattaaaatcccccacggaagtggaggcccagagttgcctatctcctgactccaytgcactcccatttgccttctttccccaccctgtgtgtcttgttaatgtccagatggggtgggggctgtgatggctcctaggccttagggttttaggtctgtttctgcaaatgactgacctgttctcccagttgtcccagcaggcattacggatggatgaaaccttgcctataaaagtgtgcatgtgcccaagaaaagacaagacttcacaatatttgagcaaatgacaagcattccccattcgttactgatcrtccttagaaacaaactgcagcggctcacactggagcatctggctgtaaaattttgtctctgaaacagactgtctcagattgcaactaaaatgttggagaagctttttttaaaaaaaaaatacgaaagacaggaaataaaactactccacaacactgaaaactagggctagaaattggagctttcttccaaaaataggacatggaattgttctgttgaagcctccgtagatgtgagctcaaatacaggtaaaaggaccgtttttgccttaccttgctaattattagtttagaaacaggacatggggccaggcatggtggctcatgcctgtaaccccagtgctttgggaggccaaggcagaaagattgcttgatgccaggagttcaagaccaacctaggtaacacagtgagacctcatctctacaaaaaaattaaaaaaattagctgggtgtggtagcatatacctgtagtcccagctacatgggcatgggaggttgaggcaagagggttgtttgatcccaggtgtgcgaggctgcaataagctctagcctaggtgaaagagaccctatctcttaaaaaaataaaaaataaaataaaatagaaagaaagaaagaaacatggaaaaacagtctgcctaccacattagtgctacttttcatgataaacatatgattaggtagtatgattaaatggatccagaattttatgagactttaagcatgaagaaaataaaatcgtaccaaaaatctgaaactcacacttttagaatctcctagatgtgcccggtcatcccgggcattgctttcagcagtatgttcattattcagacaaaaaaaagtaaaagatacagaaattgatgaccctttacaggagatcagagaggcccagtgtgataaggcttcacggtaatgtgtagctgtgatttaaatgaatgacagtggttctcatccagggaattctcattaagctcatattctgaaggcagagagttgaggttttggccaaggaacctgagaatttccttcactctcactgctagattggggacccaagaagtaacagatccttagtggtcaagtcgggccttaggaaggcctcccatggcctgggctattgtacagattcaactctcagccctgatgcaccatgatggattccacctgaccctctgtggctactcccagggggcccgtttctccgagctggctcaggccctgtgaatgtaggtcctctctgacttcttggaatcttgcaactaaagaggcctagctggggctggtcaaggcaggatgagaagtctagaagctaaaaagtgtagagggcaatgtagaaaaaaggagggtagcttgctgcatttagtagtgtactgaagaactgattttctacgcttgcaaaacagttccctttggttgttattgagcaaattttggaaacatgcaactgaatagggcagacatcctgtggccagtgggttcttagtctaatcagaaactcagctgtagagtggtaagtgttagaatggagatgtgtgcaagttcaaagggaacagagagcagagacttcttacctaagcttgaaggtaaggagaatcatctgaaaaatgggaagatcacctgtccaagtagcttaatgcagtggctgtatgactcagaatttccaagagatattcagtttttgatagcttttttttcttaaactagatgagcctcaaaatatatacaagtaatttgacttttatgtgaattttttaaatgtttggcttagaaaaatacggtcactgaaaacacaaaagctcgatagttagtctcatgctgttagctgatatcgaaaagtgtttagcatcaagacagccagtattgctggctctattctggttttggatggattgctggcatccattctgattttgatgaaaagttccattttgtagaaatgttctacaaaagttccatttctacaaaatggaacttttcatcaaaatcagaatggattaggtaaagcatatttgtgaacaagcactcaaggtaggaatatgtaaaataaatggactcatttcagtatatggcccttccttgtgagtgttcaaccattatcagattatcaatcactgattacctgatctccgagttgactgtttttctctctcattgtgttggttgatcctgtgcccatcaccacttgttgtttctaataatgttcctctgagaattatagactcacccacccatccatcacttgggtctctttacttctctgtgccctggtgttctgagattgagatgtggcatagccccagctacctctggagttgaggttgaagagagtggtaggggcagaggatgggagagggaagacagagactgacaaacagccactcagatggaggaacagtctgctacccagactcaatttcacagaaagaattaaagaaaaaaaaaaactagaaaaggttctggtatgtttcatatgctaggtgctctatatgtttcaattcacttcatagtacatacctattcattcctttattcgttctccctctttcatttttcttctttctgacacacgacttagcaaattaagtctttttaaatctctggtttatgcataataagaaygtgccccagagaaattaaacatcttctccaggaccctggagctagtagaggttaagctggacctcacagtgaggactttcagctccagaacccaactcctttgccattgtcccttgtcccatccattttactgcagttgcagaccactgattctgcagttatttgtggggccgctgtgtcagtgttcagctttttacctgctttgaaagaaagacatttaacagtgtcttgttaaagagaatgcttggacctgaccctgtctccttttcactttggctgccaggatgcctcaagccaaatttggaacttgactgtggtacctctggagtcccttagggctgacagatgtgtgcccttctggccaaggtgttcctcaccgtatatgctagtcctgactttttacgcttgtttgcattttgccattgtaggctgcctcaagccctttgtggaatgtggctgtgaataaataaataaatagctaactgaatacaaaatgtgttatgcatgtatccctaatgattgttaattaactatgatttgcagctgctcccatatttcccaccactcctggcccctcaaatctggatttctgaacatgcctggcgtttctcctttactctcttcagaacattcagaactgagttgggttatggggaccaagactctttccccatcctcatttcaacctaagcagttctgaatagtttgtgcctttgacacacttctcccaaagtgctacttgaggtctagccttttacttttaaaaatcgttaawttttttcaatagtttgagcacctcaataaatgcattgggctacttkcaatgttaataactcatgctgttctaaccttatgttcctgataaaggaattctctgccgtttaaggctctgggatgaataayagctgagtgtttctattgtcctcttaaaatggagattactatatgttgaatcacaacagaactacttttttatagactgtgaatagcatacagktccatcatgttgttgcaggcagcgccaacagaatggataatggcaagccaattattataaataatgccttgtttccctttggcccctgtgcaaatttcacagagcaggattctatgaaaggctggtaggttaagttaaatatgacagtgttcaccccagcacctaggacartgcctggtacaagtcatggcttcatgctagctgaatcagaatctgagttcagcagggttttttktttttktttgtttgtttgtttgttgctattgttttgttttccttcgtggggctggggcaggtgtggcagggtatgagctcaggtgtattgcagagctcctagacagatgagcagaatactgtttggtgaggctggttgcagtagaaccaaaggaggaagaaaacagaaagggacattctagcagagcaaatggggctaaggttagcctgagagaagagccaaggctgggtgtgggaacacaagtccaggactcagagttcaggaaaatcaggagtctcctgaagtatgggtatggagttggctaaaacaaggggtcccagaagaagcacrtggatgaagtgaatatgccagagtttctgccgggtgggatgttgacatgctttgyaaaaattccaataactcgaaggccctagcagaatgakgccatgtccctcaggcctctcacatggagatggaataagcactgaattctatcaccatttcatcccattccgtagagtttaaccttgagaaagtgtaactattctctctaaaccttagtatccttgttttaaaaatgaaggtgctgaaacaggagagttccctgcttcccccacatgacatgtgacaggggtatgcctctctgttcagctgccacaagctcaaaccccttacgggagggggagcacacagacaggcaggtttaggagccagggcaaggactttggcctctggccccctggttgtctctaagggtgggtgtctgcgactcctgaagcccagcgggcatgttacagcatgctcttttggctttgcaatctgcagacagctaaagttaaccagctcagtgccctcttggcacccgggttcttgtttggagtctaggaagaatgaggctgcacatggacttaaagagtgaatgtgggggtctttttgagtggtggaggtggctctccgtgggatggatggggagctagagggggaatggagtgggaagatgattttccttcttttctcttcttctctgctgccccattttgccattcgtccgtgcatttctttctggagcctggggttcagggtttatatggatgcaagatagggggacatagcaggccaaaaggcaactttttggatgcaaaaacaggaatgcctgttctcactgagggctgtgggtttcttggcttgaaggtggggggcctttgcccgggaactgccttcttcaaaccagtatttccctatctcctgtccgtatcagtgctggactccatgttctgtaagatccatgcagtttttttaccccaggctaacatgcattttgaagccatgaacttttctgtttctaatcttgttttttatttcgacatctattgttctacactgacttctatttaacatccagctactgtactagcaattgtaattccacccaacaatggagccaaagaccaagctgagtggattgtgggaagtataatttaatgtaaatgcctcccttaaaatttaagtctggccgggcacggtggctcatgcctgtaatgccagcactttgggaagtcaaggtgggtggaacaggaggtcaggagattgagaccatcctggctaacaaggtgaaaccccgtctctactaaaaatacaaaaaattagccggcatgttggcgggtgcctgtagtcccagctactcgggaggctgaggcaggagaatggcatgaacccaggaggtggagcttgcagtgagccgagatsgcgccactgcactccagcctgggcagcagagtgagactccgtctcaaaaaaaaaaaaaatttaagtccatagagaaaaagctacatgtactccaaagctagcattacacaaatcaatgtcatacccatgattttcagtaggcagtctccatatgccaggacactggtagaggaacaatatattttctaaggtagaggcatattcaaatttaattcatgttaaggagagccctgtcctttaggatgtaggtgtgcagaacggttagcaaagtgtcaaggaaatttgaatctgagagtactttttagagaactatgaaatacttcaggtgactgtcctgacctctctcatttcacctctgcttttcttaaccctgccaaaggggtctttgcccttcctaagtccatcactcagcctactgctattagctgttctctttcataactattattggatgtaggtcacccatgggagatgtaatattagagaggaatgtgggcatctgcaatttaggagaaaaaagtagactggaagtagacatttgagagtcaccaggatctaggtagtagtttaattcatagtactagatgagatcagaaagagaagggaaagagcttgaaaacaatgccaagaaatgcaaccattgaacatctagggagtggccagcacagcaaatccagaaggaaaactgagaggctataggatcactcagaagccaaggaattccatatttaaaggaggatgaggtcaatggcattgtatgcttgccaagcggccccttaagagggcaatggaggaatccatggcaggagaatttacaatccacaggtgatggcaagagtctgatagaatgggttgaggacaagaaaagtggagataacttatttttctcttttgatgaatttggctatgtggtggggacaggaggttgttggagagacctggagataagagctatgggtgttcttgagggaaaagatttggacatgtttaaatgctaatggaaaggagccagtggagatggggaggttgaagacagaagcaagagggtaattggtgtgggcaaggcccgaggagctggagggcaggcgatctagagcccagggggaaggatgcaccttgctttaggacagggcagagggggaaagaaaggaggcaggtgatatggtttggctctttgtccccacccaaatctcatcttgcagctcccataattcccacttgttgagggagggacctggtgggagatgattgaatcatgggggtgggtctttcccatgctgttctcctgatagtgaatgggtctcatgagatctgatggttttaaaaacgaaagtttcgggggaggagccaagatggccgaataggaacacctccggtctacagctcccagcgtgagcgatgcagaagacgggtgttttctgcatttccatctgaggtaccgggtttatctcactagggagtgccagacagtgggcgcaggccagtgggtgcgcgcaccgtgcgcaagccgaagcagggcgaggcattgcctcacttgggaagtgcaaggggtcagggagttccctttcgaagtcaaagaaaggggtgactgacgcacctggaaaattgggtcactcccacccgaatattgcgcttttcagaccggcttaaaaaacagcaaaccacgagattatatcccacacctggctcggagggtcctacgcccacggaatctcgctgactgctagcacagcagtctgagatcaaactgcaaggcgacaacgaggctgggggaggggcgcccgccattgcccaggcttgcttaggtaaacaaagcagccaggaagctcgaactgggtggagcccaccacagctctaggaggcctgcctgcctctgtaggctccacctctgggggcagggcacagacaaacaaaaagacagcagtaacctctacagacttaagtgtccctgtctgacagctttgaagagagcagtggttctcccagcacgcagctggagatctcagaataggcagactgcctcctcaagtgggtccctgacccctgacccccgagcagcctaactgggaggcaccccccagcaggggcacactgacacctcacamggcagggtattccaacagacctgcagctgagggtcctgtctgttagaaggaaaactaacaaacagaaaggacatccacaccgaaaacccatctgtacatcaccatcatcaaagaccaaaagtagataaaaccacaaagatggggaaaaaacagaacagaaaaactggaaattctaaaacgcagagcgcctctcctcctccaaaggaacgcagttcctcaccagcaacggaacaaagctggatgcagaatgactttgacgagctgagagaagaaggcttcagaygatcaaattactctgagctacgggaggacattcaaaccaaaggcaaagaagttgaaaactttgaaaaaaatttagaagaatgtataactagaataaccaatacagagaagtgcttaaaggagctgatggagctgaaaaccaaggctcgagaactacgtgaagaatgcagaagcctcaggagnnnnnnnnnnnnnnnnnnnnnnnnnnnnnnnnnnnnnnnnnnnnnnnnnnnnnnnnnnnnnnnnnnnnnnnnnnnnnnnnnnnnnnnnnnnnnnnnnnnnnnnnnnnnnnnnnnnnnnnnnnnnnnnnnnnnnnnnnnnnnnnnnnnnnnnnnnnnnnnnnnnnnnnnnnnnnnnnnnnnnnnnnnnnnnnnnnnnnnnnnnnnnnnnnnnnnnnnnnnnnnnnnnnnnnnnnnnnnnnnnnnnnnnnnnnnnnnnnnnnnnnnnnnnnnnnnnnnnnnnnnnnnnnnnnnnnnnnnnnnnnnnnnnnnnnnnnnnnnnnnnnnnnnnnnnnnnnnnnnnnnnnnnnnnnnnnnnnnnnnnnnnnnnnnnnnnnnnnnnnnnnnnnnnnnnnnnnnnnnnnnnnnnnnnnnnnnnnnnnnnnnnnnnnnnnnnnnnnnnnnnnnnnnnnnnnnnnnnnnnnnnnnnnnnnnnnnnnnnnnnnnnnnnnnnnnnnnnnnnnnnnnnnnnnnnnnnnnnnnnnnnnnnnnnnnnnnnnnnnnnnnnnnnnnnnnnnnnnnnnnnnnnnnnnnnnnnnnnnnnnnnnnnnnnnnnnnnnnnnnnnnnnnnnnnnnnnnnnnnnnnnnnnnnnnnnnnnnnnnnnnnnnnnnnnnnnnnnnnnnnnnnnnnnnnnnnnnnnnnnnnnnnnnnnnnnnnnnnnnnnnnnnnnnnnnnnnnnnnnnnnnnnnnnnnnnnnnnnnnnnnnnnnnnnnnnnnnnnnnnnnnnnnnnnnnnnnnnnnnnnnnnnnnnnnnnnnnnnnnnnnnnnnnnnnnnnnnnnnnnnnnnnnnnnnnnnnnnnnnnnnnnnnnnnnnnnnnnnnnnnnnnnnnnnnnnnnnnnnnnnnnnnnacagggatgccctctctcaccactcctattcaacatagtgttggaagttctggccagggcaatgaggcaggagaaggaaataaagggtattcaattaggaaaagaggaagtcaaattgtccctgtttgcagatgacatgattgtatatctagaaaaccccattgtctcagcccaaaatctccttaagctgttaagcaacttcagcaaattctcaggatacaaaatcaatgtacaaaaatcacaagcattcttatacaccaacaacagacaaacagagagccaaatcatgagtgaactcccattcacaattgcttcaaagagaataaaatacctaggaatccaacttacaagggatgtgaaggacctcttcaaggagaactacaaaccactgctcaaggaaataaaagaggatacaaacaaatggaagaacattccatgctcatgggtaggaagaatcaatattgtgaaaatggccatactgcccaaggtaatttacagtttcaatgccatccccatcaagctaccaatgcctttcttcacagaattggaaaaaactactttaaagttcatatggaaccaaaaaagagcccgcatcgccaagtcaatcctaacccaaaagaacaaagctggaggcatcacactacctgacttcaaactatactacaaggctacagtaaccaaaacagcatggtactggtaccaaaacagagatatagatcaatggaacagaacagagccctcagaaataacgctgcatatctacaactatctgatctttgacaaacctgagaaaaacaagcaatggggaaaggattccctatttaataaatggtgctgggaaaactggctagccatatgtagaaagctgaaactggatcccttccttatgccttatacaaaaatcaattcaagatggattaaagatttaaacgttagacctaaaaccataaaaaccctaggagaaaacctaggcattaccattcaggacattaggcatgggcaaggacttcatgtccaaaacaccaaaagcaatggcaacaaaagccaaaattcacaaatgggatctcattaaactaaagagcttctgcacagcaaaagaaactaccatcagagtgaacaggcaacctacaaaatgggagaaaattttcgcaacctactcatctgacaaagggctaatatccagaatctacaatgaactcaaacaaatttacaagaaaaaaacaaacaaccccatcaaaaagtgggcgaaggacatgaacagacacttctcaaaagaagacatttatgcagccaaaaaacacatgaaaaaatgctcatcatcactggccatcagagaaatgcaaatcaaaaccacaatgagataccatctcacaccagttagaatggccatcattaaaaagtcaggaaacaacaggtgctggagaggatgtggagaaataggaacacttttacactgttggtgggactgtaatccagttcaaccattgtagaagtcactgtggcgattcctcagggatgtagaactagaaataccatttgacccagccatcccattactgggtatatacccaaatgactataaatcatgctgctataaagacacatgcacacatatgtttattgcagcattattcacaatagcaaagacttggaaccaaccgaaatgtccaacaatgatagactggattaagaaattgtggcacatatacaccatggaatactatgcagccataaaaaatgatgagttcgtgtcctttgtagggacatggatgaaattggaaatcatcattctcagtaaactatcgcaagaacaaaaaaccaaacaccgcatattctcactcataggtgggaattgaacaatgagatcacatggacacaggaaggggaatatcacactctggggactgtggtggggtggggggaggggggagggatagcattgggagatatacctaatgctagatgacgagttagtgggtgcagcacaccagcatggcacatgtatacatatgtaactaacctgcacaatgtgcacatgtaccctaaaacttaaagtataattaaaaaaaaaatagaaaaaaaaaaaagaaaacaacaaaaaaaaccgagagttcctctatacaagctctctctttgcctgagaccacctatccacgtaagatgtgacttgctcytccttgccttctgccatgattgtgaggcctccccagccatgtggaactgtaagtgcattaaacctctttcttttgtaaattgcccagtctcaggtatgtccttatcagcagcatgaaaatgaactaacacagcaagtaaagggaaataattcattgcagggtggtcagaacattcttttgggatggcctctgtttgcttctgtgaagtaggaggtaagatcatttcctgaagttgagggratagaggagcatggtgaaagttgaaaaaagctgcagtggggaatagaagggggtggtgacaaaggagtgttagctcrgctgacactggaacccaygcyatcacttggagattgtacagttttctccagcagtgctcaggaccctgattggggcataggttcaaagaaagttgtggttggattgrtacaaggtactatggacctgaattataygttgaagtcctaaccctctgatctcagaatatgaccttatttggaaawacggtcattgtgcatgcagttaaattaagataaggtcattaggtgtgtgtgttgggggtgttcaaatccattgtgacaggtgtccttacaaaaaggggaagtttagacagagccatgcacttggggagaatgctatgtgaaattgaatgcagagatcagggtgatgcttctgcaagccaagaaacaccagagattgccagcaaaccaccagaagctaggagagaggcatggaacagattctttcacagcccttcaaaggaatccaccctgctgacaccttgatcttggactttcagtttctagaacaataggatgataaattcctattgttaagcccycaccccccacccagtctatggtactttgttatagcagctctagcaaactcatacacaagggatgtatatttttttgtccttttccttcttttccccttcaagtggttgtgaaggactgaaagcaaacgttttgaaagcacattctaaaagtattattaaagagatagctcaagaaatattcaaggtgggtaggaaaggagataaaacagaagagactgaatagaaaggaaaaggaaagactaagggatttagtgttgaaattttctttcagcttagacagttgtaattgtgagtagctcatagaatctgtctcttgggaagtctcaaccctattcaggatttccctgtaaagggtaatcttagcctccaggtctgtgctaaagtgatcactctgctactcctcaaattagatctgcaacttagatcatagccaaggtatttgcaaataatcatttcttgttaggcattgacttacatttacatatgataaccagagatcttatatattctcagagggaagtttcaagttacctaagctgtgtgtgtcttcaaagagctgcataactagtatggatttaacgggctattcgcccagtgattcagcatttgctaggttccagttctcagagaatttgctcattagcttcaaaagacagctttttaatggaacaaaataaggggcactgcaagttgtggtttcaaaagttactgtgattaaaatcatatggacagctgctgttcagtatggcatcacctggtgtgaatgaaaaagtgctcactgccagaaagccattgggctgtaaattatgtttactgtacaactggccgcagtctgccaagtttaaagtttttggaatggtccatgaatagactgttgagcagaaacaactttttcaaaaaaagtttttgcttcatggaagaaaatgtggaaaatacatgaaaataaaaatctttttaaaaagcagataatctcttgagtgttaacatttagggtgtctatccatctggtcttttttccccctatgcataaatatacatacatacatttactaaatgggaatcatactgtaaatacagttttgaaacttgctttagttaacatatcctaaccacattcccacaccacagaaacactctttccatggtggaccatggtccattttgggggttatcataatttatttaatcgattgtctctctttggaaattttggttggttttagtttttttttttctgttaaagatgattcagtgtatattttcaatatataatgtcttaaaagcttgaggcttctgggtttgcatgataatctgttgcatgtcagccagggaagctggctggcatctgtggagcagacagctgtctactactgagtccctctaggagacttttttgagcttgaaatacaaggtcttttaggaggagggcactgtctaatatttacttttacaccatggggagggatttgatggaaacagaaatgcattcagaaatggctgcatggaaaatgggcttaaatgcaaagagtgatgacgtgtaatgtaacaggggagtctcagctgctgcctgggcttctgtcaagttgaggctgtgactcacagaaggggttggggtggggggtgtttctcccctcttccccattctttcagaatctccatgacagaaaatttgtaaactgttcttgctgacagttgtgcaaaatgaaaagctcggtggatgtgtggagaatacattttcctgactgctgttaagcatttgacaaattgggagttttgtcatatatcgaagaacaatggtgggagagtagggaactgtgtgcgtcacataaatacaacacacctgacactgatgctccctgcatcagttgtcttcctgtgtggtggggaaggggaagagtcaggagatgggtgggtccagcaggtgctgacctcattcagcaggaggctgaatgatgcaactcacgaccaagggcccatgtcagcatgggtcttaggaggtgctaggttgtttagggtcctgttcattacgattttttgaaccaaagggagatttcctggaagtctgatgtgggagatccctgaagccattgatggaccaggcaagagcctcatgtgctccaagaggtgggtgaaatagctatggagccaggtggagcctagtggggctggatctgggcactgatggaggggttggggaagagaagcatgttggtttatttcatggcagtctgggctggctctcacccttgacagaaggaatgcccacagccaggaggggatggttccatctcaaggctcagggaaggaaggtgagtttggatagaaagttcagtcgctgtcattcctgaccatctcagcaatgagtcacacgtggaacacaaagataaacacatggagagggctatgcaggtggcgtgacgggcctgagagtggactgggatacagggaagtgggagaggtgtcaggcaaacctgacaacacatctttatgcctctttaccagctttgcaaccttgacaggctcaacctcttggagcctcactattgtgatctgtacattgggatggtagtgcctgcccttatggcagcgttctgaagatgaaatgagataacataaaagaagcacctccccacccagtaggatggccaccatgaaaaagacagataataacaagtgttggagagaatgtgaaaaaattggatcctcatacactgttgttgtgagtgtaacatggtcagcctctttgaaaagcagtttgggagttcctcaagaagttaaatgtacagttccatgctcagcaattccactgctaagtccatatccaagataaatgaagacatacatccacaggaaaccttgtacatgaatgctcatagcagtagtattcatgatcaccccaaaatagaaaccgcccacatgcccatcagctgatgatcggataaattaaatatagcatatccatacagtgaacactttttccacaataaaaaggaatgaaggcatacatgctgcaacatagacaaaccttgaaataacatgataagggaaagaagtcagacacraaagacdagtgtattgcaatgttcagaataggtaagtctatagacacggaaagaagattagtggttgcctaggcaaagagtttgtgtggaagtgaagggtatggaatttctttttggggtaatgaacattttctaaaattgacttacaatgatggctgcataactatgtgaatatacgataattcactgcattayacactttaaatggatgaattgtataattgtatggttgtgagttttatctcacaaagggtgttatcccccacaacaacaacagaaaaagaaaaaatgtgcctgacacacaagcaggtgacttatttatataattctaaaccccttcctgtctcacagattagtttggaaaaggttacagggcttcagttctcaggttttcaagttcaaatctacatatttcaggtcaggcatggtggctcacgcctgtaatcccagccctttgggaggccaagatgggaggattgcttgaggccagaagttcgagaccagactggtcaacatagtgagaccccatctcaaaaaaaaaaacaaaaaaaaaaaacaaaacaagtaaacccgcagatctacatatttatgtccttaacatgttgtctgctctccaaaaagagacactgagccttcatttaagccaaaagtgctcacmagggtgacaccctttgtggaatgagtgtattgcagaaaatctgggagtctgagctaaaagtctaagtttctatcaaccaggtttttttccccccatttctacagagagcacttttattcacgtgaaagtgtctatgttgagtctgtgtatcacattgcaaaatagtcgctgaaaaaagctggtgttccagagaaggaaagttcttcccattgtctaacttgagtcttcctgcagtaattgaagcctgcttcccgccacccatctgaattctgccatctgttgaggttggatgcttggagtcaaatgaaataagtgcctccttggagaacagctcctggaggccacagcacatttgtcacatgtcactgggatctgcatatggaggtgaaatgtatattttaaaatgtgctcacrctcggctgcacattcatcctgttctgaatgtgtttatccaattgcccatcatagacccgccctggggggagtgggggtcagctgatctgctcttatttgtctgccagcctacagcctycctagacagcacacatccctgggccrccctgttccttgcccttctcytagaggaagagaagctggaaggctctggtttgcagctggttactcagctctaaagatggattccatatcttggtagaaagaacgaggcagcccagctgctatagcagccagacctgggagcaaagagtcagtgttggatttggagtcagcagcctccttttgaacactggctgtgacacttagcagacatgtgacattggccataacaagtgtcctctcgtggcttcagttttgtcatcaataaataaaggcaaggacctaggttccttaaggaccctaaaacttatgcctcaaggatgaaaatggtttaattcaaagtgttgggggctgggtgcrgtggctcaagtctgcaatcccagcactttgggaggctgaggcgggcggatcgtttgcggtcaggagttcgagaccagcctggcccacatagtgaaatcctgtctcctctaaaaatacaaaaattagcccggcatggtcatgtgtgtctgtagtaccagctacttaggaggctgaggcaggagaatcacttgaacccaggaggtggaggttgcagtgagccaagatcacgccacttcactccaacctgggtgacagaaggagactctgtctcaaaaatgaaaagaaaaaaaagtgttggagtgttctgtattatcttcctcatagagacggggtgggtgtctgggactagggtattcaaactcaatcctataccaaaccctgacgtccttccctgtgatggctttaaaacatggcccccaaatctttgacactcttcccatcaagaatgtctctgatcccttcccttgggtctgggctggctaaaactgtaccttccccttgagaaaagttggaaccacatggcatttgagggtggtctcttaggacacttgttcccttgaagatcttctccttcagaactcactctgtatgcggtgagaagcctggaccccatggcaagaccctaagtccgtgctccaggtgacagtgccagctgggctgaccttcagccatccagcccaagcacgaggcgtgtgagaaatctagttggaaatcaattccttcagctccagcagctccagatctcaggcatccaaatctcccctggctgttccagtcttcccatttgatatcccagacaatattgagaaaagcacgccatctctgctggatcctgtgtgcaaatcctgctatgttggaacatcccagcattgtttatcccccagacagagtctccttcctcctgccctgccccaaatcaaagctattatccaaggacaatggagggattttggtgcttttcattctgcaacagagaggcagctttgacagcacgggtatttacatcacgttctgggtttccagagacctcatattcattaatgaattaatcctttctggcaacggtcctctttatagagtggcatcatgatgtgtgttcatcagacaaggggactggggcaggggctgtggctgcccatgatrcatgaggcacctcagctgtggcyattgagtacttattccrgagacatgagaccatgaggtgccagatgcagagtttgggccttggagcctggagtctggatgcaagtctaccctctggttattccttggacagacagctttactggtctgagtctcagtttcatcatctgtaaaatgagtggagatagtactcccaccagggcatagatgattgggtggcacatgaagatgctctgtaagctgtgacacacggccagtgtcattgcttctggtccacatgaggatgcccttatgagctggtgtttcagggaggatcagcagttgcacctgggataagggtaaggctgtgggcactgtgagaccctctcagattccccgggcccatgataatgaagaagacccggaagcaaaagcaagcgcccacaggtccctctgcctgctcattcaggctcccccgctgtgcactcccagccccatgcaatccgcccatgcccacaccctcatgctcatcaccctcacatcctggctttcttggttcaggcatgttcagggcttgttttgttctttattttgttgttttattttcttgtgttcaggaagcatttcattgttgctccaagtttaagaattttcactgatgagtgataaggaatcaacacttcaaagcaatgtcttgcgtatccctgctcagcctctgaatcttgggtttggctgacatattaatatatttctgtgcagtcccagtggtcattccgttcatgattggtggctcagtcctaacttccagttccaagatctggcctttacacaggaagctgcttagaatctcttcctccacctcccatttttttaaattgtggtaaaatacaggtaacataaaatataccatcttaatcatttttaaatgtagagttgagtagcgttaaatacaytgataatgtgcaaccttcacaccatccatctccaaaactctttttcttgcaaaatggagactctgtgtccattaaatacgaactcttcatttccctcttctcccacccccyggtagccaccattctacttcctgtctctatgattttgactactcttaagtgtctcatgtaagtagaattatataatatttctctttttgcgattgacttatttcaattagcttaaggctaatctatgtwgtagcatgtgtaagaatttccttcctttttaaggctaaataatattttattctatgtatgtgccacattttaattattcattcattcayccatgrgcacttgggttgcttccacattttagctgtgatgaaaatttagctatgatgaatagctgctgtgagcatgggcatactcagtgccacttgtagttcaggatgagtggccccatctaatggaaattcagtggcaactggacacaatgcttctccatgctggacagtcatcatggcagaaaaggcagaaaaaaatrtcgggggtaatgctcaaatgaccatgtagagcaaataaattaatcacattgagtgtgagggaagaaagccaaaaaagtggggatcccagctcaaaagctatttttaaatcttggacaagtaactcagtttcttggagcctcagtttcatcatctgtaaaatggggatcatgctttctatatcacaggctcatttctctgtcgtatgtgcagttcactgacagaatggagtgaacatgttttatcaaccaaaaggtattatatgaatggcggctgtcattcccccagggcctggcacatagcaggtgctcaaaaagtattggcagaattaattattgctgttttctttgctgaaatctgtgagcagttggcaaggctgtagcccccatactttttctgttctcattctcttgccctcagattggctttgctgaggtcccagatctgctgggctggccctaccacatcagccttggtaggtgcctgtgtgtgtgtacatgtctccctgcaagagtgtgtggcccagaaggtcagttctatttatcttggggtggaaggggtccctcagggaattagaggtgagtgaagtggagtcacaaaacacagccagagaaaaatctgggcccagagaagagccaacggggctcacaatgtggtctaagccagcatttctcaacatcgtgcacaagaatcactggcgattctgttaaaggcagattctgatcctgtagcctgaaattcttcatttctgttctactgcctgcagtccaccaaccacactttgagcagcaaggctctgagaccatgcctccatcaggctcaygaaggatcgtggccacatgacatttctgggtcttgcgccacatctatagaatctgactctagggccagggccctggaacctgmatgttgacacattctccaggtaattctgatgcatcctgaaacctgtgaccctctaatcggtggactgaggtaggaggctctgggctcctgtaggagggggagagagcccgtttcctggtatccacattcctccccacagcagcatccaatggttggttcctgtgcagatcggtctttgctcacattcttttttatgccagtttctgaaagccacaaccacttaaatcaatcatttgcaaacttcaccaggaacaccctttsctccaaggtatgaagcatatttggataagatagtgagacatttgtgaaaattgaggtygagaatcgatggctgaggctgaggcattagctcagccatgattactcatctagcccttgacctttctgcggagaygtctaagaagtgagtaaattaacaccagcagggagtgacaagggcctgaagacctgcagcttttctcactcagggrctgatgagcagaactgagcctgggatgtcagtgttaccaggmcccccttggcttttgaatctctttgcctgcccctaagcaagggcagtgagctcccctactgcaggctgtgtcctggggtcagtcctggcctgagcagaaagtggctgaatggattcagccatgggtccagctctgaccacgtgacccaccttcayctgctccggggcaggtctaactggattctgaatggactcctcaggcattcatagaggcctgtgccttgcatgtgcctctccctgtagtgcttgggtcacgcctcactccatgagttctactttcatctctgccctctccaaccgacagagactctgagatgcttttcctcctttgaccttggagtctcacagcctatatcagacacccctgctgatagcttgcctgctgtcagcaacacaaacccctggactgggtttcttgtcaatgcctgaaacaggagtcaccctctcagcacacaccaagcctcaaggggggcctgggtcaactgggcaggcccctatcatgtttcatgagccatgccagtgcaggccatgccaggcaaagtatggtacaattatggaactcaatgtcttcggggtatagaagagagatatagaacatcactgggcctcagttcccccaactctaaacccttaggaaggcttattgattccaatgagtggctgggcccagagctcttggggtgcaagcatctccacctagctccctagtggatgtgtgcatgagaagaatatgaaaatgagagaacctcttcctagcatgttcttctctcaccatagccacccacattagtgctaggtaaaaaggaacacaatcaggagaaaaaaaaaagagaactaaatctgctactgaggcattgttctgggatattatggactctcttctttaagagccaaaagcctaactcacagtattcatgagctcctggggatccaaataaaccagattcctgtctccagagggatcgcatggccccaccatctcatgcccaacatcagtaattcagatgagtatcaaatgtgacaggcatttattttaacagagaggaaggggaagacaaaatatcataaaatgtgtgggttttccccagatgactctgttgaaaaaaccaggaaatgcagagcggggggacaaatggaggagagatattaactagaacattgctgactcaaggccgtccagcttcagtgggagttctgattargccccatgtctgcctgatgccacctgcaacatgggctccgcatgtgccaagacactgagaactgtttgccgacacttggtgtatttgtcagtgatcttacttttcagtgtatttatgtgctaatcttttattattggatttgcttctacaaatatgtttttaccataagacaaagggaaaaggaagatgttggctctgtggcaattgttttgtctggattttctaagggagccccaggttgagaagagctggatatkcatggaggagggagtctggaargtgggtggagagtgatgactcactgtttgcgccaatatcctctcctggatgtcttgggaaacacatctacggggataaagaagaaatgtcattcttgtccgtctatggagtgaagctttgaggtctaacatttatcacaatctccaggttccacttctraatgtattccactccttttatccattcttcacttcttatcgagattgagcttctgaaaacataaatcacatcatgccagttccctacttaaaatgccctaagagcttcctattgcacttacaatgaaatccraactccttgtttatatggcccacaaggcccagcaagatctagtcgcaccagcctctcaaagctcatctccttctattctcctggccatgcactatgctccagccgtactggccttatttggtttcctagaaccctctaagttttttgcctgtttgcgttttgcacttgtcatttyctttgtctaaatcgtttgtcccctctccaccccacccctagccccctggatcttcacttggctggctgatgctgctcatttgctcattttagtctcggctcaaatatctcccaggccagtctaaagcagttctctccctcacaccctcctccccagcataccattactacatcactcgtatctcctgtttattgtcttcttgcgctgattgtctctgaaattgtgtgtgccattggtgtatttgccttttaacttctgtcactcatcactagactgtaagctccgtgagaacaggaaccttcccaggaccccaggcaatgcacggtatgtggttggtgctcattaaagaattgttgggtaagtgaataaatgaataaatgaatgaggagtgaagggaacagagcacccctctgttctgccttgggacttcccatttcagagcatgcaggacatttactgactcttaagtcttaagtgtttgccaaggtactgtgaaatgtttatcatttccattttacaaatgaggaagttaagatttaaagaggttattcaatttgcccacaatcatataagtaatttggcacagccaggggtggaaatcagttctaactgactgtgaagcccctgctccttgttctgtcaccatctagtatttagcattgtttgtggggtggccaggaaggcttcatgaaagaggagcatatgtagctataggagaaaaaaagaacatagtggtaagagtatttgctctggaatcatgctgcctgggttccaagcttggctttgcccattcctaataatgtgacctgtagagtgtcctaatgtcactatgcctcagatctcccctctgaaacatagagatattgacagcatttccctcacagagttrtcaggagagttaaatgaaaggatatatagaaagccgtttgaccagtgtccggcagaaagtaagcactatcaaataggcgtttattacccttatgattattatcccattctacaagtcactttgcatgttgctgaatcttctgaggggttcctaagaacaatctagtagcatgagggtcttawtggaaatgctccagtctctcccaagacttgcaggagcttttaggagtttctctgttgcctgtgactttgcaggaaagtggtgatgtgctgcctgttgtgcacaaaggaacataaactttaaaagcagagaagaaaatgaatgtgttagtggcccagagttgtgggaaaagccacccactaaattacatttctgtaccaaaaayggacttcaggcaaagtgggaatgaacgacattgggatggcaaagacattgagaagcagagccggtaacaaggcatggagccctgtattatttctggtatcaaggaatgtgtggtttyattattattttcataaatggtctcagttcagtttttgttgcttgttattcacacccagggcacctggtgttcaccatgcctgcatcctgcccggcacagacctccgcctgacagtcagtctgctagccagaaattgatagctagagacaaaagagtgccagagatgttcttgggaaccagcacacctaaacatgctcgtttacagatgagaaaactaaggtcatgatgcaaagggacatttatttattcattaatttagtaatgatttattgagatgtattcattaatttagtaatgatttattgatttattgatttgttgtgctgcgtcccaaactaggcactggagaaaaacaaaaggatccttttcttgtagagtaaaccatccctaacgaactcttatagtagactatttaatggaggtaacatgtaaaaagaccaagtctgagaattacaagtcttgagttgcagtctaaactttgtatctgactagattaatttactgagcctcatgtttcttgtgtgtaaaatrtggaagatggtttctggccttcaaatctcacaaggattttatgagcacccagataatcgtgacaygtgctgawgcttgatggcctacaaagcgatttgtagataatgcttttgtgacgggtgagatggtaatttgcaatcacttgcatccactggaataatataatgggaaaatgaaaggggtgatggtgcaggtagaaggcagattgtatgttggagatgsagcagagaagagccaaaggtgaccctcaaatttcattctgaaagggggtcttttgcactgtttggaatcaatgggaaagaattttccactatggagagtagctcattctatcaggcgggagctaccactcactagtacataacatggtagatgtggggatggagctgagcatggtactgagacaaggcacagcaacctacgaactcagagtagtgtgagagatgcagaatcataaacagaaaggttcaatgcagtgccttgacattgactcaggacagagggatccaaacccaccctgttagaaaggggttgaagattgccaggaggtgtactcacatattccttgtggtattattcacaatagcaaaatcatgaaaccaaccttagtgtccrttaacagaggactggataaagaaaatgtgttgcatatataccatggaactctattcggccataaaagaataaaagtatgtattttgcaacaacatggttggaactggaggcaattgttttaaatgaaatgactcaggcacataaagtcaaaaatgctctcacttataactggtagctaaataacgggttcacacaggcgtacagagtggaataagagacattggaaaccctaaaaggtaggagggtgggagcagggtcagagatgaaatactacctatcggcgcaatgtacactatccggtgatatggacgctaaaagccaacttcactactgtacaatatatccatttaacacaactacaattgtacctttaaatctataaaattaaaaatgtaaaaaataataataataaaaaatcccagccaggtgtggtagctcacacctgtaatcccagcactttgggaggccaatgcaggcagatcacttgaagtcaggagttcaagaccagcttcgccaacgcggtgaaaccccgtctctactaaaaatacaaaaattagccagactttatggcgcacacctgtagtcccagctattcaggaggctgaggaaagggaattgcatgaacctgagaggcagaggttacagtgagttgagatagtgccactgaactccagtgggggtgacagagtgagactccatctcaaaacaaaacaaaacaaaaaaataacaacaacaacaaaaaccaaaataagtaaaattttaaaaaataaaaatgaaagatcccccaggacagatgatgactgagctaggttttgaaggctgcagagggctgaactagttaggttacatctggaagggcaatcaaggctgagaggacaacacaaagagtgatgtagtaagcttaggaaactggatgtggctccatggagaggcctggggcataagtgggcacggtggtagggaccattttgcagataatttgagtgccaggcagaacctgagctgtgcaaggggtggtgtttgtggaaggctgtcttgcaatggtagcttggtggcatttgattaagatcccctgattacaaatgtaaaattaatgcycagagtcagtcttctccccattgtacatgctctttgacatcactcatggctttatgaaatgtgcggccagttctgtgtaaagagttttcagagtggggatgcaggcagcctgcatcatccagggaaggcaaatgaaggacaaaatcatcccactgcagagggaaccaatgcaaatgagcatcttcccagatagcagagtagcagaccctggagctccttagcctatgcagtgcctgacactgtaactcaaccctcccattgcaccccatctctctgggcttgaggaagtcacagaatcctaaggcagggggcatttcatccctgaggagggatagatgaattttactcagaagacatgcatcaattaagctccggtggtttgcagaatcaaccctgtgtgtggtgacagctgggaggatgacataaggagctccttgtggcacctcccagatgtctctgctcatcaaaccctgtgtgttcaaacctgaagttgtcatgttttctctctcaaaagcttttgctccatattcaggcaaatgtcaccacccagttgtccaagccagagtatgggcattaccctcaatgcttggctgctgtggacacttactcccattattccctgaattctgtcctttccacttccggtgcatctgcactgctgctcccttgccaccaggtcctcaatatcttactcctaataaaccagggcatcttgtctccctgcctccagtttgctccctcaactccatcyttcaccattgcaaataagatgattgttggaacactttgatttgcttacaaggttctagcctgccagtatcttcttcattcgtttatttagccgccgtgaagtactctgtggcaggccctgtgacaggcactggaggtgcagaggtgaacgaggggtgctgccatcagtacccttacagcytgatgggcgaggcagccacaatagaaggcactgttaagccatgggaggaagctgtggtcagtgagkgctcagatgttggaggccatctctgcctggagaccagggaagtgagactgcatttggctattttttttttccctatgtatggttccttttctacayttaaaaaaaagatagcaggaattggtttgaaaaactatgaaaataatgtacatgttgtattggaaaaatgcagaaaacagctaaaatagaacctcaagacatcccataataccaacgtctrtctagcctctattaaaattttgtgtcttccctaacaagttttcttcttctcatctatattttacaaaacatragatgcccttgagtatactattttgtacactactcattttacaaaccaatactctcgcatttaaaaaacagctcttttgttgtgtcttgttataaaaggaatacacagctatttcaaaaagtttcacaccataaaaactacacagaaaataaagattgccatctattcccatacctgaagatactgtctgctaatagctgtatgttattttacaattttaggttcattttcacagttatatataaatataagtgtagatggacttaaacttgctatttcctcttaatacatcatagcactctttttacttaaataccttttgatcacttgtgtttttttttaacagctatacgataggccatgtgcatatatcataaattatttgaactcatttttatggatattggggttgctactatagtatatatattcatgatttcaaatagcagaatgatgaaaaggcttctgtgggcatatatatgttctagtccacttaattctttgggatatagtcctacaagtgagattactatggcaaagattgtaaacattttaagttttggtctatatatgctgttggcagaattataagatgatctctgatgatctgtgtctttctttaatcccctccctttgggcatgggtggaacttgtgacttgcttctaacccatatgcattactctgttctcaccctgctataaagaaatacctgagactgggtaatttataaagaaaagaggttcgattgcctcactgttccacaggctgtacaggaagcatggcagcatcagtctggcttctgaggagatctcaggaaacttaaaattatggcggaattaaggggaagcatgcaaatcttacatggccagagcaggagaaagagaggttggaggaggtgctagacacttctaaacaatcaggtcttgtgagaactcactcactatgcagtaccaagggaagatgatgttaaaccattcatgagaactctgcctccatgatccagtcacctcccactgggtctgcttccaacattgggattacaagtaaacatgagatttgggcggggacacagatccaaaccatatcgccatagaatatggcaaaggcaatgggtgtcaatcctgtgaatatgtttcaatatatggtaaaagtgaggggattttgggataaaactaaggtttctaatcagatgactttaatcaacagagttaattttgagtggtcctgacctaatcaactgagacattttaaaagagtctggaagtcagagaccctctttcctgctagcctggaagaagcaagcctcaaaaagtctgcagctgcaaggaaatgaattttgccaataattatgtgcgcttggaagaagactcagcctaagatgagatctaagccctggctgacacctccattgcagctttgtgggaccttgagcggagaacccagttaagttctgcctggactcctgacccactaaaactgtgagaaaatgaatgtgtgttgttttaagccactaaatttatagttatttgttatgtagcagtagaaaacaaacacaatgtaggaaaattgcctttgataaattatacaccaatttacacttccaaccattatgagagctcccatttttgtgaatttttgtcaacacctgctgttgccaacctcttacatttttgctaatctaagaggttaaaatatacttgtttaatttgtggccctcaattagaagtaaggttgcacatttctcatatttgtatttttcgttttaaaaattcatttttggtatttgcttaatcatggcctttgcctatttttggcattttcttactgatttgtgagagttcttcacatatgtggaagccaggagagagtcagaaatatagatattaggttttctgttacaaacattgcaagtgtttttgtttcttccacgtgacaattttgtttttattttcaaacattgtttatggtatttggtgaggagggatatgagcgttttctcattctgttgggttttacaaagaccgccgtggtattccgtatggaagtgggaaggaaaggcatgagaaagcaattacattagttcagaggaacaaaygaagatgatacctgaactattaatacrttaggaactgcaaagatggagggatctgagccaggagatrtttcagaagtagaattggcaaagttttggtattgtcaggactgatttttaccaggtgggacatggagacagagggatgaagtgagcagcacatattccttcctggatcagtaggcactaagtttaccaaggaagcttctccttgatagatctataccactggacactctgggccttgcaaatcccctgagaccaagaagtctgtatctcctctcttgtgatcacagccctgcctttattaccagtggatgaatgaataaattattgttggaggctcttcttctcttcctactaagggataaagactttactctttgttgtagtttatttgaagccccctcaccaggaagayctatggttttaaaaatgaacaagtaggcaggggtatttgytcaaagaaaaaattcacttggacaggcctggcacagtactgatttccctttaaacagcctgggcagccttgtctctaggcaggtgtgggggtgaggtgccaggagaagtgtttgtccttgcaacaagcaaactccagtgacatgttcaatgtcgcactgaaattcctggcaagaggagagaaggcagcctgctctgttcctaaactctggaagattctatctgaaatgaagaaatgctgcccacagcctgtaatggaataaatgaagatctgttaggtaggggctgcagcatgcttggggtctccagtcggtgggcttataggagagatgtcagactaacaaagctgaggtcctgcaagtatctctctggcaccacttagctcaggtgtggattattcaaaacttcactcatggtcccttgaataattcactgcagtagttcttaaccaggggccattttgctaccctctcaccagaggacatttgaccgtatctggacccatttctgcttgtcacaaccgggacagtactactggcatcttctgggtagaggccagggatgcttctaaacatcctacagtgcactgagcagttccacaagaaaagaattttctggcccaaaatgtcaatggtggtgaggctgagaaatcctggtttagtaggcacaagagggatggtgtgaattaatgatatgtctgagttagaggtgcatgcagtatctcccaygcactacaccaggttctttgaataatgacccccgtgcccaagattcttttctctttccctggggtctcatctgggtacagtttggcctctgcgatgctgaggacaggagtgacaacgcagccccaagtggtacgagcccctaggttcacccccagagttctgaccaacattacttgtcctgaaacaggagacatattaaaaagcaagtccatttgtgaagtacagcaagatctttccttgcagacctgagatctaacatttataaacattcatttctgtttgtcagggttcccacgtcatayaccaacccacagtaccactgaygtcagctttgattctggtgatccactcatttctcccagtttgaggctgaatttctgccagaggaggtcagctgcaggaggagacagaaagctggatttttgaaaatctgggagtggataaatatttgatatgtcttggcttgagctggacattctrtacctgagagtcagaggaaactaattcagaatctcaattctagggacgctacccttctaaagcagtctggagaaaaggtggaaccaaataaattggcattaaatactgtgcacatctctcaggcaaaatctgatttccctattgtacatagaggtgtatgtatattatatacagatgttaagaatttttttaaaggttgattccagatggaacaagattatatttgattttattaatgtttattcattgatattggcaacattcttttctgtcccgagagaaagagaacgaacmttacaaagtgtaaatattggccctaaattgtcactcataaaggatattaatgcctgtagtctgtttcacgaaccaattttacagaaagagggttttttttcatgtcttgagtctgtttctcagaaatggtcgtggtgggacaggatctggattgacagcggcaaatgagatttgcatggaggcagcgtctccaaccaacagccctgcagaaagttcttagaactccttgttcttaatcccctttggcaggagttgccacctcttccacatgtctctcacttctttcccttcacgttggtctccggatactcctgctttggctgtcttgactgtttctattctagcttgttctctaggacagctccccacttcccttctcctccggtactctctggtactgcaatttcattaattcccaaggcctcaaccaagagactctacagataattctgaaatccctgtctccagcttcaacctctctctgaaccatagacctgctggccaatgagatggaaacatattgagaagcctaaactcgtctcctcccaatattttctcctacttaacaaaggggctatttacctatttattcaaggtttaaaaaatgcaaagtggtgtttgatctatctttatcccacagattaggaaacagttccaagatagcttaaaatgtgtcccttcctggtactggattctttgtgcaatcgggactgccattgtgagtgggagagttgctatatttgcagttgtcattatctctattgtcattattaatcttaatgtgattccaagcaacaacttcccactcttcgatgagagtttaaggttgtcagcaaatgtggaaatattgaggtcctcactttccaccaaatctggttttaacagattagataaatgagctcgccagctcagtctaaatggcaataagtaagctacatgacatcacagtcagaacctccatgcctgggtcagcacctaacacatctattaagaaggcaaagtcagacaaggtattagagartgactgagagggcagacagggaaggtttcttcagggaggtgaaataggagtgggtgtctgagtggtgaacacagcttcccttcttaatatttcagagtagagtttcaagcctggaggctatcagaggctgggtgaccactagatgaagatgtgcggaggattttggcatccaatagcgatcacagagatgggttttgggggatcctgctcctccagtgattctgagattccatgatgattactgtgccggtgttgagaccaaagtcatgcaaaggctcatgaactagatgctacaattcggtttttgcctctgcctttctgtgcattcactaccctattacttagtcggaagattccccagctctttggtttgaktcattactggcttaatcgaccccatgatgttccaatggctgagtttttcatatgcttgaaacttaccatttcactacactggaaagggaagaaaagtttgggttattcccccatgtgactttcactgacaaaggatacagaagactcttgaaagctgcctctcctgtcagctaaatggagaggctgcctttcagatccttgatttaaagtggcagggactggataacatggttaggtggagtcctcagaggcctcatgatggaaaccaggaagcagaaactgacaggcagacaccccaaacttgagctttgtaaggtctacacaaatagtaaactccagggagtcggtcagcaccttcagaggggctagccttgtgttttctaagcatgacatacctccacgtctttttttctctaccttgttctgaaaaatgcttgatccatttaatgcctcccaagcttcactgtgtttagggaggaatgagaaacaaaaccccagctttaacagctccttatctctcagcctgaaatcatgagagtggggcctatggcccagtatcctgagtagcaggtcagggtgttcttgatgctttcattttgttcctgtgcatctttggtaatgtgttctgttcatctatgcaatgtaccttaaaggcaagaaactcctccagacagagaagcacaagtggaggttgcctatttatccagtcggcgcctggcctacatatttatcgtaatagaatctccagcaaagctgggtgcggtggctcatgcctgtaatcccagcactttgggaggctgaggcgggaggatcacgaggtcaggagatcgagaacatcctggctaacacggtgaaacccgtctcaaaaaaaaaaaaaaattagctgggtgtggttgtgggtgcctgtagtcccagctactcgggaggctgaggcaggagaatggcgtgaacccaggaggcagagcttgcagtgagcrgagatcgtgccactgcactccagcctgggcaacagagtgagactccatgtcaaaaaaaaaaaaaaaaaaaaaaagaatctccagcaaactgaccatgaccataatgactctggtggccacagagactaagaacgaagtttgtgctatatcctccaccagtgctcggtctcttatatacattattctcatttaaatgctcaactggtttctgaagccatggtcattgtgcccattttactgtactgatgggaaaattgaggttcagcaagatgcagccagatcctgacttttgaagaagtgagcctcaggttaggggaacagtgagatccatagaacaatgcctgattcttgggcttgctttaatgctgcctctgtggccttgcctggcagtcttgatcactgcgtcaatgtattaccttgaaagtggtgatgtgttttttccaggaatgaggtggtagggcagtagggaagcaatcacctgctctacttccccccagtgcatggaacacatgtgtgtgcacatacccatttatgttccaggtcacataactgagtcaagattaaaccagaacttccatcttagtgagagtttctgtaacaggatcatgcaatatatcttattaaacatctactctgtttcaggccctctgtaagaggttcaagaagctatagatatcttaggattgctaaggagaagctgcagtttttcaggttgacattgtacctatcttcaaccttcatagaagtctttgtttttagacttagcttaaggcttctctttccctctctttttcttttggcattacacaatttttttttatcatgtagtcaaatttatcaatctttcccttaatatttctggattttgatttaaaaaagactttagatacttccaaagttatacaaaattattttctttctaaaattctatttttctgtattttcttctaaaatttcagtggattgggatttctttttgcatttaaaatcttgacccatttggatattatcttggtgtatatagcatgcagtacaatgcatttctggaaaagtccctctttggaatgccccattacacacacacacacacacacacacacacacacacacacacacacacacgctaaatctctgtaacatttagatctatttctgcactttttgatgtttcattagtcaaatggtctgtcaataagccaatcaattatcgaggttttaattattaatgtattgattattgaggttttataatatgtttttaagtgagcaggctttctcatagttttttctatctatttttgctacattattttcccaaaattccttagaatgaatgaaaagctctgttttccttcatctaattgacactgactccttctgaasactcaattaaacaatcttctcctctgaggatgcttccctgatgtcctcaggccttgttacattcccgaagcctggtttgttcccaaagtatcttgcatgcccctctgtcacctgttcatacagtgcaggcttgtgattggttacttttttatgtccccactaagctatggtctccttaaggtcagggacaaagtctgcttcaactgttgttaaagcagattgcacaatgcctggcacatagtaggtgcttgctccagttatctattgctgcatgctaagtcaccagaaccttagtggcataagacagtaatgtatttttcattatgtcttatttttttgatgaaccataactagctcaggtaggtggcttcatttgggggctccttcctgtggttgcataagacagtggctagagctggagttatatataagccagactcctcactcacaagtctggaggttaatgctggctgccacctgggggcctcaactggggctgttagctggaacacctatctctgacctcttcatgtggcttgggcttcctcccagcatagtggctgggctccaagagcaaaagcttttctctttcatgacttgttgtaacttttatgtttagcttcagaagtcacatagaagcctgttctccatactccattggtccagcccatcacaaaggtccacgcaggtcccagaggaggggacataaactccacctcctggtggggagtgacaagatcacattgtaagaacttgtgggataagtggcgtggtcatgaccatctttggaaaatataatctgccacagtgctcaatatgtatttgccagatatttgtaaatgcatgatttaagataaaaaagatggttatattctgggtttagacttgaactaggacttctggctgatcaaaacagatcaggagctggagtgagtgtgcatcctacccccagagcctagctgrgtgtgaagtcgagttgcaaggctcctaggaaagttttctcatctcaggagcagtttcaggagctgaagggggatgtgtgcagccatgtcaataaagcattttgagttctttatcataaagttcccatctcccattcaaagtacaggttattagagtttgtttttccttctctactttctaaagtaagtgctttgaagaagatggatgcaggagaaatgacacattaagtatttctgctgaaatgtgggatttctgctcaaatggaagttgcygtgtttatgactggcacacaaattgaagaacggaacttgctttttgaacaattgagtttatcatttttgctctcagaggtacctcttgctaatggagaaagctaaaaaggtttgaaggagctgtcctctttgattctccagataaagataacttggcatatgtctgagaaatgcacaagattaaatgagagaactcccccacctccataaagaccctgttgagtgccaaccagtctgatgggcagtgaagtgcctagcaatgtgggtaggtaagagcttggagagtggggttcgctgctgcccatgtctcaatgacagcatttaattgatccagggcatgtttcttccctgtgggtgactcatttgtaggaagcactttactgaggcagcctttaatgaatgtgtcatttcctctaggacataggttctggatccaggtgttgtggactcaaatcctatttctgccttttactggctctttaccttggaccatataactttacgtcttggtgcctcagttgtgccatctcaataatggggacagtagtagggcctaccttcagaggttgctgtgaggacttaagtgtttagtgccgtgcccagcacacaataaayacttagttaggtattaattttactgttgctcttgtttctgttttaactgtctttattacccatgaactgctcttcccagacctctggacctgcaaaccatatatgtaatttaaaattttctagtagctatatttttaaaaataggaaccaggtgcaattaattctagtagtatattttatttgatctaatatatttcaaatattatttaaatgcataatcattaaaaacttattaatgatacattttacattctttttcttattctgaatttttttgtctttgaaatatggtgtgttccttatagcagagctcagtttgcaccagccacatttcatttttctggttggttgatttatttgctttttttttggggacagtttggctctgttgcccaggctgggtatagtggcacaaaacagtctcagctgactgcaaccttcacctcccaggttcaggtgattctcctgcctcagcctcctgagtagctgggattactggcgtgcaccaccacgcctggctaatttttgtatttttagtagagacggcatttcaccgtgttgaccagactggtcttaagctcctaacctcaagtgatccacccaccttagcctcccacagtgctgggattacaggcatgagccactgtgcccggctgtaccagccacatttcaattgtttaaaatagccccatatggttggtggccacagtataggacagcacagctctggagggcttgttcctataccaataattcagctgcagctgacaagatgcctactggggaaagggatgaactctatctactgtgagctgggtactttacaatcatataatttaatcatgaccatcatgacagcaggtattttgtgcccattttataaatggtttcttcagaaggcatctaatttgatggactagaagtaatttgcccaaagtcacccagctaaacagtggcagaatttgaactcaggtctgtgggactgagatttcttccccatggcaagatactagatgctcgtgataggcagtagatcataagcaccatccagagccgaggcagggctcacacagagccatctgcctactgtgccaagtacctcctgtgtgaccgcatttgaagatagccagctgggctcagtcacagccaaggtgagggctgagtctgggcccagggttagggctcaggataagtctggggcttggagctgtgtctgtgatctgggtcatgactcagcgtgagtctgagggtcgggttgcagtccgtggcccaagtcagggctcaggccgtgcaagggtcagagttgagtctgaccagggtcagggcttgctctgtggtgagacaaaagtttgatctgatgctgatgtcagggctctgccttgggtcaagatatgagtttatcttatgaccaaagggcagagtgcagctagttcataaagggctcatacctttcggtggattctggcagagccagaccccatgctgggcaatgtgtctgtaaatgctgggatgctgtccttcctctgccttgttgcagtagcaagtgacccagcccaccgtgggaaacaatgcaattgcatgtttgggacctcagttgcagtatgggctagagtttgtcatgagtgggaacttatctgaagaacactggggcacaaaatggttgctgactcctctgccatgtccaccctggatgaaacaaggattccagcagctgtactggatcttgcattggtgctgaaatgtggttgaggatggtgaggcagaagatgggatttccttggctctcaggcaaggtaggctaagcttacagggacccagccagtgtggctggaccatggggtccatcagggcattcagggagccaggactcacataccactcactcccaatgactgcgctgacttggtggcatgaccagcttggtgcatgaaggttctgtttgttagaccaagccaagtgccaggcagtgggccacaaaaggtcaccctgtctcgggttatatacatggggtatagccatccagcaaactattattcagctgtagaaatgaatgacaaaccattttcaaataaatcattaagagaaaagcaaggtgggaacaggatgtatagcatgctctctttgacataagaagatataggaataaaaatataaatgccaatgccaacggatgtacaagataccaataaaatgttattattaccttgaggttgtgtaggaggatgctctttatctggatcacatgttgaggtcgaagtccttctctgagtgtggcaaaaagtggaaaatgcaggctctggtggaggagtccccactttgggagctagatgagtcgtaacctactggaagctattttcttgtgatcccttccccacagcaggggtagaaatgtactttgtgaacctgaccataaactgcttgctgtcattagtttcaactgaaatcaaaatggttttgcaagaaacccaaagcagtgaaaaatgatggagctaaacatccttgtattgtagatatttcctttggggtgaaacaggcttgtgtgtgttattattgtggctgccaaagttctgaagcaaactgtttccaaaaagtattgtgcatttataatgcaatttggaggcgcttatgtttttatttgacaggtgcatatttcatgagaacaacattgaacgtgcctttaatcaggatttgtagggaatcgctggtaatccttttatgtttcttctttatatttctattttataaatttgattcactgaacacaccacaaaaattactaaacaactaaaaaggaccgacagtacaagtgagctgagtaagaataccagcaaatgctatatagtgtgtgattgtgttcatgtacatatgtttgtatgtatgtatacatatgtctattcatacatatatatatgtcaatatgttacagacatgttacatattgttacaataaactgtgttggagcacttgacaattaattgggaaaaaataattagaccctcacttctccatggagtaacccaatagatttctattattacataataatcacaaatataaaaactgaaatcataaagcaatctacaggtaaatttatataaaatcttgtacaggagatgattgatttcatagctcattgcctcagtttctttatatgattagataatgatagtgtctaccttataggattgctgtaggaatttaataaacaatgtatgtaaaatcctcagaaaagtgcctggcatgtgggaagtgctatacagtgttaactattatgactgtagctaaacatggtaccaaatagaggaactaaaataaaatgatagatgtaactacataaaatgctagaatttctgaatgtcaaaaaatagcatatacaaaatagagtgcaaatgacacattaaaaattcaacctagatgacagtaaaatattctatatgcatggagttatttcaagtcagtaagaaaaaagagacagacttctcagaggacacatgagtcaatagcctttcaataacaaaagaaaacatctatattaattcattctttctacaaatatttatcatgtatctcttatatcctagactctatctgggatgctgggatagcagtgagcaaatctaaacccctgctgtcaaggaacttactttgtagtggccaataagcacgtggaacaaggagttcagttcacacaggatcaagaaagttaagttaaaataaagggtaaccatttttttccatgtatccacgtagcaaatatttttgagtgactttatcctatattggtgatgatgcaaggaaattagcactcttacacatccctagcaggatgggtaagcaccagtgcagcctgtctgtagggaattttagccaatatgtgctaaaagattttgaaatgtgttattcctacacctccacaacttaactcataggaacttattttgaggaataattagaaatgaatagagagatttctatccaagaacgtgtgctaattaattcattcattcatttacaaatatttattgatcagtcctacacccaggacactgttttaggtcctgggaatacagcaatgataaaagcagacaacgtttctgtttgcggagaattcgtactaaagaatgtgcatttatttgtggggaggagaggaggtctaaatagacaataaacatataaatattaatattgtgaaagtggtatgaagaaaaataaagcatgataaggagagagaggtgttccctggctctccagrgggctgaggtggaagaaaaggactcctgttttaggtaagatatcagagaagacctctctgattgactgaaatgtatgcaaaggcctgcatgaagccagggaccatgccgtgctgacatctgggggaggattatcctcacagaggggaaaggaagtgcaaatgccgtgaggtgggaggaccatgtttggtatgttcagggaggaacagggaggccagtggggctggagcaggttcagccatgggaaggccaaagatgagatcaaagagaatagtgggagatcacgtagagatttatgggccattgtgaggattgtggcagcattgagaagactggttgatgcttaaaacaacagccattttatttaatatctcatgattttgtggtcaggaatgtggacagagctcagctgggagattgttccactccatgtagcatcagaagacaggtctcttggtgatattcagctggagaataagttaatatgcagagttcaagatggtttcactcacattgacaccttggcagggatggctggagggctgggctcagccagatcagttaactggcgtgcctgcatatgcactctccaccatggtggtctctagaattgactcaaatctagaattggctggaagacatagtgggagaaataaacttagcagccacatttagtctaccacatggagtaagagagaaagaaaggagtcaaaggggcctagtttatttcaatgtgatttaaaattgtgacaacatagaaataaccaaaatatccaactgagaaaatggctaaatatattatataggtttacattcacataatagaatagatttacatttacataatagaatatttgtgaatgtaaatctgtgtaataagccatttgagaatatcgatgaatgagagaagataatgcatgatatgcctctgtgtgtgtccatgtatgtgtgtgtgtgggggagtgcatgtttgtatttgtgtacccatgaacatagtttttactctttttaaaagctgtaggcactggaaggtcagtgttcagccatgacagtggaaggtcagtgttcagccatgacaaggcccaatgtcatgggccctctgtcatcatcctctgtccgtagtgatccccagacacttttgcatggctgtttagacagaattttcctgcagctcttttgggagtagctcttgaaagtttaacccctgacagttaatgaagaacagtgaggcttaggaggcaggtaggcctttgagcaaataactctgagcaactggttgccattgtcagttctcctaccaagtatgcgtttgatttttaaaaggattccccaaagttctatttaggactacagagtctctaagaatgtatttctgttgtcaaggtcaggagcaagatcatctctgtggacctgtcggtttgaaggagttgcaagatattctcatcattcattgatttatatactcaaaaaacatatatttgcatgtgccaggaaaaggtaaggaaagggagccttcatgtgccagcccctgtgctgagccctggagctgtagagatgagtgaggtggattttttgtctgtaaagagtttgccgatgggaccaagtctgtcatctctctttcctggcctgaccgaggacaagcacttcttagtaaccctgtgaatacctggatgaacgaaatgaacgaatcagtaggagaaccatttggggattaatttggggctcaaatctgtagctcaaatttggattgggaaaaggaagcctgaaatgttccataggtttctctataggtccagttttttgggcgagctctgagaagatcagagttaatttcttccagttcctgcagcttctcttgaccagagcatgcctgactctacaaaacaaaccactaaagggtgatcacagataaccacagttgccagagtttggggagtctctgtgcaaattttgaaaaggtaacctctttttgtgaacagattgcaaaaagatgtccctccctctgaactggctcaacccacgtgagggatagtggcccctaggctaatttaatttcaggcggactcacccccttgacctgtggttttgtgcacaactataggtggcagcccaggtggcttggatttttccagttcgttggtgacctgctgtgatcctgtctctgtccatctgaattctggacagtgtgttccagcctgtgattccacctstagcctcagagcttcgtctggccaaccctgagtttgaggttcattctcttctccccaggggcctccaccccaggccttgcctttgggaccagccctccacaccaagcctgcaggagctccttcacaccccaggaaagggagcctgcagacaagaccaagacaggtgcttccctcctctcttctctccacagaacagaccagattcagatccatctactgggacccaggagggaaagagggctgcgctgayactctccccacaaagccaccattattataatcatcacagcacttagcaagtaacctggagtgctggtttcactggggtgaacaagccagtcaaagccagcattccagccccttttttgttccaagtgccgatttgtttccctgtgctgttgtgcattcatttcagttattcctttagaccagaatttaagttgcttattgatttggcctgtcaattgcccagtaatgctttaggcaggagcccagataagaaagaattccactgcatcttgcagcaccctcccccttcaacctctgagttatttctacctacaattgcgatgttttaaacatctttgcttttaaatattactttccttttcctacttaaaggcaatgcaattttctcttcccaagaactcctttcatagtctcattccatgttttatttccttctctatgcaaactcatttgtcaaaattacacattcagctccttctgtggaagacttagggatggagtaatgtttaaaaaaatgactttgtgacttagaaaaatttcctctcctgtgagtttaagccttttttttttttttttatgcagccaccaattagagagatagtgcaattcaatagatattcattgagcacctgccatgtgtcagctgcttactaggtttggatgcaccaataaacaaaagaaacaaatcgtttccgtcatggtgcttacattttcatgtgggagacagaaaataaccaattagcataataaatgagtagagttcatggtatgctaaaaggtagtaagagaaaacgcagcagagagaatgcagattggaaattcttgcagtagaagtggttaataattttaaagagtaggcctcattgaggaagtgatatattgacaaagacttgaaagagatgagagagatttagtcgcgtggatcatgaagggtggaggaagaagggaggagggaagactttctagtatacggccagccattgcaaaggccctgaggcaggagcatgcttgtaatgttcaaagaacagcaaggaagctagggggcctagagctgagtgtgtgaaggagaaaatgggaggagagtaagtcaggaatgtacctggagacaagaacttgcaagactcggcacaagacagggatgccctctctcaccactcctattcaacatagtgttggaagttctggccagggcaatcaggcaggagaaggaaataaagggtattcaattaggaaaagaggaagtcaaattgtccctgtttgcagatgacatgattgtatatctagaaaaccccatcgtctcagcccaaaatctcctttagytgataagcaacttcagcaaagtctcaggatacaaaatcaatgggcaaaaatcccaagcattcttatacatcaataacagacaaacagagagccaaatcatgagtgaattcccattcacaattgcttcaaagagaataaaatacctaggaatccaacttacaaaggatgtgaaggacctcttcaaggagaactacaaaccactgctcaatgaaataaaagaggatacaaacaaatggaagaacattccatgctcatggataggaagaatcaatatcgtgaaaatggccatactgcccaaggtaatttacagattcaatgccatccccatcaagctaccaatgactttcctcacagaattggaaaaaactactttaaagttcatatggaaccaaaaaagagcccgcatcaccaagtcaatcctaagccaaaagaacaaagctggaggcatcacgctacctgacttcaaactatactacaaggctacagtaaccaaaacagcatggtactggtaccaaaacagagatatagaccaatggaacagaacagagacctcagcaataatgccatatatctacaactatctgatctttgacaaacctgagaaaaacaagcaatggggaaaggattccctatttaatagatggtgctgggaaaactggctagccatatgtagaaagctgaaactggatcccttccttacacctaatagaaaaattaattcaagatggattaaagacttacatgttagacctaaagccataaaaaccctaggagaaaacctaggcattaccattcaggacataggcatgggcaaggacttcatgactaaaacaccaaaagcaacggcaacaaaagccaaaattgagaaatgggatctaattaaactaaagagcttctgcatagcaaaagaaactaccatcagagtgaacaggcaacctacagaatgggagaaaatttttgtaatctactcatctgacaaaaggctaatatcgagaatttacaatgaactcaaatttacaagaaaaaacaaacaaccccatcaacaagtgggcaaacgatatgaacagacacttcttaaaagaagacatttttgcagccaaaagacatgaaaaaaatgctcatcatcactggccatcagagaaatgcaaatcaaaacctcaatgagataccatctcacaccagttagaatggccatcattaaaaagtcaggaaacaacaggtgctggagaggatgtggagaaataggaacactttttcactgttggtgggactgtaaactagttcaaccattgtggaagacagtgtggtgattcctcagggatctagaactggaaataccatttgacccagccatgccattactgggtatttacccaaaggattataaatcatgctgctataaagacacatgcacacgcatgtttattgcagcactattcacaatagcaaagacttggaaccaacccaaatgtccaacaatgatagactggattaagaaaatgtggcccatatacaccatggaatactatgcagtcataaaaaatgatgagttcatgtcctttgtagggacatggatgaagctggaaaccatcattctcagcaaactctcacaaggacaaaaaaccaaacaccgcatattctcactcataggtgggaattgatcaatgagaacacatggacacaggaaggggaacatcacacaccagggcctgttgtggggtggggggaggggggagggatagcattaaaagatatacctaatgttaaatgacgagttaatgggtgcagcacaccaacatggcacatgtatacatatgtaacaaacgtgcacattgtgcacatgtaccctaaaacttaaagtataataaaaaccgacccccccccmaaaaaaaaaaacttgcaagactcaaaggccattgtaagggcttaggctttggctctgcatgaaatgggaagctgttgcagggttctgaacagagagtaagatgagttgcttgcataagaagaagatcactccagctacagagctgagaatagactgtaggaggcgattgcagatccgagatagggcagatggtgacatctgcaaagggagagctggttgaaatggtttgattctggatatattttaagatccagccaacagatttgctggtggattggtagtggaagtgagaaaaagagaggagtctaggcctgggcaactggaaggatgagattgctgccaagtgagatggggaagaatgtcgatggagcaggtttattggggaagatcagcagttcagtttcaaacatgttaagtttgaaacatttgctggctatctattagacaacatgagacagtggaaaggctttggagttaaacaggccttcattgcaatcacatctgcaccatgattagttctgtgaccctcagaaaaatacttactgtctctgagcctcagcttttatactcttaacatggagataattttctccatttaccctgcactgggagattgagatgaggattaaataatagagtgtgtcctggaagcaaaaggagtgaatccctggttagtgtgcttccagaaaggccagggatcaatcctaatctcaactcgtagactctcctggttgactcgaggtaactccttttcccactctgggcctgttttcccatccctaaaacaagagagttgacacaatcaaccattcagtttgtcttggcattaaggttgcatgagtgtgaggatctcagggtcagatgggctctgccttccagtttgctagcgtcccacctcctaatgggaattcacacacatgtgggtatgcctacacacacacacacacacacacacacacacacacacacacacacacagcctcgctcaggtctgaaggtttttctcttgtttggttagactgggtatgcctgtacacacacacacacacacacacacacacacagccttgctcaggtctgaaggtttttctcttgtttggttagactgcttctccctgagcatgccagtgcctgcatctggccagaccatttttaatttgagacacacacatctccgtgctgttgatctccttcctccctggccggtagtctgggtagccctgaccctctgtggtggccgaactagatggagaaagcagtctaggcagtcaccgttagcccagtttaaccacaatcactgccaagggaatactcccccgacctctttgaagcagtttcattaagagaggagctaaacatccccagtctgcagtatcatcttatttactctgttgcatccaggtcaggagagaaacaacaggtttcactccttccagtgttctcaaacctgcatgcctgggtctccgtctgtgtccccttagcccctcccttggaagagcctgcagcacagcctggtggtcctttcatgctggcttctgcgatgtatccctcccaccaggtttgctcatccgccttgtgcagaggtgtggccaaaactggcacctgcatggccattttgggggagtgaatctttttaatgctagttgatttccttgcaaaccatattatgcttctgtgatccaattttgtaaagagcctgatgtttctttactgttctgttatagcgattgttgacattaacctgacctatctacttttatttttaactgcctctatatactcttccttggtaatggcctgttttcttttcagcttgttaagtctacttgtttctaaaatactgcttgacctgaactttcttgtgtactttattgtcatttttactctccctcattttactccctgacattgtccctgaccattcatttatgatagcatttgccacactgtatcaaaatggactgtcttcctcatctgacggtaaggcaagaattgggtaccagccatctctgtggatgaagcagctagttgaggggcagaaaccccttgggagctcaggggacacttgtagaatgaataaataagtgaagaaattaataaatgaataatcatactaaagaaaagatgattgagaatttacttatgcttttacccaggaaaatgtgtaaacgtattagttcctttgtgtctttctaaaccttagtccaccttataatacacagaagattctgaaagccaggttctttttctgacacagataactcctgggtcagaaaactccagacttgcaagttccagagaactctggggcagaaagccatcccaaccagggcaggcaaagccccagggaactcaagccacagcattttctggcctctggggaaggatggccaattggatattctctgagcttcatcctcctattgtgagagagagttaattgattgactcaccgatgcatcccgtcagtcagcagctgtttrcggaacaccagctgcaggccaggcaccgtgctgcaaggcgtagatatgttgctgaacacgactcccttccagatgttcaggatttaacaggcaagtaaacagagggtccagagaaggcactcagcactgcctcatgacatcagggaggattgctcagaggaagtgatgcctaaactgagatgagtcaaaatgaggagagggaagggtggaattgttaatggagagaaagtgcgcccctgccagattatctagggacaaaggcccaggagggagaactcatgcagatgctccaacaggcacttaccccagctggatcgtagtgtaatggatagaggggtaaacaagagctgatttcctagcggtcctgagtctcgacaggttgccacgtcaggagtattgatctttttctggaagcgatggtgaacctctgaagagttttaagcagagaggtgacaggatcagaactgcattttatatgctcactctggctgctgggtagaggagacaaaagtgaaagcagaatggaggaggcaggcggggagggagctgctggggtcatctaggcaacagaagattgtggctggactagtgtggcgagggtgtgggcgctggagaaaagtgggcaggttcaggagatctttagaaggtaacatcgacaggccttggcaatctgttacatcaggggttggcaagcagttttctatgcatcaaatgtggcccactgcctagtgttgtaagttttctcggaacattcacgctacaacggtagagttgagtagrgtgaatgttccaataaacagagcctgcaaagcctaaaatgtttactgtctggtcctttacagaaaatatttgtctgcccctgggttaggtgcaaagcactgtgggaagtgaggttacagaaagatttgaggttgccacctagattgtggaggttggtgcgtgttgctgagatggaaacccaggaagtggagaaggggataacccagtctttgcagccatgcctcagcctgccattctaccggtttttaactgagccctgccactttgcctggctggctcttcacagccttctcctctgggaaaatggyccctcttcttccttctctgtccagctgtagctctgctaacacttgacggtccttccaaaaccttgaccttgctttcaccgggccacaggatcacttgctgccccccatcaccttgaccaagggacgggtctcttggctgggacccaccttcctgcgtctttctatgtgtgtgttacccccatctgggactccagaaccggatgcagtcattttatcagctttgcaccagtcggtcctttttccctgtgtattagaccattctcacgctactataaacatactaccagagacagggtaatttataaagaaaagaggtttaattgactcacagttctgcatggctggggaggcctcaggaaacttacaatcatggcagaagatgaaggggaatcaaggcacgtcttacatgatggcatgatggcaggatggcaggagagagagagaacaaacgaggagctgccaaacacttataaacccatcagatctcttgagaactcactatcatgagaacagcaagggggaaactgcccccattatgcaatcaccttccaacaggtccctccctcgacatgtggggattaccattcgagatgagatttgagtggggacacagagccaaaccatatcacctttcttcgcccaacccctacccccaccccagctttgttgctgaagccctagaagcctttctgtccacccgagcctgctccagtgggctgagtagcacctgggctgccactgccctttgttcttcctctccctccctccatcccctggagcaatggtaacttgcagggacattgggtgcactgtctcttttggaggccaggaaacaatccctgctgtctctttctaagcaggtcacctttggtgggtgtgtaaatccacttttctgcttgccaaagtgacattttcatgatacccaaagttattaagtggcatctttggacactttctttttaaccaaagtggagtaggctgggaaatgtcaatagtgataatgtacagttacrtctccaatacccttttgattgarcacatgattgaaatagtgcaaactgcagagccctttgcaggraattgccagttaaagaatttgttcagactcacgggtttttgactgtaaactctgagtgttttraataaaatactggctgccatggccctccaaccggaaatgtcaaatgctctgcctggctctgcaacccacataggcaggctcaatgcttctccaacttgggagcccaaactgccctcagtcagaagcatagaaagagtctatcttgctgggtgcggtggctcacgcctgtaatcccagcactttgggaggccgaggtggtggatcacgaggtcagtagttcaagaccagcctggccaagatggtgaaaccccgtctctactaaaaatacaaaaaattaaccgggcgtggtggcacgggcctgtaatcccagctactccagaggctgaggcagagaagtgcttaaacctggaggggcggagcatgcagtgagctgagattgcgccactgcactccagcctgggtgacagagtgagactccatctcaaaaaaaaaaaaaaaaagaaagaaagaaagggtccgtcttgccattttgagaccactgtgctgataacggggttgtatcatcccccacataggagaacctgctctgataagtgtggacagaagtttgaatggaaggaaggagggaaagtagggaggcaagcaggatctggtgaaatcagaacttagatcatggggtagtcacccagtcagtgtccttcaattcaaacttgggctacaggctacaatttctcccagtctgagaccaacagatgccagcttattctcaccacaacactgtctaatgccccctctttattgccaaggacaatccctctctggagctcaacagcttgtgtccttccagaaaagctcctatctatggaggaagggtatcttatccagaccatcatgggcagggagttggaggttgggtgggtggggggtggactcatgccactgtggaaggcccctagtggccagggtgcttgccttgcccagtgcaggctgggcttgtgcagccaggggcattcctttgaccttcctgctggcccctccttggctagatgcaccttgtttctcttacttccatcttcctgtgggcaccctgctcactgtacctcctacaccttgttgcccaattcctacaacattaattagttgttaattaattcattctgtaatttgacaaatatttgttgagctaaggtgctggacattgggaataggatggcaaacaaaacagacatgggtcctgctcttatggagcttatattttaatggagacatatatgccaaaaaaaaaaaaggctatcaattgtgtttagatgttaaaaaaaaaaaaaaacaaaaacttatctctagtgttagaggtcaaggtaggcattgccttaggggacttagtaactggaagaggtatgggtgagcttctgggatgcccgagaaggcagagaatgttttattgctccaggtggtgtttacacaggtgtgttcagtttgtgaaagttcatagagattgtgctatgtgcaagttcctggatagataccaaactttgattaaaagctaaacaactaattaaaaagttaattaattgtaatcatgatgagtgctatgaaggagaagaatacagtatgggaatgcatgagaagtggaccttgcctgagaggtgaagggggctttcctgagaaaggtgcattttatatgggctcgaaaggacaagggagagatgttggggccaacaagaatgtgaggagagcattccaggcatgtgccagggccctggagtaaatgagagcatggcctgtgggtggaagctgggggaagacccatgtggccacagcagagaaggtaaggggtgagggttcttggtgggtggtgaggccagagggtggccagcagaggccagggcagggatagttttctttatgcaaagagtaatgggaaaacaatgaaggatgtgctatggtctgaacgtttgtgtccaccccaaagttcatatcttgaaacttaaaccccatggtgatggtattaagaggtgggacctttaggaagcaattatgtcaggaggatcccacccccatgaacgggattagtgcccatgtaaaagaggtttgagggagcccccggcctcttctgccctgtgagcatgcataaagtcaccatctatgaggaacagaccctcgccagacatcatatattctggagtctcagtcttggacttcccagtccccagaactgtgagcaatgaatttctgttgctaataaattaccctgtctatggtatgtggttataacagctcaaacgaatacaggagagcaccaggctctaactcaggtgttaatgagattctcctggctgatatgtgggacacaagctgtggctgccaagaggcgaagtgggaagaccagtgaaggggctggggcattctttccaggggaggtgagggcatggcttggacaagggtgtgggaaactaagatggaaagaagtgaatgactgccccggggcagtgggggttggggtcctcttcctggatcatctaccaaagttgcccctcagccttcttggatagcagtttggcaacatctagtcaagagctctcaaaacagtcacatcctctgatccagtaattccacttctagagatctgttgtaatagaaatctgaactacgtgaacagtttcattcacaagggcacttggattagttttctcttgctgctgtagcaaattaccacaaacgtagtggtttgaaatcatacaaatttattatcttacaattctggagatcagaagtctgaaatgcatcctactgggctaaaattgatgtgttggcaggatgcattctgtagtatctagaggcgaatccatttccttgccttttccagcttctggaagctgtacgcattccttggctcatggcctcttcctcgagcaatgcagcatcttcaactctcttcctcttctctatccttctttcctatttagaaaaatgcagacagaaacaaataagtgtacatgattcaactaccaagtacaataaataggaattattatttccctgtcatcttatttgttcatcattgttcatgctttttacacttgttatgcaaagcgtaatacttttgaaatttgcccagctttctaccaaatattacagcatcagcatgggccatgttctaagagttctttataagcattttaatggcagcacatgcaatgtgtggggagagattatttaaccattttcttctgtggggggcttaggttgttgcagtgctgaacattagggtgggcagaataacccacccccacccccgataaaaaatgtctatgtccgtgtyctaatccccagaatctgtgaatatgttgccttacactgcaaaaaaggactttatagattaagttaattaagttaattaaagcaattaagttaaagatcttgtgatgggaagattagcttggattattcaggtgggcccaatgtatcacaagggtctttataaatgaaaaatagagtcaggaggaagaggggaaatcttctctctcctcttcctgtctctttttttccctctccctctcatatttagttgtaggcagaaaagtttagaaaccaatgagataggtgaccaattcaggtaccaagagatataaagatgacaaataatgtgaatttccttggaaaatctttggctacattttctggagacatctaaatgtaggagtaaatggcttattaattatgagcctctcaccttggtaattaagcaataaagacccatcaggcagtgcatttgtgggcgattagatctgtgtttggtggagtcagaaacttgcagctgaagattaagtggttttcactacctgagagatgcattaatcacctggagctcccctggctggtggatttggttgctgatttggaatggcatttacacattaaagtgaggaatatccttatgtgccraggagagctctggagtgaagggtagttactcagcagggacacggcgggtttccaggtgtgacatcctgactcagtacagcatctgtccaagggtcacctttgtgctactgtcaaggaggtacagatgggagagatgccccagacactgacgacacacactggcgacacacactggctgtcctgccaggtataaggactggatgtccttccaaaggacagagggagccatgtggggtagcagaagcctgtctgctttagagacagacctaaatttatatactagcttcattctttctataaaatgttgggcaagttacttaaaccttctggtcttcagtgtcttcttctgtaacatagacttagtagtttgcaatagtcagctattgctatgtaaggaaccgagcacaaaatatcagtgacatacaacatgaatacacaaataaataaatgaacatttatttagctcataaatgtggctaaatgatgataaacgtcttcttgggggaacttttgagaccttgaacacaagtcatgctaactgagggccaagtgatcttgtgtgaaagaatcaggctaagagccctctgcctctttctgcctggagcatagcatggctctggtgcagagagctctgaatggaacccattctcatttggcatctaggagttctgcctccctgggtgctctcagaaagtgcatggactggtgagggtgaggctggtggagaggagcaggcaggagtgagtttatagacagggtgcagactcaggcatttggctgatattcacgtgatagcaacaatcattagttgattcattacaggccttccagagattctgtggctccccaaattttgtatgacttttatcatttcatgcctttattcaacaattatttattatgcagctactgcgtgcaggactctgtgatgtacactttagatacgaagaagaataaggcaggactgtccctgccctcaaatggcttgcagtctattgggaaaggagacattgagcatctaatttcatagtgaagtatttactcacagtaacttttgactaacatttctgagcctattttatcatctttgaaattggaatcatagtagtctcctcctagggttgtaagggttgggtgagctatgctgtgtaaaatacttagagcagtactggcatggcatgaaagttgaaattatatatatatatatatatatatatatatatttttttttttttttttttttttttttttttttttgagatggagtcttgctctgtcgcccaggctggagtgcagtggcacgatctcggctcactgcaacctccacctcccgggttcaagcgattcttctgctcagcttcccaagtagctgggactacagacatctgctatcactcctggggagtttttgtattttttaatagagacagggttttgccatattggccaggctggtcttgaactcctgacctcgtgatccacccacctcagcctctcaaagttctgggattacaggcatgagccaccgtgcctagccgaaataattcttattcccagatgaatccaggacagttgaagcatcctgggtttagcagctcagacagctctctgtaggccaggagggtcacctctgaccccaagtcccagcttcaacaactggacttcagtttatggaagtttgtttgagttctggcattcagcttttatttgagagccaacccagaggggcatggaagaaattgaatttatttttatgacagttcttagcacagcctggcgatcaatcatatgtcaagatgctgttttgaaaagaagcaggttataggtggacttcggagacctagctccacttacgaagtgagcagtggtaaacacatcacttgttctctctgctcctcaattttctcacctgtaaagtggaggataataataccaacgttggagtatttcactactgggattcagtgaaataataggagtgaaagcccccaacacatgtttgcctggcagccagtaggcattcaagaaacgcaaactcagccgggcgcggtggctcacgcctgtaatcccagcactttgggaggcagaggcaggtagatcacaaggtcaggagttcaaaaccagcttgcccaagatggtgaaacactgtctttactaaaaatacaaaaattagccgggcatggtggtgggtgcatgtaatcccagctactcgggagcctgaggcagggaattgcttgaacccaggaggcggcggttgcagtgagccaagatcgtgtcactgcactccagcctgggtgacagagcaagactccgtctccaaaaaaaaaaaaagcaaaaaaaagcaaacccacacctataatgtctttggtctttgggtgttcaacagatggcattgaattgactatttaagccattttgcctcatcaatactaattaagacagtcagaatcatgagaccaagtgccatgtatcaatgcatacactccaggccaccaggaaaatatatcacaattataaaacaggtctgttgttcaataaatactttgcaactgattaatcatcccctacatctgtgcagtgcttcagagttaatgaagcagttttattctggttggtatagtgaatgttcacaacaaataggtgaggctggcattaactcattggacaaatatttctgaacaccatgaggaatgttgtagctgtgaagcagacaaggcttctgactcaaggaagacttcaatgtggcttgggaaataggcagttctatgagttacttctcttgggtgtgatcgaggaagaaagtgtacagtacctcaccccctggtaatcacaggaagcttcttaatggagataatgtcaaagccaagtcttaaaatgtgactaggagctttacaggtgaagagaagtgcatttgttagggtaggcgtggctgcagtaataaatagacccaaaggcacaatggctcaatacagctattttaaaaatcgttttttttytctctctctctctctcttttatttttttttgtttgagatggagtttcactcttgttgcccaggctggaagtacattggcaccatcttggttcactgcagcctccacctcctgggttcaagtgattctcctgcctcagcctcttgagtagctgggattacaggcacctgccaccatgcccggctaattttttgtatttttagtggagatggggtttcaccatattggccaggctggtctcgaactcctgacatcaggtgatccacctgcctcggcctcccaaagtgctggggttacaggtgtgagccaccacaccctgcctaaaaattattcttaataaacatttacttttggaataaatttagattcatggaaaagttacgaagataatatagagagtccccatctactctttattcagttttaccaaatagtaacaacttacattgccatggcacatttgtgggttactgttaacaccagattttgttgaggtttaatcagttgtgtttttttcctacttacatgctttttctgttccaggatgcaatcaaagatacctcattgcattcagtgtggtatgttggattggcaacaggagcaatagtcctttacttggtcactcggtcacctaggtggacagcagccctgacttacatcctcagtgcatggcttccaagtttgtcctgctcatttccaccccagcaagctgaaagagagaatgtgcctggaggaacacctgcaaggcactttagggcagggcctgggagtcacagccatcacttctgttcccatttcattggtgaaaactagtcttgaggttctgaatcttctgctcagttttgctgtgaacctaaagctcctcttaaaaacgttaaagtcagctggctgcggtgcctgtaatcccagaactttgggtggccaaggcaagaggatcacttgagcccaggagttcaggaccagcctgagcaacaaagggagaacccgtgtctatgaaaaatacaaaaattagctgggcatggtgctgcacacacgtaatcccagctacttgggaggctgaggtggtaggatcacttcagcccgagaggttgaggttgcagtgagccatgattgtaccacagacctccagcctgggtgacagagtgagactctgtctcaaaagagaaaataaataaataaaattgaatctatttttttttaattatactttaagttttagggtacatgtgcacaatgtaaaaaagccttgtcttgaagccacacatagccaacatagggtaggaaatatactctctagctgagtagctgcttcctagctacagccctgtgtgatggaaggtgagagtgaatttgggagagagcaagtcgtctctgccataaggaggatgtaggagtgtatatgaagcagagaaaattgcattaataaaagcagggaggaagggcaagtggtaatattgccctttggaaggcaggaaggttacaggacccagctgggactgcacagctgttaagcagtgctgcaggagctcaaaccccactccctgccccggctcccacaccaatgcgctcatccccttgatccaaaggccttcagacccacaggctgatctgcaggagaagccatagagatgtgtttaatctcataaatttctttaatggcatttttatcagaagttttacaactgtttaatttaaaagttaggcttttccccaaattcgttcattctacctgaaaagagcaagtggtgagagagcttacgagatcctctaagggccctcattgatttgcttttcccaccaggctctgggctgcatctgtgcccagaggctcagtcacagctgggcatgagaaaaacgtgtgtgcatcagaggcagtgtgtctgcctgtcatctcctgtgtgakgctggtgtctgtttatttctggccggatggaatataattgctccctgggctgacastgacaaatggtggtgtggggagtattcctctgagtggtgggatgcacttgtgcacctaggcggacagaagcaggccctgtcacacagcawcgtggggtttgcttctcagtttgaggcctcccaggcatggagaaagttccaggtgggtgggctgtgagctgccttggggactagtgtctgtgtcttttgagatgtgaagggcagccagggatatttcaggcccycttcttctcgggtgctgtcttcatgtcccagctctaacacgaaggacccggggcgccagaacaccagggcactaattgcagcttgatttacagtggaggactgtctgattcctctgcaaagccatcagaatggaaatacrgttgaccctcagtatcctcaggagattggttccggcaccctccttggatactaaaattcttggatgctcaagttcttcatataaaatgaggtcrtatttgcatgtaatttatacacatcctcctgtatactttaaatcatctctaggttacttacaacacccagtgcaatacaaatgctatgtaaatagttgttttactgtatttctttatttgtattattattatttttattttgctttaagttctgagatacatgtgcagaacgtgcaggtttgttacatagrtatacatgtgccatggtggtttcctgcacccatcaacccgtcatctaggttttragcccttcatgcattaggtatttgtcttaatgccttaatgctctcccttcccttgtccccccaacaacctcctgacaggccccagtgtgtgatgttaccctccctgtgtccatgtgttctcattgttcaacccccacttatgagtgaaaacatgcggtgtttggttttctgttcctgtgttagtttgctggtattttactgttgtattgttatttctaattgttttttcttcaaatattttcagtccatgattggttgaatctgcagatgcagaacctgcaaatatggaaggctggcaatagctgtattgggcttttctgctcttattctaaaagtagcccacatcttttgggaaaagtctgggcaatgtggaagagtgaaaggagaaagcaaagttgatcccaaatatttctagccagacctaatcatgttagaattttgctgtttctttctgtgaaggagactaggcggttgctgggtatacagcaaggctacacctctcagcccctttgcagttaggggttaccctgtggttatgttttagtggtatttgggaagaaatgagtcacctccagccctggccctgtaaacaccccacccccactgtttcttccctcttctgatggtgagatacagagggtccagagggggacttcaagactctttgggacagtggagccaccgatagaaggagcctgggcttttcaatgacaaagtgaagcagagccaccctgcagattcatttttgactgtgacacgagcgaaaaagaaatctttcttgtgttaaatctttgaggttactgaggttcacttaccctgaatagaacaccttccaaacacttgccgtgggcatgtgtgtgcacacacgcacatgcacaataatggaatcatatcttgacttattttttgcaacctacttcagtctctcaaaaaggatatgaacagctctccatgataaagacatatttatccaatcaccttaatggctgcatataattccattatatgtatgtaccctactttacttcatgattttcctatttctgggcatttgggttgtttcaggttttaaatttttatgcacttctgttatgaacaggctggtacatatctttgtgtatatatacaaccatttccttgggacatcttcctagaaattgaattacttggccacatttatatggtgtttgatcatcataggaatatcttcttggaaaagaggtattgatttataattctaccaagagcatatgagaggtctaatttcccaaaaccatcaattgtctgaaaactaatctgattagtaaaaaataatagcttgttttaatgtgttattctttgttgattgattatgttgagcaactttttcttgcttattggacctttatattaccagttgctacttctttatgcatttttttctttggggagctttacacatctcttattattttgcaagagccctttgcgtattaaggataatatgtgtttttcgacacattagtagtaaagaataaactaaataaatttatttagtttttaacagatttgtcttctttatactctttttatatagagatgtttttaatttttatttcagtctttcttccttgcttttaaccttattacacttttaggcaaccaaagcaagaatatgaaaagatacttcagattttcttctagcacttttattgttttgttttgttttgccttcgagtttttaatctttctagaatatatttctgtataaaggggatgtaatcatctgactttaatttattctgaaggccaggaagatagaaggagaataaggcatattcaaagcactagaagctgaggatggctggcctgtagccctggaggagatgtttagccctgagcctggagggattgtcagggctgagtgatgagggtgatggactccatgtagaacctgctgagcctcaggtgcctytgggcatcaaaatgtgctgatgaggaacttaagtgtggaatgaattttggtgcttaaatccctggtactggaccatggaataaackcaggagaaatgaatgcatatttctataaacattcccacataagaatgttggtaatagctttatttgtaatagtctccaaatgaaaacaacccaaatgacatccaaagtagaatggatacattgttgtattgtactgctacagtggaatactatttatcaacagaaagggactggctatctgtacactccataatgtgaattaacckcaaaacttatrtgttgaacaaacaaagctggacgcaaacagtatatactgtaggattccatatatatgacattcacaaacaggcaaaactactcatgttgatgaactccaaaacagtggttccctatgggggtgtggcattacctaggttagggaacaagataattctggagggctggaaatrtattctctatattgggttggatgacaggtatgtgaatgtatagaaattcattaggctgtacacttaagatttgtttattttactgaatgcaaattacagctcagaagaaaatagtgggaaaggattaaaatattcaacattagtttacagacgaagcaactgaaacccagaaggtgaggtgactggctctgagttaatgttttagaccaaggctgcctgatttcaacgctggagccaggggagaataaaactgtgatttcctccatcaccaatcggatggaggtacagctagctctaggttccatccctgagagggttttggggggaacaacagccagtatgagggttacagtcaatgaggcagcagtcccaacagaaatctagcacaaatgtggaaactgaggcagaaactccattttatagttttatgctcttcagcggtgcgtgtcagtgtgaactggcagcacctgcttactgggggccaggaacagagttctcctgatccctcactcctttagcacatctagcttggcaaaggcaagcagcatgaccaagtgtggagatcagcattctaagcccacaccctgactccatgaaaaaccagacctggcaagaaccaaacagcagtacacacagttccataactggagaagccatgccaggatctaaatataatctaggagaactttaaacacagcttcacagggacacacctatgggatcatttatgccagttttttccttaagatgtccccaaggcttgcatggggcactgatagtgacagcagagcagtgtcattggtattaaatatgcatcaatgacacttgcaatccagaaacaactcagacccaacacacctccctgctgccttctagagtcccggcccagcctctgcccttggcctcagccctatgcagggacttaggaaaatgggcaatgattgcaggtttgtgctttcctcttgagtttgtggaaggaggctagtaccttctcatggtagcctctaaggaaactggcacagacgtttactgaatcaagagcagttcatctctaaggttatatttccaagggagaaaaagcaattgttacagtccttaaatgtagcaaaggcagacctcatttagaggtgattgctgcatcctagggaccagcagcttttgctgccagacacaagttaaccacagggcgctggtgccaattcagaggcctcctagaccttctgttccccaggaggaagtagcccacagacaggaagagtcattataaaaagaggctgggggtggagagtggagggagcagtgtccctgtgtattctgcttccactgaggaggaatccaggaaagagagagtttcactaaagcccctgggattctagcagcacctagaagtgtttccttccagtggccacattgtgcttgaagcctcctgggtggggtgtgctttatgcgggagccctagtcactgccctcagaaggcttgcagtctgctaaaggacacagcacctccaattacatacaaagagaatccatattgaggaccacatatactagtattcacttaccttggggtcccagctacttgcagagagcattgtgaatgggttagcagtgggaattaaatgaaagggccgtctatagagatgtaccctgaggcaattttgctccctatgagaaattggcaatattcccccagaggacatttttggtcacattttggtcacaacctggcgagtgtgctactggcacacagtgagtagatgccaggaatgctttgaaatatccaacaacacacaagacaagatgaccctccatcacaaacagttgtttggcctcaaataccaatagaactgaggttgrgaaatgctgctgtaggagaatgtagccactgtacaaaccatggaaaagcagggagagaatcactgcccaacctcgccatcctcctattctccaatcccatgcctgtacctcctattggctgaatataaccagaagttcgaaaccaagagcccattgaggcaacctgtagaagtcggcttccagaacatcagtcattgatacccttagaggttgagcgaaccagactcaacccagagttcccagtgagcctggtcctcctcagacaacaggatgggtgctcagcaaccctgtgttgttcttttttcatctgtgcttctgccgatgctcttttaatgtttgctgtcaaaatgagggcaggccatggaagtgggagatttctctgggttcagggaagagaaaatgtgcaggatgctgaaagagagctcggtaatgctgctgaaatatggattttcatacagttcaaaaacttctcacctcccacccggcttggatgagaacgtaagaattaaggagctgcaacatttttctagcacaatgaactttaaaaatggaattgctgtgcaaagcaatgactgatatttcagcaaacaggctaagtacaattgcattatggttatttcagctttgacatttctttgcatttagaatagcatcagcagagatgtttggagaccaagttgttctyccttctcagagcccagcttcttcaagtcaggggtcaaagagcatcaatggaagagactataatgtcatgccgtgccctgtagactctagattaatcattccattctcttgctggtcacttactgtccctcctttaatagtaatggcatgcctttagacatcgtgaggcagaaacttggaatgtattagaaatctatcaaatgaacttcttggaaaacaaaagtatggcatagagacaagaaaacaggtttgctgctcacctagtgggtgccaggactctactagctgctttgcrtaagttacatatgttgctaagacragaagcttcccccatctagccttgcttccctgtaactatggtctctggggccacaaaaagaaagrcgatgaagasaaattccagggtggtttgcagattttcaggtgaatggtataacttggaatccttgtatacatcacagatcaggcagcatggaattaaacattaaatcctgctcaaagggcagaattttgcagaaatttatatagatttaagcctctacaatgttctattccatcagcataatcacccatagttcataataagcactaaggatattattaggactgtggaaagaccgtgcaggaacatctggcctttggcctcattttggggtgtttgtcctcatggagttcacccagaaaactcacacagccttgatggggaccatccagtcgacacatgaaagcttccatcttggtcacagtgtgtccaactccttcacatggagaattctgttcagagtcttagggatgttgatccccaagctggcgtgaatcccaaggatcctatttctggccagctagctttgcatcagccrcaagctggcatggagcaacactttaaggtaaatgcacgtggctgtattgtcggtggttacatcagtgcaatattcgtcagaagagtaactctaagccggtactgatgggaatcggaaaatccatgagggtgagttgggtttgagattagtagagttgggtttgagatacccctctgtgccgtgtgagtccattttcttctttatgggtttgtcaagatcagcagtgactgggctaataatacacactcccaccaacagtatatgagattactttttgtggcaattcctcaaagacctaaaaacagaaataccattagacccagcagccccattacgattatactcaaaggaatataaatcattgtattataaacacacatacatgtgtatgttcattgcagcactattcacgatagcaaaaacatggaatcaacctaaatgcccaacaatggtagactggataaagaaaacatggtacatgtaccatacaaaagaatgagatcatgtctttttcagggacgtggatggagctgaaggccattaaacttagaaaactaacgctggaagacaaaaccaaatactgtgtgttgtcacttataagtgggaggtaaatgatgagaacacatggacacatagaggggaacaacacacactggggcctttcagagggtggaaggtgggagaagggagatgatcaggaaaaatatctaaagggtactaggtttaatacctgagtgatgaacaccaggggtctctacaacaaacccccatgacacaagtttatctatataacaaacctgtacttataccyctgaatgtaaaagtttaaaacaaacaccaacagtgacaatactaactacctttcagttaaacaagtaattcattcatttaactgaaagaatrtttctattkgtaattgcccaatgggttggccatgggaaaggtctcctgggtcaggggaatggctgttccagccttcctgagaatttcaacattggagctgggctatkgggcttatccaggtaaaggaagcaaaggtgaggtacacatttccagtttttctctacataggaaactcaaccattttcttcgtatgtctatttttgcttgatagtttgtttttgtttttacaattttatacaagcaaaagttgctactccacaatgactttctgtccccttgctattgattgtctggatccatttgctcttctactcacctggaaacattaaaaaaatggtgagaagggctaatagtttgacctctggtagcagagttgtctgggctgggctgcccaagggtgtcatgaaaggtggggttatgagtcagttttacttgtattagcagagggatggagattctaggggaattctacctgcccatgacctgtctctggctctgagacctcctgtgatctgggggactactgtgttagttgcagaggccctttttgcagagcaaggggtaggagcagagtagccattctgtacatttagagtgaaacagtggtaagggtttggaggtattcacggagcagactgtctggttgctattgctgtattcctagggtctagaataataactgatatataatgagtacttaatatacatttaaataagtgaatgaaggaatcaatgaatgagttgtggggtgagcccgcaaaacaagcctttgaggtcattgcttaaggcaatacagcctttccatggaagagctgaacttccaaccctaaccatcctgcctctgccacactgggttgccttctgtatgtataggatgttagtctttcccagtagygaaaagtgtctggcaaagcaaaagtgcaggggagagagacacgcatccctctcactgttattcccttagacatttggctggtggtggtctcagaccctggtgcggagtagctctttctgattgaaggcacatcatgmtatgcagcttcctcatgaacattgaatctggctctccctgggcaccagcaatgtcactcagttgaggatgaattgactaagcaataatgttcattgaacttctttaaactaacaacattgtgcaatgtgtttcgtggccaacagccatcattctgcatcctcatagaaagtcacaaagaggacagggctcataccatgcacaggttctggagtgagaaaaatctttgattctaatctgctcttctaagttgtgagaacttctgagagttacttcatgtctctgagctttaatttcttcatctatctattatagataggrawatatatatatatagggatagcgaattgatgctcaaatactcaagtatataaaaattcaagtgaygcagtgatattcttggtttcaggaaggtggggtttccaccgccaawatccacttacttcatgattttaaggaagtcgcttagctcccagcctragtgttctcatttgtaaatatgagatgttgatattcaccatcctgccctgtctcacaagctaattgcagggttctagtgagatgtaaaagatgagaaggagatggaagaattcagctgcagactcagtcacacttctcttcagttgcaggagagggccatgtgcctcaagtaacttaaggatggaggctgtacatacaattggccaggatgggaaaatattgctgaccctgtgggttttgtgatctgagctaggcaagtccctgcctgaggagatagtgtgaacaaacgcagagagaaagattttcaatagagtctttgtcgcttaatagatgtgtgccttgagagagttacatcacttctctgggcctcagttttatcatcttatctctttccagtcttggcataaatgtcacctcttagaaaggcttttttatattaatcggctttatggtggtaacagaaaaatcctatcattggcttacatgacaaacttgttttttccttgctcacgtccctcctaggtgtgggcttgctggaggcatggctctcgccacatgttttctcattccacaagcaggtgggaggaccagcccttgtctaggacatttcattttcatggtagacgatagacataagagattgagctaagtgacacaggtacattcctttagatgttctgtacagcaatacctgctcatattccattkgtcaaaacaagtcatatggcaaacctcctgtctctggggcaaggaggtctcctcagccagcggggaaggactataagttacgtggcggtgtccgggatgccgggatgcatagtcatcttggagtggaagaaataatggatattgaacaataacacatcctagcacaacttccctgacttccctattgggagttgcagttgcttgctagcaacacctaaactgcctgccgtgattgctgctttatttttctctcgtactcatcatgttctattatcgttctgtatggtttacttatttagtttttaaattttctatctgcacctggcckccctagactgtcagctccatgagggcagggatttttatcagtatttctatgactgtatcctcagaccctgggaaagtagcatgaatactttgagttgattaattaaacaatcttttacatgaagataaacaatggatgatgtaccaagtgcctctctgagcattaaatccttccttccaggcccagagcattctgtacccattagatttccatctgtccccaggagtgtagcagcaatgctctgaattattctgaaggtcacattggagagctggactgtctgtcacctcccacaatctgatctgctgacaagaattcacctgtctctgtagatgaaatactaggataagcaattgggacaggcagctcctactccataacacaatactttcctgaaaaattgcataaaagtcaaatgtctgtgttggaacggttgacttagsttttctttttgtggtagggagtgaggaggtttgcttcaagaaatctaaaaaataataactccccaacttgcctcaccttttacataaaatcttcaaagctctgtttccaacattcaatatatctttaattttgttcttttcwttgacacttgagcacaaatttgaccagcttaagtccaataagcatccaattgaaactaaaaatgtaccacttccaatgatgcttaatgatttccatcattgcctcgggtttatgggcctgcacttatcatcaaaaatgcgagtggttccataatttcacttcagttttcagtttttacagaacaataatgactgacaacatgagaaagattttaaatatttattcatcccagcatatttcctgagtacccactaagaggctgttactcttgtaggcaattgggacctgtgctgagcagtgaggacagcctccctgccctcacagagtctgcaagccctttggggatataattgtgtcaatgacattgtgcaaagagatgatgcagccagcatttagcwagtggtgggcaaaatttgttatcctgtgatagctctattttaaaaaatccattaatgcacgaagcttaagttttacagaatttttttttaagaatttcagtaggtttgggggtacaagtgctttttggatacacaaagacatacagattagtattatagacattggagtaaaaatattttaaggatgcccctgaatggcatacaagagggagaattgctcagttgaagaaacaaaattcaaggactctctgtaggcaattacggactcttttctcttctcccaagaacgttttttttggtctgaaaatcctgcaaagattatattgccttagatataggtgctctaggatcaaggaacacccaggccttttccttttaccactttctgcggccttggtgacattttctactctgctgtccctgccagaaactttgacatcatcttagatgctaccattcattcaccaaacggttgctcagacccatcagctccaccttagaaatgtcttctgcatccacagttttcccctccatcctgctactgctgcttggtagaaaaaactaagctccatcctggaatactgcaacagcctcctgcttcaggtctcaacccagtcctggctgccccgtgactggataaactctaatctggacatttcaccctcttctctgggttacagaggaaaactgagtgagaacaaaaataaaaaggtgtgtgtaaaagtcacggtgtgggagagaaagtgaaagtgtgggggagagaggtcaagtaaaagtatgtgtaagaaagaaaatgaaagtgcaagagagagaatgtaaaactattaactgtgagaatgaagtaaacatggatataagagagaaggtaaaagtcagtgacagagaaaaagaaaaagtgttgggggaaaggagaaaggaagacagcatgcatgagaggaaaagcaaaaatggcttagagaaaagaaaaatggtcagtaagaaggaaagtaaatgtgagtggaagggggagatagaaggtaaaartgagagagagtgaaaatgggctgagagaaagtaaatgcatatgtgggagaaagaaaggaaaaatgtgtggagaagaaagactggtgtgtgtttggcacagaatggcacatagtgaggaagaagaaataaatttaaagaactcttttgggaagagattttgtttgagctagcctatcattgaattttatgctacttccaattttccattattataccatttcagagagcattgttgtacatgcgtcattgcaagttcacatgattctttcaggtaaattcctagaagtagagttgccaagtgaaaacttattcacattttgaaattttagatgtagaatagagatatagactaaaaagggccaggctgacctcyaaaattgactgtaccgctactcaaggcggttcttattgcccttgcctgccagtacctgagactatttttcattttaatgaataaaaacatcatatatcaaaaatcttattgttttaattttcatttctttgatacccaaagtggaactgttgttcaygcttcctggctacttgtatttcttcttttctaaactacgaatttacttcccttgtacatttttctttggggatactcattagttttctcattgatttgtaagaacagtttatgtattaacagcattaatcttggttggttctatgcatggcaaatattttccaatttagacatgtgcctttgaatgtgttgatggcctaggatcatgagaaaatatgatcctttatgtgattaaatgtatttatttttaatggttttggtttcgatgtattgtaaaaacattttcgtgcaaaaaattttatattcatctaaattgtggtgtcatttttgtttgcttttgtgctacactgagagctttatttcatctagcatttattttgggataagattggatatttttcacacacttaacccattatggcaagactattgaataatgtaacattgttctgctgcattgatcgatctttagattctgaatttttatttatgtttgtgtttgcttctggatgttttgctctgtgcttcatatgtgtcttcagtggcatctgccatctctcttcccaattcaggttaaggaggtattgtttgcctatatctgattcccagggtatctgaaattgctcaggaagctggtttgaaagttattcctttcatgtattccttcatctggtctcatcttcatcatgagtccagcaacaaaccttgaggcttttatgctgttgtaggtttccctatatttattcccttaatagtttctgtgaggaacacagcacctgttgaaaagaattctctagaggttagaaaagaatgatgcacagcaaagttggtgttatagactgatggtaacataagagaagcatccccttcatgtataggtggtaatgaaagtttgagatcagtcagattatccaggaattgctaaatagtagaaagggattaagaatgactggaaccctagggaaaacaaacaagcaaggaatggggaaggtccaggaaaacaaagtactcaaggatgtgggtatagtagtcataccaatgtttatctgggaaaacctaggtaggtgaagggttccagaaggcagggctagtcagccagacccccattcaacaagtaaggccacaggttttctcagagagttcaaggggcagaccgtaagtcaacaagctagaaattgccaatgcataatttgaacttagagattcaaacttctttctatcacagatgtagacacgaacactaaaagctaagcttattacaccagataagcattgactaacacattttgcatrgagggaaaatgcacttagtcaaacaaacaaaaaaaatctctgtttagccatccatttcaaatttttatagaaaatagtgtaggcagcatcaattatgcttgggcaaatttagactaattaatgggttgactaagataattattgaaatttgtctatggatgaaaagaggaaagatgaaccatttaaattgctttttgtgtgtgcctgatgactatttctaaaagaatgagcccacggggaagtgtatgaaatgggagtggcccagctctttgcagggtatgatgatagagtaacaaggcagatgttttaatcaatacaccaggattaatgccttaaaacgtctaatatgcataaatccataaaacataccccttatataaagagatatataatttgttgagggtcaacaatgtgcaagaattcttccagatgttttatgtgtttgattacctttcatctatgaaaaacaatgcatgaagaagctatcattaccccaatttatacaccaggcccctgaagcatagagaggttaagtacattacccagttatacacacagtaaggggagaatcgagtccaattccgatgaccacattctgtgccctgtatcttttcaaagaagcctcctttggtggcaatttacttgtggtaatgaggaggccatggctcaaatcagacttagacacactgagaaatgctttcaaaaccaagtgtatgatagatacatagtgcatcatgcttatttcctttcagtgttttctggaagggctttcagttttattccacagatgtaatctgggttttctctttttttccacaggtgtaatcttgagcaatttctaaaacttagatctacctataaaggatgcagcttagccccgcaatgcaataaatgtctgtgccaggagccaaagtggttcctttgtaccagtcggaatttgtgtctaggcaagagataccatgggttaatagggggtaacttggctttggatcaagaatgcaactaggtctgctattcactggttgtgtgttttgaggtgggatatctattctattggattcaackgatagaaactcaactaaaaaaaaaccctaatccaaagaataatttcatggttcatataatttaaaagctcaggggtggcatttgccttatgcctatcttcatttcctccctctctccctctctcccctttcccttcccactcacatcactgcttttctctttgttattttcatttgctagtgagtcccttcaagaaattggaacggtggtctggagatacttctagtctttaatggcaggctctcactgtccttcctraagtcacatacgtacccctatggcaagaaagttggggaggtgattggcaacctatcaggataacatggaggagagtgacaattcacaaaagcaaggggcgtacagaagacaaagcgatagctattcaatacagagtggtcattctataaatggctctcgtgatttttcaattgcaaattagcccacagtcttcctaaaaattacaaaatctcgagccattcacagttcatgcccattttcaatttgaaacaaacagtctggtctttgtctaagcacttttggcaaagttttgaagtatttattccattaatttttgagatagaaataaatcaaagtagatatctgccctggagattttcttgacccactaccacgattttccacagtagtgttgagatgccctaggtgtgtctgatcaatgggaaataaggcagtgttgtcgcagctggctactagagactgtgcatcacataaaccacaaccttcccctcccattcaccagctgtggcgagggtttgccactgaggggcatgtgtttacacatggctctaagcagatgaataaacaggtgcctcttcacatggatagttctccaagatttatttcatggaggtgagatgaacctgacttttctgttgatctctagtgcaggtagttgagttaatgatgggccacagtttatagcattcaatcacattggtacacaaagcactcctgcttgtttcttttattgagtaaccctcttatctccttcttctctgctcccgtgtccctccccaaccccactgcccacttaatacatttaatttacactgctttgtttgtgttcaggaaaaatttactttgttaatctgagtattttaaacgtacacggataaatcatttatcactcattctacttcaccctttttttttcaatcagtactatttttttaacttccatccagattactgtatgtacatttcacacattacttctaagctttgcatcatagtctacacttttgttatccattaccccgtaatcggtgagcagactgtctccaaatcaccgctactgcctatgatgttctgatacactttcacccagagggccctgtgagaagttctctggactataaattggagttgaatgtctgggtttacattagattagttggactaagtataacagattgttttgcaaaatgcctgcactagtccatgctcccgagctgcaggtgagtttctagagctccccagctctgccctggagtagcactacctagctttcttatttctctgccaacctattcagtgtaaatgactgtacattgtgttcatcttcatttctctgataactaatgagttggagcatcagtccaatgctccttaatattttgccttccctcttctttattgactgttcacataacacctgcgcgtttcttggagaaagggttcctgtgttttctattaaattttcacgagttgcatttatatcctggatattatttggttgtcgatttaagacatcacaagtatcttttcccaatctgtgttctgcttattttactgaatatacatccataatttttagataataaaattcctcagtgctttgatttatgatgtgtgtctttcaagtcttaagtcctccacccttaagtcacaagtatagtcttctatattttctcttaataactttatagtttcagtttttatgttttgttatttgatccatttgaaatctatctttgcatgttttatttttttccatagggtgatccagtatttccaacatatctacaaatctgtccatcacttttttattgatgtgcaatttaacatttattacatgatatatttttatattttcattggcctttctcagagctcattattcaattccactattactgtgccttttgttctgtttcagtattggattgggcaagtcaccatccttcatcttagctagtcatggattkttattctttcttataaattttaagctaagtttatctagttcttataggagtccaattagaatttttacaagattgcattgagtttgtaaattaatttmataataatatagcacatttgttatatcattgtatcctatccaagatcatagaatgcctggatttgttgagttttttcatgtccattaccttatcagattttttaaaaagttgtcttcatataggtcttaggagttcttgattgttgattcttaaacatattatagtttttgttatcatagtatatggtatcttttttaactgtgttttttagttacttaytgatggtgtagaaaaatgctattgattttctggagttgatattatatctagctacctagtaaaacttattgattctaatagtttgttgactgtgtggcattctctgtatatatgattgtattatctgcaaataatgacaattatatgtcttcctttctaatatttacacctcattctgatccttttctctttctttgataagcagaacctgggatatagggacctttgtgttttctttaatattaaagggaatatttctacagtttctcaaaaatgtatactatttactataggttttaggtataacctttaacaagttaagaatgttatcttttattcttagtttgctgaaagatttaatcaaaagtagaggttgaactttatcagtcttttatctgtcaattaatgatgtgatttttattctaagactcgacttgcttttctattaataaaaatatttcctcatttgaaaataatgcatctattcccttctgtgactataaagtctctaaataatatatttttttttcattttacagtgtttctatcacatatacrtatagaaagtttatgtcactcagactaattaaggaaagagataacttacaaggatatagaaaataattttagtatttcttggtgtccatgttagcaagtttccacttttctgaacttttcacttactgtagagcttcttaggtagcatttttacaagatttttgctaatgtaacatgtaattttctaaataagtgttagagttctgaggctcaaaattcaaaacacayaaaagygtacacaggcatacctcattttattgtactttgctttattgagctttatagatattgtatgtttttacaaattgaaggtttgtggcaaccctgaatcragcaagtctataaggcactattttttttaacagcatgtgctaactttatgtctctgtgttacgtwtcagtaattctcttaatatttcaaacgttttcattactattagatctatgacagtgatatgtaataagtgatctttgatgttgtaattgtttggggatgcacaaacgttgcctttctagcaatgagcaaacrtagtgggtaaatgttgtatgtgttctgactgtccactgaccatccattctcctgtcattctccctctcctgggcccccatattccccgaaacaaaaaaatattgaaattaggccaattaattaccctacgatggcttctaagtgttcaagtgaaaggaagagtcacaggtctctcactttaaatccaaagctagacgtgattaagcttagtgaggaaggcatgctgaaagccaagacagacaggcaccaagctggacctcttacacaaagcagttagttaagttggaaacactgttaaaggaaattaaatatggcctgagaaggactccgtatttctttctctttctttcttgttttttttttctttttttgtctgttgtttgttagaattgaaaacctaactagtagtatgcagctgtaacaatagctaagtcttggccaatcccagtggccgtacttcaaccaatcatacactgctgagtgttcaaactgtgttcaaataatgcatacgccaagctgtaaccaatccagccattctgtacctcaccttcaatttctgtacattatttccccccttttttgtgtataaatcttcttccaccacgtggctgygctggagtctctgtgaatctgctgtaattctggggtttgcccgatttgtgaatcgttcattgctcaattaaacacctttaaatttaatttggctgaagattttcttttatcagtgcaaatggaaagttcttgaagaaaattaaaagtgctactataatgagcacacaaatacaccagraatgtttacctatgtatacatrtatttgtatgtattgaaagagatataagaaatattatgtataactatttatagatatagatatttaaactaatatagaaaaaaacacatatacatataaatgtctatctgagatataaacaatatctaaaacaggaaatgaagacacacacttagaaacatacagatgcatttaatttctcctaacttgttgctattcttgtggaccttgttgctaacttctgtgagtgaagatggcctaacagcctatgggagtctttcattgccagctccatgtgacctgccctagggtcaaacccagaatagagatttaaccagacccagcccaagtgccttcaaccaattgtgagagtgctgaccacttctcaaaagattttcaatcaagattggttctcttttattaaacatgtgatgtggatataaatcattgtgtttcagtttgagtaggaagagaagactctttctgggtaggggagtaaagcctaggtttgtttcctcaggataggctggggaattgaaagtgtgggttgagcaaaatggtacctgggaaaaaaagaatctcgccakagtgggtgtgcattgagtgcaaaaagtggcttttggtggcaggcaaatggccgtttgtgtggagggctgcacacactgctgtcagctggctctggctgcttctagctggacttgcagaatcctactagggtggtttgatgaacccctggwttaaaaactcctgtttgccaggtaactgagaattgtttcacacatataagaagcatgggaaaaggtgtgtggcttgaccggtactacggaattccaaggtaaaagtccagcagagtttactttgccagcacaggtggatagataagggtatgaccttaacggggcctggtctgaggatccaggcaggtctgaagtggcagaagttaaatgtgcatgggcaagccaggaaggaaaacagagccctgaggcacttggcttggtgtctggccgtatgttccttcacagcactgctagttttctgcccaggccttggatctaaaggcgaagctggggagtgtacagccatagaagacccatgtctgggtcagacacagtggctcacaccagtagcctagcactttggcaggttgaggcaggaggatcactagagctcagaagttcgagaccagcctgggcaacataatgagaccttgtctctcttaagaataaaaatgtttttaaataaaaaaagaagacccaygtctgttattcttaaaagctcrggaatgtatagcttacacaagacttgartgcaagaccatgtgatcttacttgcttactaggcttttggtgcctgcattctcmcataaacagccaggctactctctgtgctctctcctgagagaggagtggaaagtctcccaagtgctgagacaataaatgtcccctctacccaaagtctggcatrcagtgggttttcttacatatctgtgatatgctccagacaacaggagtgaaacagtcatattgctgatacatagagagtttgagtggtctagacagaagatcaaaccagccgcagcattcccttaagccraagcctaatccaaagcaaggtcctaactctcttcaattccataaaggctgagagaggtgaggaagtagcagaagaaaattttagagccagcagagcttggctcatcaggtttaaggaaataagttttcttcataacagaagtgtaaggtgaagcagccaatgcttatgcagaagctgtagcaagttattcagcatgtgtagctaagataattgatgaaggtggctagactaaacagatgatttttagtgtagacaaaagtcttaagttggaagaagatgccatctaggactttcgtagctagagagaaacaaatgtctggcttcaaagcctcaatggacagacttgctctctagtgagggggtaatgcaactggtgactcttgagttgaagactgtgcttatttaccattccaaaaatcctgggactcttaaacaytacgctaaatctaccctgcctgtgctctgtaaatggaacaacaaagcctggatgacagcacatttgtttacagcagggtttactgaagattttaagcccactattgagaccaactcctcagaaataaaagatttatttctaaatattactgcccatggacaatgtacatggtaattcaagagctctaatggagatgtacaaaaagattaacgttgttttcatgcctgctaacacaatatccattctacagaccatggatcaagaagtcattttgacttttgggtcttrtttaagaaatacattttgtaaggctacagctgccatagatattgattcctctgatggatatgggcaaaataaatgggaaaccttcaggaaaggattcgccattctagatgccattaaggayattcatgattcatgagaatgtcaagatattaataataacaggagtgtgggagaagttgattctaaccctcacagatgacttcgaggggttcaagacttcaatggaagaagtcgttccacatgtggtggaaatagcaaaataaatagaattagatatgaagcctgaagatatagctgaattgatgcaatctcatgataaaattttaacaaatgaggaattgcttcttatggacaagcaaagaaagtggtttcttgagatggaatcttttattgatgaagatgctgtaaacactggtaaaatgacaacaaaggatttagaaaattatataaasttacttgataaagtagtggcatggtttaagaggattgattctaattttgaaagaagttctacatttgggtaaaaggctgtcaatcaaagagcatctcatgctgcagagtaatcttctgtgaaaggaagagtccattgataccgcaaacttcactgttgttttatttttaaaaactgccacagccactccaacattcagcaaccagcacgctgatcagtcagcagccatcaacatcgagacaagaccctccaccaacaaaaagattacaacttgctgaaggctcagatgatccttagcatttttcagcarcaaagtatttttcagtaagtaatgttcatgtattttagacataattctgttgaacacttaatagactatagtgtacacataacttttatagacctcttgttcagtaccttcttttagtcactgctcaatatatcttggaagtcacttgattacataaagagctttttaaaatggctatgatttcatgatatgaatgaaacttggtggatttaacagtcccctgctaatagatatataagtagtttgcagtcatttgttcttataaacattatttcatgcatgtgtgagtatattagtaggaaaaattcttagaagtagaattctttgtcctaaggtaattgcagatgtaatttccatagatttgttcaattatcttctctacatagattgtgtcacgtctcagctcttacagaattacataacagtgcttgtttcctctacatcctcacaacaaagtatacatttttaacttgtcctgtctaaaatgtgaaaaattgtatctcagtaaaatttcattttatgtgtctggaatttgaccatcttttcaaatgtttatgagtcatttgtattttttttccccctggaaactatctcctgtgccagtttttctgttggcttattaataaataaggtttgttttttattgactgatttgtagtacttctttctatattaggaaaactatgagttatgcttttttcagtttaaagtttttgacatartatattaattagtctgttcttatgctgctaataaagacctacccaagactgggtaatttataaaggaaagaggcttaatttacttacagttccacatggcttgggagacctcacaatcatggcagaggaagagcaaagacacaacttaccttgtggcaggcaagagagcatgtgcaggggaactgcccctttataaaaccatcagatcttgtgagacttattcacaattacgagaacagcatgggaaaaacctacccccatgattcaattttttcccatcaggtccgtcccatgacacatggggattatgggagctataattcaagaggagatttgggtggggacacagccaaaccgtatcacttagttttacagtaattttagccacacagatttttttaaaattttaattttaaatttaaaattttttaaaattttaaaattttaattcaatatatgttatccatctttccttttatgggttttgtatcacactgggcttccttctctccaagtgtataaataaatagtagcctctcttgttatttttataggttcatcttttccattaaacttttgattatttgctccatctaaagtttacctttgtgtgagctatagttccagctgcattttttttcctatatggctactcagctttatttactagtattagtatttactagtaaatacttatttactatttactagtacactagtactagatactagtgtatctcttttcctactgatttatattccacctttattatatcctaaatccatgctgtaattttgtctacttctaagttttgactgtattcctttgtctactagcatactggaattatacagttttatttactgaaatgtaaagtatgcttgaatatcatagatagctaatctacccccaacacccrccttcaccccatgtaatgctcatcattttcagttgtctaatattgttggttgttcatttttcacataaaatttagaattatcttgttggtgtttttattggcatcacattaaattggaattaacctatggggtgttgacatcacattgtatatttttttatatttttaaaaatctatccaagttctatgtgcgcatagtttaaatcatcaaattgttctttggcatatgataggagcaagtgtagactccaacttctctcacccagttgcaaacacttttcacctggttataattatgcaaaacatatttctgaattagctacctttattggtacttgtgacttttccactgtaccattatctattaatggttttgctttccctgtactccccacccatcactcatacaggcatcccttccacctaccttccccatcctcccgataaagttatatcctaattttggctagatcaacattcaatgtttacactattttgactatgtaaatgctattcaaaactgaaccatgcagtaaattatgattattttcccttcctgcacaactattatgttttccctgaagctaatatttgacttgtttatggtttgtttgcttcatttttatgtttttattactaattcagccccaacactttgccaattatctaaagctctactcaagatattcagatgcttcagttattttttcaatttcatcctcctacagaaagctctcccagagctgctggcttgctctgtgctggtgttgtgctctctctgtgccgtcctctgggatcttcctccactttcactctaccttcaagaagggtattatgctttactcctgctgtattcctgctcctattgccaataactccatcctcacttcttttttttctttttttcctgccttgtcttggaggtgcactttctttagtagcttcctaagaaagtgttcacagcaggtcagcatgtgaagaccttccgtcattgactctcacactcagggaagaatttgactggaaataactttcctttactactttgaaggtgctgttctattacatcccagcatccagtgtgacttttgagaaagctaaagccattctgattcctaagtatgaatttttcccaattccctgtccaaacttgtatgacatgatcagtgtctcatcattataaaattgctccattatctaccttaatgtggattaatttttatccatttatttggttgagcacatggtgggctgtttcactctggaaatactcattcttcacatctagggaattttgttgacctgttttgttggttattctctcccttcattttctctgctttctttttctggaactttagtatttggatgttggaactgttggattggttctgtaatacccacacttttgttattgtccaaatcttcggatgttttgctctgcctttcaagagatttcctcagcttcatcctctaacccttttattggcttctaatatatagtgtcctatttttaatttccaagagctttttattgttttctgaatgttccttggtttctaatattttgttcacagttttgcaatatggtctgttatctctctggggatgttagtaatagtttgtttttttttttaaatgcatgtgggttttttttttagttgtcaacaagtccctccaaattgctttgttctgcttgtttgttttgatctctatctttcatgtttgatgctttctccaggtatctgtgtctgatgagaaatgtgaaacctagactaagacaagtctagtggggagagggcagattagatcacaattaaggacattgataaattgatcatttatttaagcaatgagagatcaagaaagtgatggtttcccattcaagtactaaccaggcccaaccctgcgattaccacaaaaaaaaaaaaaaaaagtgatggtgatcctccacttttgtaattcaccaagatcagaaacacatggtaggagcaacagggttattttcacataattccctggtgattcaatctgcatatttcctaagtctataccctcaagcctaggaaccacagttagtgtgtactcagccccacgcctagtctggagatacagagtcaactattcagcaactactgagtcttactgaataccaagatctgtacttaggctctgaagatccagtattaagaacaacatgatccctgactctgaggtcccattgccaatggaagagactggtaggtgtacacacggtggtccaacagtgctagtgaaataggagtttgtacataaatcaatgtgaaatacctgagggggagaattagtgatagttgcatggattggtgacatttgaacctcttgttggaaaatgaataggagtttgccaaaatgcaacaaagattcaggaggatacattacagtgyacaaacaacatggagaaatgagtgggagtatgaatgtgtccaatgtggagagtgggcaggaagaagttctagctggactggaagtggcagattactattagtgaagcagcctccgtgagtggttagaaagatctccctgcctttgtctaatgcacaacatactcacgatgcataagaggaatgtatgagagcatcaggattccctttggaggtcagttgtctcactgtctctgtactgagcaatgatgttcccaattttggtatagattaatcgccatgtgacttgatgtgtaatatttctgagcrgccaattaattctgctaatcacattagtggcaattagcaagatgctcctctgattagggggctgaggtcaagatgcttttacatgcttgtgtttactgaaaaataagttccctctttctaggacctattaatttcttccaacaggggacatgagatttagcccaaagaccccacctgttctctctctctttacctactcctgattcttgtacaaggatgacatctgatactctattagtatgttcggatttcagagaagacttggaaaaggaaccttgagaggggtgtcctgctgagcagcttggaaccttttgttgggaaggcagtgtagagtagggttgcaaggtagacagccctgagttgaatcctggttctagcatttactagctgcatagccttaagcagatgtgtatttgttttgttttttttttcttttttataatctctgtgcctcacctttccacatctgtaagataaagattgtaatagaacttacttaatagggatattatgagaattaaatgtgtcatctgttatatttaaatgttggaatgatatctgacacatagttaatactcaataactatcttcattattactattgattcagagatctattagagaatcaacatatttggagcagcaggatacattggtggtataccttatgctgatgaatcagacctaaactagttgtttagttgtgcgtccatactttgtttcagacgtcagtgaagaataagccattacccgtgaaatctaagcactgcacactgcattgtaagtacatgttgctctgtctgcttttctcgctggaccgtgatgccatgaaaacagggagcacgtctatcctgtctcctgttgcatccccaatacctagtatggagcttgggacatacacagtgctcagtaaagacttgctggattaattgaaagagaactgaacttggaggcaaacagctggttttcaatcctggctctgkgccttactaactgagcaagtcacttaagccaaacctcactttcatcatcagcaaaataaaaacataatttccctttcagtgaaaaaattctgttgaaagatgtcatatgaaagtaaatcagagtagacacacaataagtttgttttctaaatgaataattttatttgaaagaaaatgaagattcagagtcaacacctgacagattataactgcatttattgttattattttacctttataagtgtacaaatcatatatgaatatattcactttgtaaaatttataacatcaggtaatactatgtccatttaaactcgtggctgttctccaccattccagaatactgctcttamcagtgtaatgtatatatttgcaggcttcatccaatgcacttccaacacgtatatatatctgtaaaacctattgtcattttcgagttttttctttgacctaagtgacatttgataatattctaaaacttagggttttttttttccacttgtctctacttcttagagaaattttcaacttagttactacatatttacccaattctttttattacatgatattatctttcacacaagagatatatcatggttattcagtcattagttcatcaatagacatttaggttggttataatatttagcaattgcaaaaaaatgctcttgatagctgtctatctagaagtagtgctttagatataggtcttgccaaattgatctcctcagtggctctaccaacttaaatctctggtttctgccagtgatagaagagtgtctatttcctctatcttttttgacacttaatattacaaaaaaagttttcatttctgccagtctaatgagccaaaaatggcatctcatcttcctaattaatacagaagttgaacatcttctcatgtgttstgataaacactttatgtatgtccttatttaatcttgagacaatccaatgagtaaactgttactgtcttcattttagagatgtgtaatcagtggcccagaacagtcatgacattcccatagcccataaagtgaataatggtaaaatgttcacacacaggaatgcaggtatctcctgacaaatgtgctacggtagagtaaagaagtattagggactgcaggtagaataaaaatcattaataagaaaattggtggtagatagtcttaggtgcaaatgtagagtttccaaattgtcagccatctgccaacgggtacatcatttaatttcttgggaatatcagttatgacttctataaaatcagaaggaaatttctctcatggtgttactgtaaggattaaaggagataatgtatagggcataggcagctttcgagaaatgttaggtgctcttttgaattgaaaaaataaagtcttcctggcacatgggaagctgttgcttatgaaatggttaaaacagagctctgccggggcagggacactcaagtttctgtccctggcagagctctgaggcttctgcttggtgcagcattcgtttctgctttaaacctagtgcaggagattattctttcttccctgagggatggtgaggaataaccagactagccgatcttattgagtcctcataagcttcctattaatagacagggtagttatctgtatatgcagtttatagatgaggtcactgaactcaggatgagaaagtgacttctggcagtacctgcaatctttgtgttgcccctgatctggccaccccaatggccatggaataggctatggatctgcaactccaaaccctgcctgaaccaagcccgcttcaaactttgccctgccacagggaccccagataagtgcactcaacctctttatacagggccctatcactgcagggccattctcaggcattacttggtcccatcaaccattcactcttaactaatctggtgcctccctgaggccatgaggcccttttattccccaaaagttagcactgatggtagcccccacaatagctctatttagccattgcaaaaatgttcttggatagctagctgtctagaagtaatgctttagatataggtcttgccaaatttttctcctaagtggctctaccaacttacatcatatgtattttaacttttattttataggctctggggtagatgggaaggtgtgctatataggtaaactgcatattacagggttggtgtacagattattttaccacccaggtaataagcgtaggaccctataagatagtctttgatcctcaccctcctccctccctctaccctcaagtactccccagtgtctgctgttcctttctttgtgtccctatgtactcatcatttagctccacttatagttgataacatgcattattcagttttctatcctgtgttggttcacttaggataatggcctccagctctattcatgttgctgcaaaggacatgatctcattttttttgtgtgtctgcatatttttgttgagtacttattttgtgccagggactttggtaacagcgccttatttactagctatatatgacttcaggcaggttcattaacctccttttccctctgtttcttatccgcataatagggattaacagcagggctcactttccgtggcgagtgggaagagtcagtgggttagaattcatacattaaacatttagcgcagcactgggtgcattctgagagctcaacaaatacgtaccattgttgatatgctgcttttattcccacagtcaccttatgttgtaggttgatagttggccccattttacagagggagcaatcgagcagagtgatcaagtggcagccagtcagtagataaataggcatccagactgcagagtgaggacaaacatggcttttggcaccagagtcactcatgataatgttgattaagatatggccagtgttgtttggctgcggtctgtagcactctagttttgtatctttttttcttttttgagatggagtctcgctctgtcgcccaggctggagtgcagtggcgtgatctcggctcactgcaagctctgcctcccgggttcacaccattctcctgcctcagcctcctgagtagctgggactacaggcgctcgccaccatgcccggctaaatttttttggtatttttagtagagacggggtttcaccatgttagccaggatgatctcgatctcttgacctcatgatccacccgcctcggcctcccaaagtgctgggattacaggcatgagccaccatgcccagcctagttttgtatcttgatgtctttgtcatgcaagatgctgtccttgtggaaatccacacacactgtctgctggtatctgtttgccaaggattcaaaagcgttctcactgttggacactggtttggtgaaagctcccaatgaaggcaatgtcaggctcaaatgccggatatttcaagtgaacacagcctgtctgatttctttccctcaccctcactggtctacaggaagaaaatgcagacacctgtctgctcatcttttgttttccaagtgggtctggctcaccttctcccgacctgcctccctggccaggtgacctgtcttccttcagtgttcacatggatctctatggaaactgtccatctggacagagagagggcagctgcagagaagaagcattccagagtggtagcgtgtatgagaatggcaggagaggaagcctgcttactggacacctcaatgccacactttatgcacccttcacccccattcccttgcacaacaaccattgacccaatttacagaagtagggactgaggctgagggagggcatgtgcctgcccatatggaagcagtgaagctgcgatgacagcaaatgcgtttatagaattgactgttagccagacctcaaggcatcttgtatttattaaggcatttaattctcactgtcaccctttgaggtaggtactattgtaatcatccctattttagagatgaggaaactgaggcacctagaggttacttgcccaaagttacatagctagtaatggcagagctaaaacaccaacttgagttttttctcttaattgtggtgctcacctgtttaccagataagtgcaaacccaaagcgagaacacactgcccattgtgtgccatcccccacctactcctggtttccaggtaattgattgactgaaagacatcatggttccttgtcagctccatctgtggtcttcagaaagaagatcaagattcctgagagagacggctcactgccgggctgggaaggaccagagttgagacccggcggcacacccgcatttgattacccagtcctgcaaaggaacactgagcttgtggaacagtccagtccaaatgcctctgcttgattttctagaatcaaattaggctggtgaataggccagtagcgatttcatcaatttctcagcctttggcctcctgcaatgctgcccgctgtttactaagcaaatgggcttccagaaccagtcccgctttagtaatgcagcagggcaacctggcggagggaagattacaggtattagaggccatttaggatcatttagaatcgagctgttttccgagcaggcaattaatccagttgcattaaaaggcgctgctggggctcccataactctccctgcattaagagtggggatttgagaggctctgctaaacgacttgcataactagctctggggctcagtggggcatctttattgggggtgtagactgtgggcctctscctcgtgagctgtaggtctgctttgggaagaaaaygtctgtattgaaaggactgggtttatacctggagcccatgactggtcaagcctaagcacctcccagggtcgtgggagagatgttgggggaatggtttcaggtctaaggatatggttgtgacacaaagaagcaaatgcacttcctcagggcctctttagttatttaaggtggaactgccaaggtggaagtactacacaagaccaggaatttgagactaacctgggcaacacagcaagacactatctttaccaaaacattttctttaaaagttaacaagtcatggtggtgcacacctgtggccccagctacttgggaggcttaggcaggaggattgcttgagcccaggaggtcaagactgcagtgaactatgatcatgccactgcactccagcctgggtaatggatttgagaccctgtctcaaaaaaagatggaactggccatagctggatatagcccttttatagaaggatgtgaatggattgctggaggacttctagaatcatgccatgcactgacatcccactttgtgctaagcacttgtgcattccttatatcagcctcacaaacagccctatggggtggggacttcagagatggaagctgaggctcaaagaacctaatgaacttgggacttgaacccatggacccatggcagctgaccttgtgccctaagccacacacttcttccaagggtctgtatccagaaagctctgttgttcttcatccccaagcacgagagagacaaagggtcccacagcactgcctcctctcgtccccatagccttgcctatccccagcccaagttacggccactgactacactacagtgacattgttagtttaagcatctgtctatcccaccaggctcccatgaggrcacgctcatcttcccagctccagcagacagacaatagcacggcttctcaaataaaacatgcttggctgagtcccttcccttttctgtatatgtttcccttgcagtaaaatgagagggctggcctccctgctgaggtctgcggtttcctctatctctcatgtgctgtgaagctgcatctgtaagcctgtggaggacagccaacatctatccaaagtagtgactgtctctttagagggacaggtacttcccggagcactgggagtccttgctcctgtacttggttgcttgcacgtggcgttattcttcagcatttatccatagtctgaattccactgacagccacttgttctcaaggttggctataccccaaaatgaaactgttggaggctgcagccaagggcgcctggcagccaggaggcattcagtatgaatttgctaaatgagtgcctgagaatggctgttgacgatttgattaaggcctcgcctaaccagcaccagtgagtcgggcatatctgccatccccaagtaaaaatgataattaataagaaggtaatcaatttatagaaacctcctttctttctcaatttctggtgatgcccttttgcctgttcataaccccttttaactaagtagattgctctttgtctaccccataggtaaatttttaattttctcttatctttactctgttcttctgaatagaaaaggagatagactcattgcaaaatagtaactcattgcaaaacatttcagaacttcacagcccataataaaaaagagtacccctgaagaaaaccaccattggcacttcagtatatattaactccggaaatttcaggttttaagttgccaacttgacaggattacaaagaaagatagcttccaaaccgcaggtgggtcacatctccataccaccaacaggtggcagtaggagttacatttggaaattttagttctaaggatgatgtcgtttgcttctctgttaagcatttcctgtgttttgtattgggttcaaggtgtggaacactgtgctgggcactgtgtcacagggaaggtgctgggccatgtttctccggaaaccactgacatccaatttatcccaggttctagttgaaaaagcaaatacttggccactatcccaccccaccaagtcagaagtagggctcctggatgcacaagtactgcaaagctggatgcctgaatctccccgctctattccctttacctttttcctcaagtgacagcctggggtgatgatggtgggacaaaccaccggatcagaaagaagccttggtccacaggagaagcacatgcaagttcaaaaacataaagaagagaacaagaaaacgtggtactcagaggttgaatttccttttcccacatggatctgattaactcttcttcccataagcctgatcccaaaagccacttcctcttcaaagccttccacggtgtcttcaggctaagctaactgttttagattcaatgctcacgcagcagtttatacctcccccaacacttaacacattatgttgtgattatctgtgtctgtctctgccaccaggatccacactccttatggataggagccacattgcatggtgcctggcatgcagcgggcatgcagtgactgagcaatgaatcgctgggtgacttagagagggttggtaggagtgcttggttggacccactttctgtgaaagaaggtgatctttaaaggctgggctcctttcagagatatgcctcagggcttgctacagtgaaccacttctaatttctcagtgaatctgtggaaactacctcatcggcctatgtacaagccttctcttttctcaagatagatgaaatcaactaatagctagaagcaaggagcaagtccacagtcttataaactcatccaggatcaacacaacccaatgtaacaaaaaggcttgctgtgctctttcaggtaaagaaacggcgagacaagaaagcagggagatggtgggagaaggcgatgagttaaataaatcaatttccattggctcaggtagtaatgtttcaataaaaaggcagttgtatgcccaaaggacaaaaccatcaagtcttttttttcttttttttttttttttttcctctaacaagttgcacaggaataagagttaggtcttttgatattttaaaatttactttgaggccaggcgtagtggctcacccctgtaatcccagcactttgggagactgaggacagtggatcacctaaggtcagaagttcgagaccagcctggccaactggaaaaacctcatctctactaaaaatacgaaaaattagccgggcatggtggcacatgcttgtagtctcagctactcgggaggctggggcaggagaatcgcttgaacctgggaggtggaagttgccgtgagctgagatcatgccagtgtactccagccggggcagcagagtgrgactccatctccaaaaaaataaaataaaattgactttgtgcaaggcgcctagagagtgttttcagacttgatgatacctgttatcagcagttggctcctccttctcccattcttccatccatatctgatgatccaacaaggtcatccttgtttcacatgtgtcaaacccggctcattagacagtcgtggtmtcacggtgcccttccccgtactattcactgggacttttaaacctcagataccttttattacctttaccaagcggatttttaaactaacatctttttgaactcagaaattatattccctacaccatttttgaggatcttcgaagtcctatgcaccatgcgtgacatcttataggtgaggaagctgaatcagggttatgtagtgaaacttgagcacgttaatttaaaatttaaaaggtcgtttctgtttcatattgaggttttaaaattctccaacttttcacaagagctagttctcgcaggaagcatacaatggttcaaaaagatacttgtgacaaactgatagttgacacggtcatagagagcgagttgtatgaacaaaaagtcaggacacaaagtctgacaggtgagatgcactttctagcagcaaaggcttaatctattttaaaaatgaaactatcccggaaaaatccaggatatatggccacagtcctggaatgttttgagatagagatatctaagattaagcaagcataaaatgcaattgattttatgtcttagtatttatatttcagggatttaagctgtaacactgtgaggattcagataatgaaccgtttttagtaacttttttcagagtttgcccttaattgtcgtaaggactacttatagcattggttatcctgaggctgacacttggaattgtatgtaacatacacatgattcatcagagacccagacccaagatattccaggcagggcatcaggagtggaagggggacaaacatttccttaacttcagaaaagtaggtttgaaattaagagctttgtctttaacatgaaatattgaactattcatttatccattcattatccatttattagatgaatggataatgaatggatattcatttatccattcatctaaccacacatacttattgaacatctagtatacgccagacactgtgagcagtattgggacataaagacataaagtggacataaagacagggaaatctggtgctattagatggtatatggcagggctgttcggcctgtgaaagctacccaaataaatgaaatttgagctgagttctgaagggtgggtaagcatgaaaaggcaaaatgtgagagaaagatcttctaggcagaaggaactaaatatgcaaacacccgagagctggaagaagcataacatgttccaggaacaataagaaggccagtttggaaaatggttcaaatttagaagggccgacaggagccagatcatgggcctatgaggccatgctgaggatttcatccttggcctatgaacagtggaaaactgttgaaggattttaaacaagagagtggcatagttttgcattttaaaagattctatattctactaactagaacttggaatttattttttccttagaaataacttaataaatggtagttctatggagccagaataatgctattaacacaatgcatccagctaaactgcctattggaaagctggtcttggttgccaaataccacttacaacttggttcctataagaaaattcattccaaattccagacaacctaattacaaatgacattttcagggacagcctacaatctacttaggcttgtgaaaagcctccaacatttttccatatcaaaggttgttaagaaaggtgaggaacagacttctgattttgagatagcaaagacccttctgctccttctgctttttttccccttctccataagaagaaaaatcagaaaaggaaatgcaagtgctgtggtaaaactaggaagaatatattatgttggaaaataatgatgaggaaaggtggcaggttgcagtgtgtacattaagggtgtggtcagatgctgagagatgacatctgtggctgcagaccttaaacaaagtcagcakatctgcaagactgacagtgtaccataagccaataatcccttcgatgtcaatttcagggataaagcacataggatgggacaattcctgggtacagtttggcaccatggagaatcaaggaaggaaacactgaataaagaaccaagaagtcggccgggcacggtggctcacacctgtaatcccagcactttgggaggccgaggcaggcggatcacgaggtcaggagatagagaccatcctggctaacacggtgaaaccccgtctctactaaaaatacaaaaaattagctggacatagtggcaggcgcctgtagtcccagtcacttgggaggctgaggcaggagaatggcgtgaacccgggaggaggagcttgcagtgagctgagatcgtgccactgcactccagcctgggcggcagagcgagactccatctcaaaaaaaaaaaaaaaaaaaaaaaaagaaaaaagaaccaagaagtcagtctcttagaacggtagagtagaagagacttaatcctatgacattaatctttgctggctaaaataagcaatgtacacaaccaatgctatgtaccataaggaatgttactataaactggagagaatttctgctatcttagaacttggccctgctccacgtcaaataaaaccttctacaaatagctgattcaagtaggactcaactcaatcagagattggtaataacagttattttagagataccagaacagattctacacaaaaacttataatacaatcatggaaaagcataggaaaaagacaagttaaaaaaagaacacttgccagaaagtgttgtcacagataaaaactgggaccaaatttatcactactaattttaaaagaaaattaagcaattatcttttctaccaaaaatatgtcacagagaagtatcaagcagaggataaagtatgatcttgcttccattaggagtgaagtagaatagcaaaataaagtcatcacagaaacaaaggggccatattggaagcatcacaaagaagaatgagcacttctgaaaacattaaaggcatgaacaacaatgaggaaaaggaaatggaaatcagtaaaacgttagaaagcattagagagaaaatgataaacatggaagacaaaggagtctaacatacacatatgtggtggccccaaagaaaacactgaagaatgataagagaaaaaatccagatagaacacaagaatttgctgcagaaattaagagagtcttaaacctaaagaaggaaatatcacattgtgttctggggaaacactctttagaatattcaaaacaaggatatatcaagtaaaattaatggactttaaatctaaacaaagaattatttggtgtacaagcaaacatatcaatggcctacaaaattaaaaaaaaaaacactctccatagtaacattaaatgctaaatgacagtagaataatatctgtaaatatttcagagaaataaagtttgaccctgaaaatctgcaaccagcaaaattgccattcacatataagtacaggagatggacaatataaacacacaatttcaggaatatgrtccccattaatgtttattgttaaattattagaagataaactctagccaacaacagatagattccgtgttctctgcctagtctttttgctgtagcttctacattcataaaaatcacaactcttcatattatagagactcgaagaggtaatcagagaaatttgaagagataattagggaaatggaaatgtggaaattacccaacttactttcactatggccaatattgaaaaccgtgtatcctaaaaaaatccttctgtaacaattacgtatatgttgggagaggacgagtgtgtgtttttaagtgaatgactatgcttgtgaaattaagggaaatatccaggggacaaaagtgaaaagagagctgagaatagagttgtaagtgaatatacagcactgcctgccctaggaaaatttctcaataaaaagaaccttgagtttcagttttattaaggggagttagaacaaaggctccaccctgaataaagcttatgtacttgaaatcatataccctcagtgaatgaccaaatatggaaaaaatatttaaaacatttacagaaataaaagatgagccgggaacaatgacttacacctgtaatcctagcacttcgggaggctgaggcaggaagatcacttgaattcaggctggagaccagcctgggcaacatagggagacctcctctctacaaaaataaaaattaaaaaattagccagctgtggtggtgtgctcatatagtcccagcgggaggctgaggtggaagaatagcttgggcccgggaggtacaggctgcggtgatcagtaatcttaccactgcactccagggaacagagcaaaaccctgtctcaaaatgcatgaataatgggataatggattgagaacaccaaatgttgaggaggcatatttttaaaagaatcaaatataatttagataggaaatgacaaactcagcagacatattatgaaggaaatgagacatacaggagaagagaattaatgaattggttggaggctagaacttaataccctcattgtagccaagaagagagagagagaaaaaaaaggaaaacatgaagggaataaagaaacatgttagtgggatgagagtctcacatatgtattctgtaagtagaaactgaaggaagggacaatattcaaagtgagatgaccaagtactttctagaactgatgacagacaccaattctcagtttcaaaaagccagtttatcctaagcrggataaataagaaagaatcaaaagacacttagatttattacaggaaatttcatagcaacagaaaggtcttcaaagaggctgaaaatgtatacagatcacttgccatggaatgactaactcaaagcaggtttctcaacagcagcaatgaaagccagaaaacagcgaaaaatccgcaaaatgaagagagaaggaaagaaacaaaccttaaattgcatacatggttgatagtatgggtaagagaaaggtattgtaataaacaaaacctaagagtaaattgccaataaaatctcataggaaagtcaaagcattttagctgaggaaagggaaaatcaatctctttccccagaaaggaagaaaagcctactatgcaaaaatcagtggtgagcaaggaaattggtaagcagaatgggaaatctaaataaacactgactatataaaaaatagtaaagttcaagttggtatatgtgtgtgtagaaaacatgatacaactaaactattggtcaaccataacatgtaaactgagagggagtttctatttaatgtattccaagatctttggattgctgtggaagtgatgtattgatactacttagacttcaactgagatgtgtgcaattttttttttagagatagggtctccctattttgcccaggttagaatgcagtgactattcacaggtgtgaacatagcacactacagccttcaactcctgagctcaagtgatcctcctgcctcaacctcctgaatagctagaactgtaggcacatgtcactgtgcctggctacaattttaactaaaagatgcagatatatatatattaatttctgaaacaggagagggaaaaaatggaattaaagagagggtaaaaaatgtttagaaatttaaacatgaagtaaaaatatagaataagttgaaaaactaatatcaaacttatcaataactacaatatatgtctacgtcattgtactaaacttaccaatcaaaggagacattgtcagattaagttgttgaaagaaaagaaaatgcaattggctggaaaatgacactggtgacttagtttttaaattttccaaattccctcacacaaacaaactgaaacagcaaaacaaaaccccatgaacaatatttacaaaacacctaggaggcaagttatccctataaattacaaataatgagtagagagggtcaaactattgacaatcaggttgtccaacaatgagacattcaaataaaatttctggactttaaaagaaaaatgaattctgtgttcattcaaggcaaaactaaatcacttgtcaaggaaagacgatcaaattattatgagactgacagctacargatctgcatggtgtcaggwctactcagggagaaggagaggaaagtaataaggcatcgtatgggcttcagagtcacacataactaacaggtacttcctggaaagctcaaacatcaaatttgagaattgtagctaaaactgtgaaggatcttgcaattttcagtagaggataaaaacaaggggtcaacagtaagaccttatgtgtctggagtagtctaggccctgtggactctcagaaggaaccagtcaaaattcccttccaggaataaacaatgaaattaaggatctaaattgagtagcacagagacaacagtgacaagaaattgaagatctgcgagtatcagaaaatgagccaccatattcgtgcataccatatacaggagaaaagagagctctgtgagtttagaaatgaaattttggactatattctcttctaaatgctcagggaaaccaatttcatataaatgggaagacagaagataatcgaaataaaaacacatgcaaagttagtgtcaagaaaaagaaagccgggcatggtggctcatacctgtaataccagcacttcgggaggccaaggtgggcagataatttgaggtcagggtttgagaccagactgaccaacatggtgaaaccccatctctacaaaaagtagaaaaacttagctgggtgtggtggcacacacctatagtcccagctactcaggaggctgaggcaggagaattgcttgaacctgggaggcggaggttgcagtaagctgaacttgcaccactgctctccagcctgagcaatagagtgagtgagactccatctcaaagaaaaaggagaataacacccctccagaaaatcaaagtttgccaaataaatgtgcctacgagtcagatgagaactatttcagaaagcgttaaagacattaagaaaatgatatgagacacaacaacaaaaatcagaattagaaaactcagaatgtagtcataggactcaggaaataaattataaatttaagaaaatatatctaagaaatggagactaaggtagaagtcacacacgaataaattcacacaaccactagtgcctggagaaaactaagttaaagaaggaaacttttacaaaagcaagaggcaactagatccaagagaaaaggaaaaagttacaagacaggctaagaaaatcattatactggaattcccaaagaagaaacccaaagcaaaggcacaaatatcaaaaagtaaaatttaagaaaaagttcttgttgtactatttctttttctgaaataacttcaataattacttattgaaagggcrgtcatacctacttgagaacaccaacctggattgccaacactgagccatgttttagtaaaatttttggacctcaaaagaaaataattctttcatgcttccaggaaaaacgactaagtcatacaaaaaggaaagaaaaccagaatgttatcagtcttttggcagcaatgctttgtgccagaataaaataaagtgatatatttattatactcaagtaaaaaaatgtaaaccaagcactttatatacagcaagactgactttcaagcattaaaaactgcaaattgctatcaacatgcaggaaatcagataatattgttctaatgggttcttcctgaataatctactcaatgagtttcagtcaaccaacatgattagagagatatcagcataaaggctactggtgaacattaaataaatattctatggaaaaaagtacagtattgaatggctatatgctctgacaacataaattcagcacacctattaaagatgcaggaatattggaaaaggatctataaatcaatttattgttttaataatcaaataaatggacgtagtattgaaattacttctgtcattctgagactgttaggtgtacaacatagaaagcatgacattctaatttctattttacccttatctccgtgagaaccaggattcttggtgaagaagaaaggcaatacatttgtaagataggagaacttgtagtcctaaatttaaatcgtaagtttttatatgagcttaaggggtattttatcttgaactcatatgaaatggccaaaatcttggtaaagcatgaatgaaatttgttgaactggaatcagaaatatcagaatggatagacaggtgagtaggtaggtaggtaggtaggtcrctaggtaggttagataggtagatacacatagagagagatatgtatgtatgtatataggtaggtgggtgggtggatggatggatggatggattagataggtagatgatagatagatagacagacagacagatagtcacatatgtatgtaggttggtgggtggacggatagatagatgataggtagatagataaatagatatgggtttgtgtttaggcatgagttactatctatctatctatctatctatctatctatctatctatctatctacacacacacccatacatacatatatatatatatatatatgtctttccaagctctgtctgctgacaagccctggaaagaatgatatcctagtaacaatgaacacaactagcatgcagatcttggtttctaaataccatctcccataaaaggaactaggcatccttagataaatagttcatctcagagctggggcagagaaaatacaagatgaagttagagtaagcatgtagatgcaatgaccctgtattttaacaaataaattgcactgggaaaattggagagtagtaggctggagacaggactgatagactagaagagactgaaggcattgtctttaaaaatatacaaccaaaacagaaaaatctaagccgtggtgcctggggatgtgtatttggaagacaaaactataaataaaagaagaaaggggttattataaaagtcatgatactggttactttgaggggccgaaaagggtatgttactgggacggggattccatgatggccagcaaattgtatttgttgacttgagtgctgatgtcgagactatttgcttcataaatattcattaagctctatatttgtcctattctgttttctatagttatactatattttacaatagaaagttttatttcattttttaagctgcatgttccttaagagacacatcgccaatataagtattcaaaaagacaggaagtaaaaaagttgagaagtttcatacaatatttttgaatagaataagatactctgggcaaaactaacaaaaagagagttggtgtagttataataatatcagacaaaacagagcttaaggcaaaaaaaattattatgaaaaaatgaagctatgtgatgaaaggataaattcactagtcaggtacaataattctaaatttgtatgtaccaaataaagcaggttaaaacatatgaaataaaacttgattatactaggaggaaaaattttcaaatgacacatcatagtgggagattttacacatctcagtaatttgtaaaccaagcatataaaccacaatgaggagttaaaagatttaacaaaattaataaaatctttaaaaaattaaagaattctatgtttggacgtcagaatacatattcttcccaagtacacatggatrcataaaattgatcaaataaggactcaattaattcaaaacatgaatacacacaaacacacatcaatatctatatctgtctgtctatctggaaagacagaagaaataagtcaacaacaaaaatatagccctattaaatgtagattagtaattttttaattccaaacaaccactcctgggtcaacaaagacatcataataaattaaaatctacttgcctactctaaataaagctactatatattttgtgtaagcagtgtttatgcagaagcttgcatgtgagtgttcattgcaccttcatacgtaacaacctcaaaactagaaacaagacagatgtcccttgggtgaatagttaaacaaattggtacctgcacaccattgattactactcakcaatacaaaggaatacatacaaaaacctgggtgaatcttcagagaattaggctaagtggaaaactctaatcccaaaaggtttcatgctgtatgattctatttatataacattcttgaaacaataatttaaaaaaactggagaacagattagtggctgccaatgttaagaaggagttgcggaacaaaaagaagtgaatgtggctatgaagggcagcatgagggagccttctggtgctggagatgttctgtgtcttgactgtataaacatgaagaactcgatcaggacattgcaccatagttttggaagatgttaaaatgggggaaactggataaagggtacatgagagctttatatattatttctcacaacagcatgtacatctacagttacctcaaaataaaatttcagggaaaataaataaaatactgtacattaaaacacagggtatagtgaaagcaagatttattttctttaatccttattttttaaaaggctgaaaattattaagctagtttttcaagctaataaaccagaaaaagaaactattttatagattcaaagacagtaaaataatggaaattattaacataagaacaaaaattaatggaacagaaaaaatcccagaagatcaacaaagccaaaaggaagaaagacaatacacatactcacgcacgtgcgcacacacaaagaattaaggggaattatagttagtctacagatatggcacaatttaaaataggagaatactattgattaccatattctaatgcatttaaaaatttatgtgaaatggataactttcaagaaaaataaaatactatcactaacacaaaaaggaatacctaaattctgttaactgtgaccatgaaagaaatccagacagtaaaatcttgacagcaatctaatagaaaacacaaaacagggtggtagaaatatatctaaaacaaagatacaaaattatctgagaagagaccaaagttgtctcctagatttaaaaaaaaatccagttttatgctgtttataggagtcacaacttaaaacataaaatcatggaaaggttacagataaattagaggaaaagggacactaggaaacactattaaaatgacagtttgcattaccagagataaatataaccattaatataccgacaaaagtcaaattcatcctgaagatataaccacctctaaactgagtatgacagtattaacatgcctttaaaaattcaaagcaaatgttagaacatcaaggagaatgtgacaaatacattataattataagcaatattaatatattctctctcagtaagtaacattttaatcaggagaatatatactatcaggatgacgatttgaacaatttcaaagtgttcaatgactagaaaccacatattcattccaagcatacatgagaattcataaaaattgaccatttgttaggaatgaatcctcaactcaatctgttatcacacagactacattccttgtttataattaacataaaatcaataaaaagtaactttattttaaaatctgtgtgtggacttaaatctctcctaaattactctggagtcaaaggagaaatcacagtgaaaattggaaaatatgtagaacttaatgataatgaaactattatatgtcaaaatgtgtgaaatgcagttaaagcagtatttagggagaagtttaagccataaatgtttatgttagcaaagatgtaaagttgaaaattaatggactatgcatcacacttcaaagttagaataaacaaagaacacagaaaggaagaaataattaaggtagaaacagaaattaattaaatggaatgcatatgtacaatagaaagattggcaaagtcaaagttaattccataataaaagctaaaataattgataaacctctgccaaggtaaaatgaaaaaaagagagaaggtacaaataagccatattatatgtgaaaaaatacgattataaatgcatcagtgatgtaaaagataatattataatctctatgctaattaccctaaagaattaacctgaaatgagtgaattgtaraaaaatattaaaacttagtgaaaaaaaaatctgagcagtcctgtaatctttaaaggattactttataatctgtcaacaatctccccaaaatgaaaacatcaggtacaaatgatttaataggcaagttttaccaaacatttgaggaaaaggaaattctaatcttacataaaatcttacaaaaaagaaatgaaactttctctgattaattatacttagtaaacataaactttgtgccaaaagtagataaggacagcatgagaaaggaaattatagctttattttcttatgcacattcagaaaccaaagttagttagcaatttattagcaaaaaaattgcaagagccaggtttatgcaaagaaaaacatgatgactaaggcgaattcattctcagaatgctagcttattatgtagataaaatcttagaattcatatgagaatttgccaatgtttctataataagaaatattaaaatgtcaaattacaggctgtatttcgtattggaattcttatctactacaagtgaatcttggtacaaccactttggaaaaccagaagcrtatggcaggatctacaaaaactaagtatatgcttaaccattaattctacttctaagtacaaatgagcagacatgaacacctaagtatgtaaaaagatgagcccatgaatgttcatactagccatatcccccaaatgtaaactgtttaaaaatctaccaacattaatgtgcataagttatagtctagtcatgtaatataaacctatacagcaaagagaatgaacaagctgtagccatattcaacatgatgtatctcacaaaaacaagggggaaaagctagtcataaatgaatacattctctgtcattccataagtgtccaaaagatggacagctaatatgtggtaaaagggatgaacatagtggttatctttatgaggggaagtcactggttaagatggttctcatatcatggtgatgtgttcattctttttttttttaatttatttttttattatactttaagttttagggtacatgtgcacactgtgcaggttagttacatatgtatacatgtgccatgctggtgtgctgcacccactaactcgtcatctagccttaggtgtatctcccaatgctatccctcccccctccccccaccccacaacagtccccagagtgtgatattccccctcctgtgtccatgtgatctcattgttcaattcccacctatgagtgagaatatgcggtgtttggttttttgttcttgtgatagtttactgagaatgatgatttccaatttcatccatgtccctacaaaggacatgaactcatcattttttatggctgcatagtattccatggtgtatatgtgccacattttcttaatccagtctatcattgttggacatttgggttggttccaagtctttgctattgtgaataatgccgcaataaacatacgtgtgcatgtgtctttatagcagcatgatttatagtcctttgggtatatacccagtaatgggatggcaaagatgtgttcattcttgatctgggtgctggttacatggaccacgctgtttgaaaatttaaaaaactgtacacttatgacttgtgcacatttttgatctattgtacttcaataaaaagcttattcaagaaagtcattgcatttctgtaccccagctgcaaacagaaaaagtattaaaaatgataataagtataatagcaaaatataacttcctagggctgaacaacactcgtccatgttttttgttttttgtttttaatggagtcttgctctgtcactcaggctggagtgtagtggcccagtctcagctcactgcaaccacaccctcctgagttcaagcaattctcctgcctcagcctcccgagtaactgggattacgggcacatgccaccacacctgactaatttttgtaattttagtagagatggggtttcaccatgttggccaggctggtctcaaactcctgaccttgtgatccgcctgcctcggcctcccagagtgctgggattacaggcatgagccaccatgcccaaacttgtccatggttcttatgaaaaaaaattataaaattgcattgaaaagttttaaacgtgacctaaatagagagatagattattggataaaaatacccagtgtgtttaagatgttgattattctcaagctaatctatagatccgatggcaattaagataaaacccccagtggaacttgacaagagagttctctgatttttacagaagaggatatccaaaagagaaaatcatgaagattgctgccctcccggtaatgaggtcatactataagttacagaaattaagagaatgtgaagttagtacagggatttacaagtagagcaggatgaaaagtcagaaataggcctatacatatgtggaacggttttgtaaattgttatgacaacaatcctacatagcgatagaataattgattttccacttggaaaaattgctgggatcctatcactcactatgcacagaatcaatttttgatgaataaatgtcttatttataaaaggtaaaccttcatattaagagaaaaatatagacagaatactttttgactgtgaggtagagtcttcttaaagattatacaaatagtaatgttaatcaaatgtgttaaaacgttgaatttctcttcttcaaaaggcacccccaaatcaattgaaaagacaaaccacacactggcagaaaatatttgcaacatacaaagccagcaacaaataagtatctagagtaaatcatgaatctcagtgaatcaattttaaaaaggcatttgaaaagaaaagaaaarcgtgaacaaagaaaatgcattttataaagttggatgatcacaaagaactgagaaattgtattaaaatcttagaaacagatattaaaagtactaggtgatatgacttcatatcccatatgtaagaaatgtttaaaagtgtgacattatcaaacatgagcaaggatggggagcaggagggtgccgatacatgcaggatcaattggtcaagccacttcaggcaaacattggcattttattataaagcaaaagatgaatatatcgtatattttagccattccatcctggaggagctaacytaaataaacccatgtttatcatggattatgcccaagaacattcctagcaaatttgtttgtacaagctaaaaattgataacaatctaaatggaccatcatagaaaaaatgagaagtaaattgtcatatttacgctcaatggggctactacacagcagtgaaagtgagcwaactatagccaccagtatcaaaatggatgaattccacacatactgttcagagaaaaatgaatattagagcggaatgcattcactatgattccattgacatcaaggcttaaacgttcatttttcattggaggtttatcactgcttatgtatataagcagttgaatgactaaccccaaattcagaaaaatgggtgtttcttggggtaaagaaatgtatgaattagaagagtgcagcaaagtggaattcagagatatggataatgttgtwtctcaaactgctggtgaagagtgttcttctgatgatcgttctttacactttatgtgtagcatatatatttcccagcacctggaaatgtaatagaatattaataacaaaaaattatctcatgcaagtttcaagtaaaagaggaaaccaatattaaaattgcaaaatatctagaaaataagaacacaaaataatacaaataggtataaaataatacatatcagacctgatgggatacaactaaaacagtgaacttctggacttaatgtctactctctcatgtttgttaatctgtgtgaattaagaagttaactcaataaattagaattttttcaacagaataaactgaaaaaagtagaagaaagaaaattgggtatccagaaattaacaaaattaagaaaaacaatggcttcttcaaggaagctaggggggtaattggcccagtgattttgcacctggaaaacacacacacacacacacacacacacacacacacacaccccatcaatagagaacatatgaaaaacacaataacaacattaggtcgggtatggtagctcacgcctgtaatcccagtactttgggaggctgaggtgggtggatcacctgaggtcaggagttcgagaccarcctggccaacatggtgaaaccctgtctccactaaaaatacaaaaatgagctgggtgtggtggtggatgcctgtaatctcagctactcaaaaggctgaggcaggagaatcccttgaacccaggaggcggaggttgtggtgagccaagatcatgccattgcactccagtctgggcaacaagagcgaaactctgtctcaaaaaacaaaacaaaacaacaaaaaacaaaaaacatcacaatgacaacattaaaacattgcagcctgattttttaaatgaggtagatctaactaaactgacacatccaaaatgattggtaggatgcatcactgatttttataaaatgcagaacrgtgtatgcagtcagcttgaaaacatttagttaatttcttaataaattaaacacgtactacttgttagacccagcaacccaaatactggttatttatcctagataaatgaaagtatgttcacaccaaaataaatacgcaaatatttatagcagatctattcataatcaccaagaagatgtggccttcaacaagttaatagataaaggagatgtggtacatcctcatgttggaatattactcagcaattaaaatgggacaagctattaatacacacaactggatgaatctcaaaggcattatactgagaaaaggagacactcaaaagcctacatattgtgtgattccacttacgtgatgttctcaaaaagataaaaccatagtaacagaaaagagttcggtggttgccaggggttaggagttgtgtgggaagttttagggacactgtgactatggaaggatagtacaaggaagttttttggaatgatgaaaccatgctgtatcctgatagtggtggtggttacatgaaatctatatatgtattaaaattcatagaaatttatataaattgtgtattaaatttcatgaatatttggtatgataatttaaacatttacttatatatgtttaagtaaagaatatctttagaaggttgcatccaaaattgctatgagtagttgcctccagggagagaaacaagacagatggctcagctcagggagagggaggaatagaacctttcctatttactcttcttgcctttggaatgttgttccttgttcattcatgatgtacaaactttgaatgataatgtacacactatacgttctaagttaagaaaagaggttgctatagaatggagtgctttgctgtcattggtaggaacttggtctagatttagaaagcaggaggcgagtctgcaaaggcccagggtgtagccctttcagaaggaaatagaccttgccaagacattggtatctaaaaaaaaaaaatagggtgtttaccagttattactcatttggtaccaaaatcattagagtaagagttaagttgggcatatctaatcctgatctccagatacatgtgtttcgtgatctttatcgagctcctagttaaggaaccacaccagaagtaatagcatcagattcaaattattgactgaaaaggaatacattttaccctcaacttcttgaccatagtcatgaaaaaaaaaaaagtccacaaacgrtgagtactatattcagtgcatttggtgaaagccttcaatcaactccaaataagacaaaagtcctgtcctggcttccttcgagtttctcttccccttgagtgttcctggtctccattcccctagacttcccactgttactgcctcacactagtcttggctaggataagtctgttgtatcaagagtttattattatttgcagaacaggttaattagtctgctttctgttgcttataacagaatacctgaaactgggtgatttataaagaaacaaaattgatttctcacagttccagagactgggaagtctgaggttcagagggtacatctggtgagaaccttcttattggtgaggactcctttagaagtcccaaggcagcatggagcatcatgtggccatgtgctaactgtactaatatgcaatgtgctacctcaggtctctctctttttacaaagtcatcagttcccttcccatgataaccccttaatccatcaatccatgaatggattaatctattcatcagggcagagccgtcatgattcattcacttcttaaaggcccgcctctcagtgattgccacattggggattaagtttcaacatgagttttggaggggccattcaaaccatagcaacaggcaaggcctttgctaatgcttttgctcaaggttattttacattttaaatttttattgcttctctggctgggaaatgtggctttcccctaatttattctgcacgatgaatagagagaaatggctttgccacctgcttgcaggactccacggttctgttacttccagtctgtgtaatttgtatgtatattcttgcctgccaccccttagttctaccgctttgtcttggtttcttgcctagcaagataatgggaaaggttgttttactctatcctttagggctggaaaaataactttcctcttggggtctgagctcttatctggacaccatagcacatcttgtatgacccagtaaatacccttcatcttgctgtgagcaggtctgtattggggctccttttttaaaaaacacacacgttatagcatgtgaattcatgcctatggaagttaaaactataacccaagcaaagttccaggaatacatttcaaaataaataattcctattattcaagaagaatataggctacaaacttttgttcctaggtagggaagggctgtaggactgcaccatcctgcaaatttgctgggactgctgtggtyatacaagccaattcttcctggggcattttcaaggggggttaggtattggaaacacaacggggccctgaacttatgcacatgatggtgcttttggactcagcaaaccatgtgtccttgtctcttgggcttcataaaaccaaattagaagtagactagacagtctccctctttgtccttgatgtgtgcccagcactatgccatgtatttttccttctcagattcttgttctcttaggtcaacccattttacagataggattcaggtgaggtgacatgtccttctacaagtggaggagctcaatttctgacttcacagcccaggttccttctttatccaagactgttcctatctatatgatcagaggtccctgtgggtggtatgtcaggattgattaaaattaccaagacacttcccgccaggaatgggtatggtactctaagtggatgctcaatacatatttgctaaataaataagacacatcagtctgaaacagcaggtacaacctgtagcctaattttacagagagatgaactaaggttcagagtgatttgccttcaacaatataagtagagaggatgagacttacttaaaagaatcctgagctattctgcagaatgacatacagtgagtataaataaaggccaattctatatcgggcattgataaatgaataaggaacaccttacaacacaaacagtttgaatagaaatataaattgatatatattaatttatatatctataaattaaatataaattatataatttatatctataaattaaatataaattatataatttatatctataaattaaatataaattatataatttatatctataaattaaatataaattatataatttatatctataaattaaatataaattatataatttatatctataaattaaatataaattatataatttatatctataaattaaatataaattatataatttatatctataaattaaatataaattatataatttatatctataaattaaatataaattatataatttatatctataaattaaatataaattatataatttatatctataaattaaatataaattatataatttatatctataaattaaatataaattatataatttatatctataaattaaatataaattatataatttatatctataaattaaatataaattatataatttatatctataaattaaatataaattatataatttatatctataaattaaatataaattatatttataaattatattatttatatttataaattatattatttatatttataaattaaatataaattaagtgtaaggataaacagccatcattaaatgtacaatgaccagagtttccagtacaaaagccaggtctattaagtaaaaatatgtttattggaccaataacaacagtaataatagctcacctgtttagagtatgaaatcaagaatgtacttctctaggcagattgtctgggttctaatttcagctctactacttactagctatggcacgatgggaaagttacttaacctctctttttatttatctatcatctcaaaatacctgtcttggtaaggttgcgttgaggaccaaatgagttaatatttataagtcacttagaatagcttctggtacatagtaagggctattctattttttgttaaatgtaattacttttaagcatctttatattctccaccacaactttataaagaatagtgctctaccattttacagatttggaaattcagcttggagagttcctatgagtagccttctctcatacagctgggattcagaccccacctttggttggccctgaagccagggctctctcccaaccccaactgttcttagatgaagtttgcattaaaatccacagcttagaattcacctttcctgctattcagcaggcgctcctagaaacaaaaccaaacataaaacagtattttgagtattctaccttagtctttttttttttgcatatctaaaagccaaaattaaggaaatggaaagatgttaatataatacacacacacacacacacamamaaaaagggtaattactgattttattaaaaacatttatcacagagccacataaccattgttatttcaggcctgggaatacaatgcatgctattaagccatttgatgattaaagataaaagcatgattaaatacgttaatgaaagtgccaggctgcatcaagaggcacaccatgcattgacctcgaagagcttgggctacctatgtgacycctttgtgaactttctcctcagctgggttttctagaaggttattttgtgctgaaaaaaaaaaaaaaagtcctgtgagtaatgaaattctacctgatccctgggacctgaccggctaccctggccttctgtcctctggctgctgttgcaacccattttccttgtcttcttggtggaattagaaacyrgcccgctggcattttcctaccaattccctctattctcaggtctagagagaaaggaacaaaatgcagacaggattgaactaatatttgttaagactcaaccgctggccaagcattgtgctgtacatttcatgtattaagacattagttctgatttattatatttctatccttatcactgtcctgtttttacatagaagactggggctcagagatgctaaatacattggcgtgataattatgagtggtgtatctccaatgtttttggttctcctcctgagcacacgatgggctttcccttctcggccaagaaggcttctcccttcttgggttgggtgcatccgtgtgagtgtaagtgacatatgtctcatctccatggaagcttaaagagctagttatgggtcaccatgtgctcctcctctggcatctgcttcatcagcttgggtccacatataattagaatttgtgatttaaaaatgagtacactggtttgtgtgacagatttggaagcctgatttctcatccacacgattcaataagcatagccctataggtcctctcaggtatattatcccaattcatatcttgggccttctaacctgcccatggatatataaagtgagtgggaaayaaatattggtggttttcaagccactaagatttggggcgtgtttttactcctgcataatgaggtctcacaacttatgtggacctgggagctgagatttgaatgcacttctgtctactttcaaagaccttgctctttctactgccttgaactctattaataagatgtggtcagatcctaggatccaggaggacattttccttaccatatgaaaaacaaggacagggcacaggcatagcctctggtcagaggttgagaaaacatagactcactgaggatcccagcagggaaaagtacaagactcagaatctcaaggtgaggttaaaaacgtacggattgattctgtaaccttacacaaaaatcacctaatctcagtgttttttttcacataaataatgggaataataccatccattattcaatgtccctgacctccaaggagccctgatactgaaagatattctcatttttttctcaagtcaggaaagatatattcagggattacacaaattattgtgcaacattgttcacaacctggaatggagaaaaaggtaagagatacaactgaatttaagtggcagtaatctgggccttggacaaagggattaaagaaaaaagagaagataggaggaaagtactctggaaatagattcaactggaaagcatcagtatcaccttaaggaattaagtcaataaagaaggcccaagatatgaactgggataatacacctgagagggtctatagggctatgcttattgaagtgtgtggatgagaaaccaggcttccaaatctgtcacacacaccagtgtactcatttttaaatcacaaatcaaattagtaaaacatttctgagcacatattccccatatgtacacatacttattgataaatgtatgtatacattactagagtaatgtattatatgtacattacatatacaatttgggtacataaaacatacaccaaaaaagaaatgttaagaagatggctaaataaacagaaggagacagtcaaatgtgttcttcccattgagcctggtttgggatgtatgtaaccctgagttaatggctttgcatctttctgcctgaaagtgactttattgccaccagtcatacaacgcgggaggaaaggggcatagaaaatcttttcaactacttgctctggctcaacctttcgtggagctgaatgctttaaaaaggacaatgaacaaagtgaaatatgctttaatccaattccaatgaaaagcagtcaaatggcaaatatagtcttgcttcttttctcttttcagtgtcacagaggattgtaaaccatatgtcctttggagaccaagcagagagatagccacagcttgatttgcagagatgcattaattttcacatttaagccagtagttcctgttgctcatatgaaactcaccctccttctatgaccctaaaattctgtcatttcaacaaataattgaagagttcaatttgtcacctggctatttaaaatagtagagacaggaggccaggcttggtggctcacacctgtaatcccagcactttgggaggccaaggcaggtggatcacctgaaataaggaattcaaaaccagcctgaccaacatgatgaaacctggtctctactaaaaatacaaaaattacccaggcatggtggtgggcgcctgtaatcccagctactcaggaagctgaggcaggagaattgcttgaacctgggaggcagagattgcagtaagctgacatcacgccgctgcactccagcctgggagacagagcgggactccatctcaaaataacaataataataataaagacaggagtagctctgaacttattctggtccagagggttggtggaggctgtccaataaaataaaactaagtaaataaaataattaaaagaatgaagtcgtgaatgctaccaggcatatttacgtaacttaagaatcacttgatacacagagcagtaggcttaatggctaacttgtttggttggggttaaaagaggggaaagaaagggaagagcaagttcagtagaaacttgaaagtgccttttttatagggggtcattgggatttgaattccatgaaatagtatatcgtaggtatgcyctgcccagctcccagaatatcggacctatcgaatggaggctatttgcatgcataaatttcacagatgtgtatgcataacttatttctactgacctgcagagcctagtaaaatatttggaggaccaaaggctagatttataataaaacataattaaaactcagtaaattcaaagaaaggctggaaaggaaggaaagggcattttaaaaagcaagacaacgtaagatgtgagaaagaattttcaacttatcagtattctcaaaaaatgtacttaaactaaactccctaatttaaatgtgaaaatgttacatttgattagaaaacaaaatccaaattatacaattttaaaagacacatacataaaatgtaataatgcaaataggctggaagtcacaggtgggaaaaatatagcaggaaactggtaataggaaaaaagttgatgaaacattattaatatcagataaattagactgaaagcaaaatgataaattattttattaaaataagattttaattttcagttataaaatgtttgtttattctgaaagttccaacaattctaaacctgtatgcacataataacttgatctcaaaatatgtaaagccaaatttgagacagttgcaaagaggaaattgcaaatctgtcagtgagatggtttttttttaacattcatttattcattcattcattgaacaaatgtttgctgaacaagaattaattgaacaataaatgaatagatgggattacacaagttgttgtgcaacagtttgggcccacacataattaggattaccaataacattttattattagaaacatttaaaaataaaatcctctattttattccaggcatccttctaggtactgaggaaattataatgaataaatcacaattcccctgaagcttatattctggatggaaaagataatgaaaaaaatatttaatatgcctgatgttggtaagggctgaaaaggaaaaaacaaatgagggtaaagggacagaaaattaaggagcaagggagctattgtttagattgtgatgaaggtaggattccctcataaggtgacctgaatgaagtgagggagtcaatcaggttatagatttgagaaaatcattccaaacggtagaatcagtaagtttactggctctgaaggggcagagttcttggcctgttttaagaaaagcagggagactggyatgagcagaaggcataagaagaatgcttggagataccagatacatctctgtaattgacagacaaagtagacaaataactagtaaataaagaaaagatttatatgacacaattaataagaacaatccagttgacaagtataaaatgctgcactccgagattagagaatatacatttagcttaggaatacataaaacaattacaaaaatcaaaaatcaatcaataaagcaagtctcaaaaattttgagtcagcatcacacaaactatattctctaatcacaatgagatcaagttagaaagaaaagcaaaaattttacttttattaaagtttatacatttggaagtttgaaagcactcctacaaaatagttatgtcatgaaaatgtcttaaaggcaacagataagctatttagaattgaatgatcataaaaataatacaaataaaactcttgggatttggctaaactcacaatttcagggaaattcctagctttaacatgcttacagtaatgaagaatatccaaatatttaatgatttaagcaatcatattayggtaaaaaagaacaatagattaaacctaagggtaatggaaagaggatataactaatattagagaatacatyaatgaaataagaaaagctaaaacagagtgtatcaacaaagccaaaactctttgaaaaggcataaaaaaacacaccaaactccttttttctctccagaaaaaaagttggcacaaacaaaaattgttaggaataaaagaggataccttaacatacagctaatattaaaagtccaagaaataaacttacagattggtaataaccaaatagcctgaaacaccaagtatttgcaattaattagaacagcaaatatttaaatactcctcatgagaatgcaaattgctacaaccacttggataagcagtttgcaatcatctattaaattgaagatgtgtataacataacatccagtgatttactcacagatatgtagcctagactagagaaactcttgcacatgtactctcaggagataaatacatgaatgttcagagcagccttgctcactaatagctaaaaaatctggcaccaacataaatgtttatgtctggagaattgatgagtaaattgtattaatagtttatatctattcatatagtctgatcttgtaagacagtaaaaatgagtaagccagcacaaaaatgagttacccaatatggataactgttgtcaaaaacgtgaagttttagtgaaaactgcaaggcaaagaagaatatatgtgatattcttccttttatatatatttcagaaacgtgcaaaatatattccaataatatttgaatatctcatttgagatgtgtgtgtgtgtgtgtgtgtgtgtgtgtgtgtgtgtgtgtgtttgtatacatatgtaattttttctaggagagtgcctatccctccaaaagcaattggaagtggatactgtagggaggggcacaagtgaatttcaaatgtattgatattgttctgtttcttaaggaagatgtttcatagacagaagtgaattttatttttcactacatatactttgtaagtgctctttttatatatgaaatgattcctattaaaatacttaatgatgaatgaatataataactttttgtcaataagtgagactaaaaaggtatatccttgaaaaatgtaactttcaaaactgactcaagaagtaaacaaaatgaatataattttaaaaaatgaatcaataattgaaaatcttctcaaaatgctaagcccaaattgttttacaagcaaatttgaccaagcattcaaagaaaatataatttctttctttctttttgcatactctttcagagaatgaaaaatataggaaamtttcctaattcattttgtaagtctaggatattttgatatcaaaaccacaccaggacaaaaaaaatgaaggcatattagcttaatgtcacttatacataagaacaaaattcaagaatgcatattaaaacatatcatggcaaagctagagaagtgggggtataaattggtataaccacttttaaaaactgtttgacagtatacaacagggaacagcaaactttctatgtaaaaaccagataataaatattttaagctttgcaggttgtactgtttctatcacaactattcaacactgccactgaggtgctaaaacagcatagacatacataaacaaatargtgtggctgtgtttcaataaaactttatcaacaaaaattgttggcaggcggaagagaagggttgtagcttgtagatccttggtgtatatagaaagtaaatatatactacccacaccccagtaattccacttctaggtatatttctcacagaaatgcatatatatcttcagcaaaatatgtgtagcgttcatgatagcactattcctaatgtttattaacttgaaacaaaaatgtttctcaacaatagaataaatgaataaatgtgggatattcatgtaatgcgcttttatacagcaatgggaatggatgaagtaatgttacttaaaacactgtggtggactctcccaaacctaagrttgaacaaatgacacaaaagagcagatgcttatgatttattctagataaaagttcaaaaataggcaaatacaaacaatgaagttatcaattaggatactggctacccttgtgggggttagtgacggggaaaggcgtgatggggtgggcttctgagggctggtaatattttgttatcgatctgttacataggagatgtcagtattgtggaaattcaccttgctgcttttttatgatttatgacctgcttgtatttatcaattaaaagtttaaacttaagaagtaaaaatagtaaatagatgaaggcaattttgggttcattgagagactatgagggttgtctgacattggaaaatacattaatgtaattaccacattaatcaaacaaaatagaaaaattatagctgcctaagtgcataaaattatttgctaagtgcataaaatcattaaactaaaaataccccttataaatctaggaatagaaaagaactttcttattctgatgagggacatcttcagtcaataagcatcataataaatgataaatatgaaaacattgccttgaaaaccaagggaaagtgaggaagggatgcaccaacactacatctatttcacttggtgttaaagacagccagtaagggcagagaatttttttaaaggggagtaaaatgaataattactggaaaggaagcaaaacaatgttatactagtcacatgtggcatgattgtctagagaggaaaaaagattacaatataaatcaaatttttgattacaacaaattataaatagtaatatgctatatcaaagtctctggatattagatcagtatacaagtcatttacatttttatataataattataaaatttaattcaaaaatattaaaatagcatttaccttgctgatgggggtagtgagtagacyggcataaagaggcttatgtgattctggtaacatctttcttgatttttgtctggttatacaagggtgaagtttgtggaaattcagagatgcgtgtacttctctgtactttatattcaaataaaaagtttaaaaacaccatttacagtagcaacaaaaataaaacatatatcaaaacaagtgaaaaatgtgtaagacctagaaaattataaaatttatgctaaataaattttaaaagacctaggtaagttaagagacataccatgttagtggataaaaaaactcaaattacaaacagaactaaaaataaattaaaataaatattcatcaaaagaataatgaatgaactgtgatatagtcatacartggaaaactggatagcagtagaattaatgaacttaagctccatgtatcataatgaatgaatctaactaaaatgatagaagctgaagaagggtatgtatatgataccaattacaactcacccttggacaatgtaggtttgaactgaaagcatccacttatacaagggttattttcaatacatatattggacatcttgttggaggtgtgcaatgatttgaaaaacttgcagacgcatcatgcagcccagaaatatcaaaaatcaaaaaatttttaagtatgtcatgaaagatgtagatagtagtctattttatcatttgctaccataaaatattctraaatctgttattaaaaagttaaaattggccaggcatggtggctcacgcctgtaatcccagcattttgggaggccgaggcagctggatcgcaaggtcaggagatcaagaccagcctggccaacatggtgaaactgcgtctgtactaaaaatacaaaaattagccaggtgtggtggtggatgcctgtaatcccagctactcaggaggctgaggcagtagaatcgcttgaacccaggaggcagagggtgcagtgagctgagattgtgccattgcacttcagcctgggtgacaagagcaaaactctgtctcaaaaaaaaaaaaaaaagtttatcaaaacttacacatatacagactgtacatggcaccatttgcagtcgagagaaatgtaagcaaatataaagatgcagtattagatcataactgcacaaaattgccacagtagtacagtatgtactacagttaattttgtagccacttcctgttgctattgctgtgagttcaaatgtcatgagtatctccttaaaatgccatttgaggctataaaccaaaaagtatgagacaggtcttaatttagacgtttattttgccaaggttaaaatcatggcctgtgacacagcctcaggaggttctgagaacatgtcccaaaggcggttgggttacagcttgattgtatacattttaggaagacagaagttacaggcaaagacataaatcaatatatgtaaggtatatgttggtttggcctggaaaggtgggacatctcaaagccgggtagagtgtggggcttccaggtcataggtggagtcaaagatttcctgattggcaattggttgaaagaattaagctcttcctgaagagttgagtcagcttgagttaaggtaaggtaagagaggtcgagttgtggaaaccaaggttcctgtcatgtagatgaagcctccaagtagcagagttcagagagaatagatgtgcatgtttcttattagagctaaaagatgtcaaaatctcctgaaaagacctcgtaggggaaggagagtctctatagaatataacttcccccgcaagagatagcttttcaggcccatttcaaaatatgtcagggaagtatattttggagcaaaatactttgatttcctttaggacccactatctgtcatgtgatgttacactagaatcaggttggaatttggtgtcttattgctacagagtctgttttgtcagtccttaagatctctattttaatgttaacactagtcaattttgtctaacctccagagggaagagggtgtaatgagacatgtccaaccgcccctgccccctgccttcctgaactagtttattttcaggttttgggggatctctttggccaaaaggaaagtctgttcagttgactggggggcttagaattttattttcgatttacaaggctgacatctccatatgatcagttcatctttccagtacatcacttaccacaataaaaagtgatctcttgaggttctcgtgtatttttcatcatgtttggtgcaatagtgtaaaccttgaaaaacaccgtgatacccatacaaagtaccactagtgatgctggaagcactccaaagaagcagagaaaagtcatgacattacaaaagaaaggttaaattcttgatatgtaccctagattgaggtctacagctgcagttttctgccatttcaagataaatgaatccagcacaaggaccattgtaaataaaaaaagaatagaaaaggaaatttgtgaagtgatcaccacagctataccagcatgcatgaaaaccttgcactttttgcaaaatacctttttatatcatattgagaatgcggctcttatgtggttgcaggatttctataagaaaggcatatctgyagactctaatatcattggagtaaaaggcaattattatatgacaacttaaaacaaaaggaaggtaaaggatctaaagctggggtatgtaatgccagcaaagggtggcttgttaatttttgaaaaagatttcgtttaaaaaaatgtcaagaaaagagcctggtacaatgttgggtgcctataatctcagctacttggaagtctgaggcaggaggatcgcttgaacacaggagtttgaggtcagcctgagcaacagagagactttgtctcaaacaaacaaaccaaaaaaaatcaagataacaggagaagcagcttttgcccaccaagaggcagcagacaataccccagatgccattaagaaaataattgaggagaaaggatatctacctgaacaagtttttaatgccagtgaatgtgccttattctgggggggaaaaatgccataaaagacattcagttataagaaagagaagtgagcaccaggatttaagacaggaagagatgtgctaaatctatgattctgtgcaaatgcactcaggtttatgacaaggactacccttatctgtaaagctgctaagccctaagccttgaagggaaaagataaacaccagctgctagacttctgattgtacaagaagtcctggacaacaaattctgaattggttccattcgttctctgggtcaggaagtaccttgctggtaagggactacctttgaatttattttgctattagacaatacctctggccccctagaacccaatgagttgaacatcacaggcaatgaagtggtctgcttgcccccaaacacaacgtctctaattcaggggtcatgaggatctttaagtttcattacacattgtattctatggaatgcattgtcaacggtataaagagagcccatgaaagtctgaaaggattacaccattgaagatgtcatcatcgttatacaaaaaaccatgaaaactgccacgcttgaaacaataaattactgctagggaaaactgtgcagatgttgtgtgtgacttcacagaatttatgaccgaagcaatcaaggacattatgaaagagattgtggatatggcaaaaaaaaaaaaaaggtggtgaaagtgaaggatttcaagatacagatcttggagaaattcaggagctaatagacacttcacaagatcataagaattaacagcggacaacttgttagagatgagctcttctgaactggtgccagaagatgaggaaagacatagaaggagcggtgccagaaaacagatttacattagattatctgacagaacggttccaattattcaagaccacttttgacttcttttaggacatggaaacttctgtgaaacaggcactgaaactaaagcaagaggtggaagaaaaattggtaccmcatagaaacatttttgagagaaataaaaaagtgaaaaagacaaattgcaatgtgtttttgtgaagttacatggggtatgcctgcctctcctgcctcaccttccacctcctccacttcttccacttctgccacccttgagacagcaaagccgacccctcttctttctcctcttcctcaggccagtcaataggaagacaatgaaaatgaagagctttatgatgatccacttccccttaatgaatagtaaatagattttctcctctttatgatttccctaataatatttttttctctagcttactttattgtaagaatacaatgtataatacatataacacaaaatatgttttaaccaactgttcatgttatcagtaaggctttcggtcaagagtaggaaagtttttggaggtcagaagttatacatggagtttcaactgtgtgggggtgggaggttggcacctctaacccttgcattatatacaagggtcaactgtatgtagtttttaagtctgccagtcaatactatgttattcttagaaacttatatatgaaaaggaaacatggatacctacatggaaatgctgaaccctaaattcagtatcttaggtgctaggtttggggaatttgttatattttaacctgtattttcccctatgtcttaaatagcttatctaaaattcttttagaattgagctacctcttcctcaagggagcgctgagactctaacgggaaaactgaaagaggctttgcacatatttatcagaaaaaccacttgtggatggtctgtgtgccttttgacagttgccagagaattattgctttatttcttcttctccttgttaattctttgggcataaagggtaggatgccaggtgcatggacatgccaaataaagagagaaagtataggtgagactcctccactttccagccctttctgcccctttcagccactgaggtaggaaatatgaattgcaaatgcagaaggcactgccctctggcctagagaagagagggtagagggctaggtgcccagttaaagtgctgaacctaccacagcttacccagtgacctaagacaacttgaacaaagaaaatatggcattaagagtgtagcactttcctggattatcttttgccattgggtctggatagctcacatctctgagtctcactgttttcatctataagtggggacgttaggcctgatgatctttaagttctttgctgctctggaaatttatgagtctaacactcagaggccttaaatttcagtgaggaagacaagaaatgtaggcaaataatgagagtcaggatgacaaggcccagtgtccaatgagaggtttgaatattcttgggagattagaggagggagattcacttgtgcccgaggaaacaggaaaggtttctagaaagatgtgatgctaaattaatgttttctttttagagcagtaacatttgttcattatagaaaatttggaaatcacagaagattggggatagaggaaacatttatttcacgtatctatccatctattcatccatccattcatctgtccaaatatttgactacttattatatgccagctatgattctaggtaccaggaaatggcagaaaacaaatacacaaagttctttcttttgtacaattaatttttcaggctaaggtgggggaaataatacaagtaaacaatcatataagtaaataaacaaggtaattcctgcaagtgccaagagaataaaggagattgatatgatagtgaaatgatagttgggggaggggcgggagtttttactgagctcatggaatgcctctttgatgacacattattcccaaacccacaactgagagttagtcattgatatctgagaggtttctttactctgtgtatttccttttacaggtatgttctcacccaccgtcctccgctaaatccatgccttatgaagagactctctttcatagcctctacttcattattctttataactagaacctccccatgcattcttataacatttgcaatgagaaaacgttgtttccctaattttcaaagagatcaataaaaacaaattaaaatagaggattagaggtgtctttttgccacattatttttccaagaacaaaagatgcagtgatctcatcattatttctccagaggtctctaaccataatatacagccatttagtgcagcttaacatgacaataactcactgcttctctctctttactctgaaaaaaacaggtagatgaaagggtcgagatgattgagaaaagcccctatcttcatatttaaaatatactataagttgtatgggcttatcagtccattttagggtaagacttttctggaagacaacaggagaggatgggcaatgtgattgagtatgtgtacctccactgaagatggggaggttaaatggaggggtatgaagaggaagaaatgagctgggccaaatgctgcctttaggaatgtgttgagcagcttggggagagaaaaagaggatgctgggcttcagagtccaagcaattgaaaggaacatttcaatcaaataagaaagacagaagacttctttctgaagtcccaggggtcaaccaaaaaacttttggatggatgtggttaagaaggcacaccacttcttccctctgacagctgttgtggggctacgtgaaatgtcatctataaagtccccggttcagtgtggaagatcaaagtctagcattgtgattaggaccttaggccctggtgacctcaccaatgagttcttatcctaactgagtactcactctaagccctcgtttcctcatctgtaacactaagttttcaacacctactttatagggtggctgtgaggatgaaataagatcactgacgtactgtgcttagtacagaacctagaacttacagaggaagagttcaataaatgttaacccagacaataataatgatgatgagtttcttagtcttaaaaaaaaacccctcaaagtcctccaaatttcctccttctacaaatgagtaaactgaggcatagaatacaatcattaaaaacatggacttagaacacaaatctgcacttaaatgccagctctgccattctggctgcatgccatggttaatttgcttctagactcttggattcctcatctgtaaaacaggaactttgtgacttgtaagtgtaagaggtaaatgtgacaccagcaaaatgcttagccaagtccctggcacatagtatttaaaactttacatgaggcagttaggtatttgcaaattatggttgtttttgtggttatcatttaaggtggatacaagttagcagccatactagggaatcaatctattgaagcagaacaatatcaagtagacaaaaaataactagagacattgaagatctgagaaatagaatgaataaactcaagcttattaacatattgacaaattagtgttaaataattttaatatatagaactccaaatgcaaacagagaaagtcattcttttgagcacactcaaaatcatcacaaaaatagaacatgtattaggccataaaagcagcccaattaaaaccaaataattcatataacacagagcatgttccccaactgttatgcaataaacttagaaattaataaccaaaggacagatttaaaaatctcatgaatttgacaactaaataacatgttactaaacaacactttggttacaaaggaaatcataaaggaatcctgaagtgaataataatgaaagcagaacaagtctatatttgcacaacaggctgaagcaacacttagaggaaagtctaaaagtttaaatttatttaacaggaaacaaaagttaaaaacaaatgacctgtatatacagatggcaaaaaaaaggaacatgaagaaaatgtttaacatgattagtcattaggaaaatgaaaattaaaaccacagtgaggaatcactacacacctatctgaatggctcatataaaaagtagtgatagcaccagattatagcgaggatgcaaagaaactggatctctcctacgttgctggtggaaatgtaaaatgatatagccgctctggaaggtactttgcctgtttattttataagtaaaaatgaacttactatatgatccagcaattatacgcttaggcatttattccagggaagcaaaaactcatgttcacacagaaacttatacatgaatgtccatagcagatttactcacaatcaccccaaactggaaactacctaaatgtccttaaatgagtgaatagttaaacaagctgtaaaacacctatagcatgatatactactcaggaataaaaagagcaaactattgtacctgtaacaccttggatgagcctcaagagaattatgctaagtgaaaaattatgctgagtcaaaatgttacatagtatattatttcttttatataacatttatgaaatgataaaaaaattatagatggagaacagattagtggctgcctggggttttagatggcagggaggagagaaagggtgtgtctataaaaagatagcataagtgtcttagtctattcctgctggtataacacaatatgttagaataggtgatttagaaataatagacattaatttctcatagatctggaagttgggaagcccaagatctggcaaatttggtgtgtgacgaggattcactctctgcttccaagatggcacgctgttgctttatcatccagggtggacaaacgctgtgtccttacatggcagacggacgggagaagaaaacttgccccctcaagccctgttctaaggcactgatcccatctttgaaggtggacccctaaaggctccacctcttgacacagtattcccccttgatccacagtttcacttttcttggttgcaattacagtcaaccacagtgtgaagatagtacatggaaaattccagaaataaacaattcataacttttaaaaatgtcacttttctgaatactgtgatgaaacctcatgccatcctgctccatcctgccagaatgtgcatcatccatttgtccaacatatccatgctatatatgctactcacttattagtcgcttagtagccctcttggttatcagactgaaaaatcagataagaatacaagaaaagaaaatacaggcccatttcatgygtgaatgtatagaaaatacatcgtatgttaaatactaactaacgaagtcaacactgttttacaaaaataataattatatggggcttatcccaggagcaagttttttttcaatgttcgtgcaattcactactttaaatatgctaaagaataaaaatcatatgattatttcaatccttgagacaagcatttgatacatgaatgtccatagcagatttactyataattaccccaaacttgaaacaacttaaatgtccttaaatgagtgaataggtgataagcatttgataaaggtattcaccaatttatgattattttttaaaacccttagaaaataaagggaaacttttgttagattgctagtttataagccaaaattctacagcaaatattatacctaatgtagaaaatgcaggtgcattcctttttggagcagggagaagagtggagccaccattgctatttaacataatgctggagtttctggcccaaactttaaggaaagaaaaagaaataagatgtatgaggattgcaaagaaataaaactcattgtttgtagatgatatgataatccttttagaaaaatcaattgcaatcaaaaattgtggtaataagagagttcaacaaggttgccagatataagattaacttataaaaatcaatagcatgtctgtacaccagcaataatgaactagaaaatctaatttaagacaattgtaatacaaatgatcaaatatttaggatttaagtagtctaagaatatataaaatctcaatggagaaaactttaataagagagttaaaagaagacctgaatagatggagaaaaagtctatggccatggatgggaagatattacacaagtgaaaatcccccctgaatttatctatgaatttaattcagtgtcaataaaaatttctgttaagtttttaacgaacttgataaactttctctaataaatatatatagaggggaaaaatcatagtagtcaacttcaaggagggattaaaaacacagaagatgtacccttccatacatgaatctataaaatatactattaagccataactataaaaatgcatgctgtaataggcagtggatcaatagaacagaatggaaagctcaagaaccatttcatgtatgtctggaaacttcatgtgtgatagagatggctctacagatcaactggactgaatagtaagcaaatggttttgaggaaaactttttttactgtgcaggggaaaataaaactgaatgccaccttaatacctactcccagggtaatggactttggagacctaagatgtcagtgtgaatgataaagctacaaagttagaaaagaatattgcagaatgactttgtagactagagttgggcaaagatttcttcaaaaaaagtttgtgtctttcatagggaaaggaagagagggaaatcacagctgtggctcacccacacagcatttaacaacaacagatttgatatgcagttgtagcagtgtggctggaccttaaaagcataatgctgagtgaataaagtaagaaacagtgagacaacccaacaccatttatctaaattttaaaaatgcacatgtaataggatgcattttctaagaacacaaaataaatatattaaaatggttgctcatggtaggagagtggggaatgggataaaataaattaaaaaaaaaaaagtcaggataggctaggtatgctcraggaacaaatgaccccaaaatctgatgrcttaacccgcaacagaaatctctctctcgctagtgtgttgtgatcacataggtcaacaggggaaagtgaaatgggccaattacacttgggctttaaaacagtcctgaaagtgacaggtgatatcttctcacttatcactgggcaaggaaagtctcatggctatacctaacttcaaaggaaagtacaacctgaccatgtgcctggaacaagggggacgtggaatatttgagaacagatttcatgtctaccattagggagacatttcaaaaaaataacaacatgtatacatatgtaactaacctgcaggttgtgcacrtgtaccctaaaacttaaagtataatttaaaaaaaggtaaaaagataaaaataaaataaaaccttgagaatcagcaaagaacacacacacacacacacacacacacacacacacacacacacacacacacaaacttggttgattttatttatttttcatatttctttctctctttctttttttttttttgagacagagttttgctcctgttgcccaggctggagtgcagctcactgcaacctccacctcctaggttcaagcaattctcctacctcagcctccagagtagctgggattacaggcatgcaccaccatgtccggctaattttgtatttttagtagagatggggcttttctcagttggtcaggctggtctcgaattcctgacctgaggtgatccacyygcctcggcctcccaaagtactgggattacaggcatgagccactgcgcctggcacttggttgattttattacatcaaaaataaaggactcttacttattagagattatcatgaacaaaaaaaacccctagaatatacaaagaattctacaaatgagtagatgattgtgcaaaggatttgaacaacgagtttataaagataaaaatccaaaaggctgaaaaatataggaagaaattctcaaactccttagtactgaaacaatataaattaaaatagtaatggkaaaaaatacgtagtgcccatcagattggtaaaaaggtagaaaaattggataataccaaaggttggatgaatgtgggttcacaggtacctttacatacagctaaaagttttggggctgctgttctgaaagcaatctgacagtactttgtcaaattaagtttacacacagcctatatgtcagtatttctgcccctaggaatgtagaccacaaaggaattcacacaaatctagaaggagacacctgagaaggtctactacagtgtgatttctgacagtgatgagtaagaagcaaacagtgtctgtcagtggggagcagattgataaatgatggagagaacacaccccagaaccccatgcaatggttgaaaatcatgaaataagggcacacagcagcctgggtggatgtcagaagtgtagtgctgagtgacaaaaaggtaaacgagctagaacacattccaatctacataattaaaaatacatgcatagtaaacaattacatgtattttacaagaactcattcgggcagaagacagtgtataaaacataatgggtctacagaaggaaggcagtgaaagtgaagagtgtcaataaacatacagaaataagcagagcaatctttgaggtttgtgttagtttcgtcttgccgctataacaattcaccataagcgtagcagttaacactgatttattgttctggaggtcagaagtctgagataggtctgcagggctgtgttccttccgtcgactctgggggagaatctgtttcttgccttttccagcttctagaggccacttctatgcctttgcttgctgttctttctccatccttgaagctgtcagcctaacatcatttctcctctctgccctcttgcctccctcttataaggacccttatgagtacatggggcccacccggataatccaggatcatatccccagttcaagatccttaatcacgttcacagtgttctttttgccatgtaagataacagattcccaggttctgggtattaggatgtgaacctctttgggggctgatatttttgcctactgtagagttttgatttggggcagaggatatcagggtgtgtgtgcagggatgtggtctgagacagcatttgggagttgaggacaggaagaactcatctgaccagtttggctggtagatgagaatgttcatattgagattgacaaagactgcaaatgccagggtggcttctccagatctctctattagacttctgcccttctctccaagagacacattccataatagttaaaatgaacatagaacaggaarctgcttaaatcttatggctttagcagaatcttctggctctccacacacctgactcaaagtcagactttcctccctcgggggatcaagcctgtactatgtgaaggagtgttggccggtcatgttaaccaaaacatacacatctattgatctgatagtttgagttatctttcagtaaatattcactcacctctgctactcccaccctttccaactgtgggacgagtggcttcattgatgttgagcttgcctgtgtgacttgctctctcaatatggtattagcaagcttgacatgagggaggccttaagagctcctacatgggttggcttggctcggctctggtgcattcatcatggaaagaacttactctgaggggctaccgctccttcaacctggtttgtagaataagcatacatcaggcagacctgggcacaactcatagcctggagccatgcctggctgatccacaccaggagattatacaagcagatgtatgagcttgagaataaatgtctgttgctgtaaacccgtggctttgggggtgatttgttatacagcactatggtgacaacatcccactaacaatgcatgcatataattttatttaaaccctacaagaaatgtaggaggtatgtataaatataaatctggggccaggaagggtaaaattattttttcaatgtcacacagttcataaataagttttaatgtgcaagagatagaaaatgtgaaaacatcaagtatctgagcaagactatttgcagatggaggaagatggaaagtggaaaaggcatcgagactgatgacatttaaggagagctctatattttgtagaggccatccttagaaggctaagtcaaaaatgaaagtcaaggaggaaaagtagctatcatttttgagattctgatatgaagaagtatcatttggtggcttatgtaaaagcctgtgctaggrttgtgtctcacaatgtcatggccaagtgtcagcccctattagaggggtcagtcaggaaacagaccatgtgcattttaacccctcatcttttctgagaggtgctcaacaaggccagcaggtacttcgcaagtgagtgaggcaagcagtcagataatgtgtcttctagctactgttgtactgtgatccgtgttctactggggttccattcttgtttgccacaagttaactgagatggacagctttgttttgtcaattgcctttttcattgcctaggtaagtcccaaatgagattcgacagaaaataagcctccctcaactgacagtggttttcatttgaaagtgttccttcagtttaatgacactcttgtacatttcaaagaataaagctttggacatcataaaaaagcttggtaggcatttctggggctgctgacacagcagggctcttcaaggtccagcagtcctgagtagtgtctgtagattaatgtgattccttggaagatyaagaatgtcctgggatgggggagttgtcagctatgagcagcctcagctttgaaaaaccctggatctgaatatgaaaagccaaattctccagctgaaaaaaaaaggtagtacttctagaagggaggcgatcagagtccaattaggagatattacttttgtttgtttttacatagtctagaaacaatttgatttacacatggcttcttaggcagtaatggcaaattagctacgctgagacttttctaattccagtgccctattgttcacagccaggacaagtaaagtgttagaatgtttaatacctcaccagggcccagtgctaggtggcttttgaccatcagaaatgtttcaggttttattctttctccagcttttcttcttttcctttwwtttctttaaatgaataaagcgacttgccatgaatcaagtgggaattgaagtgaaactaacccagatgttatgggtttgacttctccttttcttcaccccaaatcttttttcctttctctggaaactgaaaccacgtaatttcaaaattgcttctcttttcccaacccgatttcctctagcgcaaaagtaatttttaaacattccaaagtctctgtcttcaggctgcagtcttttgcctctgttcctttaattcttcccagcatttgagcacttgagcagttgatgtggcaggaggcacacagctgaccaccctgctccctggctcagccacagtccaggggactgcatctggatggggcagagagggaagatcaaggtctgagatggagctgggaagcagaatgtggcagctaggaggacatcagatttctgggcatgaggtgcctaggctgagtggaatactgggagacaaagatgggaacgtggaatattaaggaagtttaggcagtggggtcctgcatcagtcaaggtctattttggagataaatcatgacacttataacagacagaattgcctatacagaattgttaactatcctggttttcaaactgtgttgagacagtgtaagacaccactcttaactcacaagagcaccggtagtaccagtatygtggaaaacacagcatcatctgtcagacacgctacaaatgactacttgaaggggcccagagtttcaacatgagattgggctacattccttctgatgtcatatcttggcagaattgggcttctggcaattgccatgatgaaatgcaagttttgtgccaaaatcaacatggaacaggcaacgaaagtggcagtgtctgtctaatctgaatcttcagtttgagaaattgtgtaatgctcaacagatacatgcatccttttagggagtaattgtagttaagaaagaaaaaaatagctttattttgatttgtgtgtactgttttctcaaaccacttcttatttgttaggacgcaaatacttattaagttgtttgsaacaactaatacatgaaactgttgggtatgttttttggcttaggatctgtgggaaaaaaaaattaccaaaacaccaagggcactgtgaacctctggttamctgtatataaagaattgcctagaaaatggaaaacattaaaagagaacatgaaaacactagacaaaggtggcaactgtggggagcagctactgccagggttgaaaagaacgaaaagaggctggtgctggtgtctctgaggtgctgcaatgaggctggctctgtaagtgttggggaaactgcaagctagatccaaatgctgtgacagaatgaactggctacttggatacctgatgctgaagtctccccgtcctcctgccccgcaggctccctctatcgccccctatgggcagatactagcatgcagccagacagtagagcacatgtgatttgtgccatcctagccttagcaccgtaaagcaagatacagagggcatgtttggagccaaagacaatggctgaataactggctgaaggcccttgggctgcagtttttgtgcttactgtgggcccgagggccatgacctcagtcaataggctgctttgtgaatctggattatatttgactctgggttccccctctgtaccccaaactgactggaggacctatgggatagggctgttggactagccctgattggacccaattttacattcatctgagtgggatggggtgggacacatacccaactgggcgagagaagcttttgagtgacagctttctcggaagaactaatgtttaaaggaaggcctaaagaacgagtggaggctggacacgatggctcatacctgtaatcccagttattttgggaggccaaggcgggtggatcacttgagttcaggagttcgagaccagcctggccaatgtggtgaaaccccatctctactaaaaatacaaaaattagtcgagcgtggtggcatgcctgtaatcccagctatttgggaggcagaggcaggckaatcccttgaacctgggaagtggaagttgcagtgagccaagatcacgccactgaactccagcctgggtgacagagcgagactgtctcaaaaacaaagaagaatgagtgaaaactgggagagaagtgggaatagagagggaagagtgacacctttcagtccaaatgtcacctcttcagttgtcttctctgactactgtacatagcttgccatttttatccaatcgatcccttgtgtttccttcagaacactttttatttgcattatcatcatattataacatctatatttccttcaaaacacatgcaatttggttagctcatgtgtttggctgccatgatggttgttttagtctgtttttctcaccagatttagtgcaaaggaggcaggaattatgtctatttttgttaacactatgtcccccaaaactagcttgccaccctatagatgctcaaaaaatatttcgagctaagccgtgggaaaaaaagtaaaaacttcagggtaaatgaagaagaaagatcaggaaagatcaaggagctgatgccaaggcctcaaatcaaagaagtaaaattgtagacataagcctttcccaaccctccagtctctcttccctccttgatttttctccacagcacttactactatctgatgtgttacatacttttctgatttatctgatatattatttaatctcctacycccactagaatatatacaccataagggcacagagggtttttgcctgtttggttcactcctacatccagtatagttctcagcacatggtagaaactcaaaatacaaaacaaatgactctgtccagtgctttacttttggcaaagaatactcttaccatactgttacaactgccctagttgttatcctcattttcttcttagggatggtaggaggaccaatgtgtaacacccagactggcctagcacatcactatggggtgtgcatgtgtggtgaaaggcagggattcctgctcttgtggacggtccactcaagcatggcaatctctgtggccattagcctccttgctcttgtctcttagattttaaatgtgctgcctcctttatctctggcttaatcttcccgctcccttttctccctctctcgtccccttctatacacactcttcccctttacctggtttaatcctatccmtcctttgcccaaggtccctttttcaggaaagaattcttggcctctagactaaatattacattgttggtaatttatctcaaatatttaagcttacacagtggggtgtgatgggtgagttgtattggtcaagctattgagagctagtaccggtattaagagccttacaatcaagaacacaccataagtacactagtgttgcagtcaagaacccatacctcagagaaaactctaagtacaccacatgcttttgatatcatatatcaaaataacatatgataaccatatatatacatgcgcgcktgtgtgtgtgtgtgtgtgtgtgtgtgtttgtgtgtgtatggtttttttcttttagagacacggtcttgctcttgctctgtctcccaggctgaggcaggaggatcacttgaggccaggatttcgagacccgcttgggcaaatagtgagatacttgcctctaaaaaaaaaattaaaaaaaactaaccagatgtgatgagtacacgcctattttcccaactattctgataccatatcttgatcaacaacctccatgttgctaattagcaaactaaatattagcaattgattactgtggttgaaatcaagggcctgtggactagcataataaatgttagaagtaaattctaattggtgaaatgaaaggtatttaaactatgtgggttggccaaaatggttttaaaatactctccagaaggacattataaagaataatcctgtaagacctctagtcttcgaccttagggatggtgtcaaaaccttgattcctaaacagtactgtgttagccatgagattaggaggattrccggctgcctaaagtgacaatcatagtcatttattttacctccataacaagagtaagcatgctatagcctaaggttctagctttttgtaaataaacatttattgaaactcagccmcacctattttgcgtacatgttgtctatggctacatttgcactataatagcagagatggaaagatgcaacagagactgtctaacctgcaaaggtgcaaaaccttraatatttactatctggcccttaaaaaaaaaaaaaagctcacctacttctgccttagagtattgttgtacttgcctcgaatgaacctttcatgaaaaatggtaactgattcatctattgctgggactttatgaaatagattgtttgagctgttttgtgcccatttgctaataaatgcttgtatactgtgtccatctgtgtagtagaatttggcctaaggcttgcttttattatcatctaataatgcagttgttggggaatcgttaatcctcgttcaccttaaatttctttgatggctttggtttctatgataacgaatgtcagggttgtgcatgcgtcatcatcaaattggcttagctgggtttcaatgctgtactgtatctattgtccagaagcccagtacttcccctgcaaaagacttatcaagcttcatcatatcatccttcaaaattattgcatccccctagcatcagtttcacaaaggcaagcaagtgtcccattcacctacatccctaatgcctggcccatctcagaggttcaggatatgtatgtagaatggaaggagtagatacagcaataactgcaagggcattaatggaagctttctaacactaaactatagttggttaaaagaatgaggccagtagtcaactagactcagaaccaggtcagagatccacagaaacctccacaacccctgtttgtctcagtggctgttctgtctcacctcccactctgggtttgagggagtgcaactgtatttagtaccatccaaggctctggaatatattatcttcttaattcacctcatagccctaagagtgaaggagtatcatctacgtttcctacatgagaaaaataaggcacagacacaggtagggtaagtgatgtgcttaggttcaggtgatcacagaaccaatgttcttttccccatgtcatgatgcctccatgctcagtgagtagttttcaattaagaaatgagacaatgaacacgtgagtggattaccttctctgtggcattgctatgggagggtagcaaccgtgttgccttctcacaaggtgacatgctccagcttcaggtgattctaatcatcagcacgggtaggatctagtgcttctatattgtggaattaccagcatctccaaatggagctcctggattcctatgcttgcttatatttataagatatctatgataatacaggctgaatatcccttatctgaaatgattgaaccagaaatgtttcagattttggaagatttgtgttatacttaccagtcgaacatccctgttattgaaaatctgaaatttgaaatattcccatgtgcatttcctttgagcatcatgctggcactcagaaagtttcagattttggaatatttcagatttcagatttttggtttaggaatagtgaactagtattcaacaaattcttgtccaccaaacatctgcaataaattagaagaggtggtggaaaataagcaagagagtgggtttcgatgatgctggaaagaagatggattttatttttgttccccttacctttttattcccttcrtgtatcatttccatgcagaaagtgyaaattaatggtcacatcgaactatctgtcaacatatttctgctcttgcagtatcaaattatgttggcaataatgtttccagctgcctaggactccattgcaatttaatttgaaaagaactcaaattgcatctccaaatggataaaaaattaattttgcatacaagctatccacctccacattttcagccccatccccaaattatcttaatttaggttcaactttgaacagtacatatgctacaggcaactccacatgcaaacatgaatacgtagcaaattcatgaattgaaaatctgttttgctgcttcttttttaataagatgttctgccttgattaaggtcattagaagattctacagctattgcctttgacagcagggatggaggctgagtccatacagaacaaaaaagggagccaattctgacttaaccacatgattacccttaacaattggagtgtaargagatcctgattcaaccctctacttattgcttttcccctgccctctattagcacctaaattcgggtggcttggtcttcagctatcactactttctagatttattcatttatgtacttattcattcatttattcagcagctgtatgttatagttataaaatgaggagatctaggggctcacaggttggcagtggaggtgaacatgaaccaaacatatgaacaataaccctgaagtctgataagagctatgggagacatatgatagcaggttaaggaaaaaaaatgtcatcgaggcattaattatgggcaagggagactgttagagaaagtcacaagtaaagggtggcattggagctgggccttgaaaatattgaatgaggatttgttggtggcatcccaagcagaggaaatagctgggcagaggcttggaggtgtgaaggcatttataatcccttgctttgctttaagaatacaggatttgataagtgagaagtggaaaatgactcaggggcatttgggggcaggaaggtacctgttgcagggtgggctcgggtattaggatgaaaatggtacttcaggatggacatggtgctttaataagagctgatgtagaaagaggagcagggttcagaggtgaggaggaccaccgtgccttcctgaggccacagtaagaatggagaaggttctgaaaacctgagtgggtcagtcacacatgcatgaacacaagcctgtccctaacatgtgcataatcacagaatctgagataggaataaaaatgtcagcccgtggccccttcccccttctcctttcacccaacaacatctctccccacaagggccccacatatgtgtgtgcacagcaacctcagtcctcaggtgcaagttctgtccactgcccccagacagccatcctttggccatccttaggccaacggccactcacaggaaggacagaacaaaggaagaaactgagtgtagggcctcgtggcagggaattctagggggtcataaatgtggagcctggaccagaagggagaggacagaaccagatcctttggccagcccattggcccccgatcccttgctccgagaagagggacagtctgaagtgggccaaagtggctctctaaagtacagggcataggacaaggccactgttgtctagcctaagagcatacagaaggtgcatccagaggtagagccactttgattttctatcagaggatggttttccagcttcccagacaagccacactcttcccactgtttgtcatcttcttggcctgtgggctattactcaagaaggtcatacggacagggctttatctggaggcagaaaccataggctctaggcttggctgtatttacacgggggatgtaaattcaacaaaccaatctccactgcacacacaaggctttcttagcaatttccaacttgtttgcaccaacccgaatgtaaaccccagattctccatgctgcaggcaattacccagcagaagctgggtttggcagatgaggtttagaggggtcggactgaaagcatgaatgcttccatcacactctaaaacctagtttccattgaataggatttcaggatattctcttgcttgaatgcaaaaaaaatatatatatatatattacccttaaagacctggctgacatgctgaaggggacagaacaaggactgtggagtcagagagtctgagctcagttcccaagaacaggtcaccatctgttcatctcacaggaactgccccttgacagaccctgtgccacgttgtgaggttactggcaaacagaacatggtctgttgcagcctgagaggggggacaaacacatgaacaagcaattcctgggcagtgtgacaaatgctaagtgtgtgttggacaacagtgcaaagtgccatggccaaagagtggatgtctgggggaagtggacagagcttgcacctgaggactgaggtcgctgcacacttatatgtgaggccccctgcaggaagagatgcagtttggtggaaggagaagggggaaggggctacagactaaaatgtgtattcttatcccagacccatctgtgattttgcacatgttcgggacaggcttgtgtgcatacatgtgtaactgacccattcatgggagcccagagaatgggggctcggccatgtggccctgggtaagttacatctcttcactgagtctcaacttcctataccgtcgagttgtttttaggacacaagtgctaagggtagctcctagcccagagttgctacttaatagccattgtctttccctttcctgaatgcgagttctcagatttacaaaatgctttcacctgcaggtaccgaatctctaggttcaccagagtccttcttgcctttggaatacaaactgagatttccttgaatctctgaattttcatagccagtagaaaaatcatctccccaaaatcatctcccaagatttcagtaacacacatgagcacattttccaaggttcctttgcctctggtccctgtgttcccacgtggtatcttattaggcccaaggcatgccgacctcaaccctttctagaacccacaggagatccaggcacagcaaaggtctttgttgtattttgagggccttgctggagatctaaaaatcacctggggagtgatcatattgggcttcacccaatattctgccatttgttcaccctcacacctctcttatgctatccaagcccccagtgggtttattttttctcttccactggagtctcagcataagtgatactgaggccccaagaatgcagcttctaccccacacaagcttccaaaggcatttctccaagaaaggcaattctctctaaaaggagtacctactgttagccaaaggcaattttctctctctttacagttcattttatgctcattaacaaccttttgagactagtgtaataatttccactttatagatgaggagatggaggctcagcaatgaagtgcccttgcccaaggtcacccagatagtgagtgccagagtctcgcttcaagccacgctctagtcagcagcactgtacccggggcccgccgtgacagtcacacatgctcaagagggaacaagtggcttttcctgtatcccaactttcccggtctcaaagagtctctttgctgtgtggcaagatcacgatatccttgtcttctttaaaaagatgctcctgtttagtcctttaagaggagcagaaatgtgtgtatatgcacacctccagaggtgagctccagggagaatggagaccagggatcaaaaggccagcggtcagctttgcactaaatgtgtttacatcactgtaccactctctcccgcaggtcctaggctcctgagacccaagtcatttttgccttgtagtattttggctttctctcactattgtcttcaagtctccccagacttctgatgaaggcgacatgcctcatatttatgttctttccctggtctcagtctccggtggcgtcaaggtgctgagaaaacacaggttttctactctggcagacctcatatcttggctgtgcctctcactctgtggctttaggccaattattttgtctcaaagagctttggtttcctctaggacagagctagtgatgccttcctcccaggtagtgagattttcaacatagagagtgcaactgatagcttacagagagtttttactttgcacactacatgtggggtcaggcagacacaagttcaaaaccgcactttgtcacctgctggccttgctactctgtactaattcctgcacatttctggacctcaggttattcatctgtaatgtggggtgggccatccttccctcctagggtcataagatggttcagaagatagagcccagcacttgtggctacagttccatcagtggtgttttgtctttatagctttgtttgtgggttaaggccataataaagacctcaaaaattatatttaacatgagatatggtacattttaagatgttcaataacatgtggtcttagccttgggtttaaatgggtcttaagtgttcctcttctccctgcctcaggagggaggtgagagtgccatgtgggtgactgttgtattggggcttggcatcagtttggagggcaaacccaggggaggagtgtcgaagaggccctgagcaggggcagtggctctctgccaggagagttctggcacctggacaagtggacaggccccagctaggcaacgctgatggggatgctcggggcttcccaggcaagccatttattgctctctgtgtgcctgtacatctgctctcattgcagtcggtacaactgcgagatgtttagccagcagccgtaatcccaccaatcataatccccagctacagggaccacatttcaccttccattccacaataggccctcagcaacagcttgttcaatgtcacattctcagggtcacccatttgatttggggatgctggctctgctttgcccaaaggacctgtgagcatgaataattgggctgtaagagtgatcatgaattcctcagttgatcaggggccagggctgcccactatcctcaacaccctcactcctgcagccacgtgggcagctctgtgcgggcttgccaggttccctgacattcctgtgaactatgttccttggtaggacgccgacacaagttacaggatattttccccatagggacagatcaactagcaccaatagcatcccctctttcttattgctgcattggtgcagaggtagccttacccttaaatgctctgaggggattggagcaatgatggaaacctagtccatcattttgcataagggtgctcccagcactgccactcacaaggcattcaaggtagacacagcatgcggaacactattattattactattacatatatattattactattactgcaaaacaaacaacacaccccagttatcatacgtagagtgcttattaagtttgagttctaactgctttacaagcatctcatctaacttcctcttccccctgccatgaggttagctactattattatcatcattttacaaatgaattaaaaagtggatccaaagaggatacataattgggcaaagttctgtaggtatggggagaagtactgatttaatctccagcctgtgcctgactcctcccagataagaaagtctgacacaagaatttctgggtgtatctatcacatgagaagttatgtttctaacataacaaatgcctgacccaagagccaggcatggtggatggtgcctgcaatcccatcactttgggaagccaaggcaggaggatcacttgagcccaggagtttgagaccagcctgggcaacatagagagaccccatatgtgaaaaaataaaaataaaaaattagccaagcatggtgtaggcccacctacatgtgaggctgaggctagaggatcatgattgcttgagcctaggagtttgaggctgggatgaactctgattgtgccactgtacaccagcctaggatagagagtcagactcccatctcaaagaaacaaaacaagccaccccaaagacaaatgcctaaacctcaacataaaatgagctttacatgtgaggatttttgaaaaacatcatgtttattataacctgttttatattaaaaaaatctatttaatgtgcataaagtataaatagaatattcctaataaaattagacatagacaacattatgtatggtgatctgggaccaagatcaataggaggcatggagtgggagacagcattagggtgagaaggcatgctcagattagcttttagaatgatgttcccagagggaccaggggagaaaaagagggatggaagactgttgtaggaggttaggaaatgatgaactgtgtagtcaaggaaaggagaggaaatcctaaagcagggttaatgggtcatgatgaacgcatggataaactgggtgttgcgggttgaggctgtgactcagtttccagctagtgcatctggatgttgttggctgaagaggagaggctgacctccaaggggacaggctggggctgaattcagtataaggaggcaggtcagctctcagcagccgtctaaataagcgtatcccagaagcgaggagtgtgctgtgtgtggtaccaagaaggttttcagtggcactttgatgcacccttaagaatttaacaatttcacatttatttttatggttaacatttatttaagatgttttccttttatatatttatgttttctattagaygcatgtatttaaataagacaagggagattgatgtaaagaaaaatgttctctaaattatattgcctgtgtcaaaaatcatgatggcagtgattgaatggtggagatatgtttggaaaagctgtgttccctgttktagcagaacatgtaccccagcttccygatggtctcttcagaacccttgtttcttgcctgcaygttttgcagatccggtacatggcccacagaacgtggaaatcgtagacatcagagcccggcagctgaccctgcagtgggagcccttcggctacgcggtgacccgctgccatagctacaacctcaccgtgcagtaccagtatgtgttcaaccagcagcagtacgaggccgaggaggtcatccagacctcctcccactacaccctgcgaggcctgcgccccttcatgaccatccggctgcgactcttgctgtctaaccccgagggccgaatggagagcgaggagctggtggtgcagactgaggaagacggtgagcaagggaggagagcttacatgggaatggggatattgaatctattcacasggccatggcagtcagttatgaggcttttatttttcctacatttttaattccctcacacacacctttcttttcttaggycttcaatgaaggactatgtaaactgtgcattgcacaactccagggagtgctttcccatcacagtgacagttctgccatagacttgcactcagctttggcccttttgtacccccatccctcttcttgctttataccagygtattagaccattcttgcattgctataaagaaatacctgtggccaggtgtggtgactcatgcctgtaatcctagcactttgggaggctgaggcaggtggattgcctatctcaggagtttgagaccagcctgggcaacatggtgaaacyctgtctctactaaaatacaaaagaaattaccaggcgtggcagcgtgtgcctgtagtcccagctactcaggaggctgaggctggagaattgcttgaacttgggaggcagaggttgcagtgagccgagatcgcaccrttgcactccagcctgggcaacagagtgagattccatctctaccaaaaaaacaaaacaaaacaaaaaaaacaccggagactgggtaatttataaagactgggtaatttataaagaaaggaggtttaattggctcacagttctgcagctgtacagaaagcatagcactgacatagcttggcttctggggaggctgaggagcttttactcatggtggaagatgaagtakgagcaggaacactacgtggccaaagcaggcgcaaaagattggcggtgccacacacttaaccagatctccggggaattcactcactgtcgcgaagacagcaccaacccatgagggatccacttccatgatccaatcacacctccagcactgaagattacagttcaacatgagatttgggaggggacaaatacccaaactatatcaaccaccttctctgtccaaggtttgactgcactgatgcctccagaaagataaaacatgtatcacattgtttaaacatgttgaatttggaagtcagacaatgctgaattatgtaagaattaaaaacagaaaatagatataaaaagcttagcgtacacattggatccacccagaactgaatattcatctggctggatgacagtcatctcaagctcaaggtatctgaaattgaactaatctccaattctmtactgactttcctgtattccttatctcaatgaactgcacctagtaactcaagatagagacctgaaagccagcctaggagcctccatgtctccctcccaaacccaccccacctycatacccccatttctaatgggtatgcttcctgcagtttatcttcctcataacttgagactccaagaacctagagccactactgctagaacacataacttttcctgcctctctgtccttacccatgccatttctcctgcttggaatgacctgtcctccatgtttgcaaggaaacctctattgacctttcaagtctttgctcaaatgttacttcctccaggaagctttccttgattgccccagattgacttggatgtttcttcccaggctcaccgcagttaccttagtgatagcatagaattcgccagttccagggcttacctaagaaacacttccccatgaccatatttcagtttcccctccagccagcccaggctgcctcttgccttgtgggatggctttagatagttcctgagaatcagactcagatgaagattcgtgtgcatgtgactgattaagaaagttttcccaggggagactgggaggggagtgagggaagtgggacaaggaaggggagaaagccaaggtgcaacttttggccaagtccagcaaaaactggctgcaacctgagccttcagggaactgttcagggtgggccatgcatcacagatgtcctaagttaggcaaggaagctgccagccaacagttagggtctgggatggggaggagagattcagaggtaaaatttcagtaacttttgtctctctgcatgtgcaggtaaaggatagagtctcacaaaaattgtataaagaggtctgaaaggtctagccagagcactggcattgtcagctgcataaagaaaatacccggcttgactcagattagccttagaacttgaagacagagcctctactgtggcaattctgtttaggacatgttttctttttttcattttcattttcttctttctttgtgtgttcctgggattcagtaggatctagtactcttgtttcatctaagcgagttctaaatacttcagagttatgaccctgagtagaacccagattcacattctcagctgcaaaatctcatgagaagacaagggaaatagtgccagcctcttctcaccctgcccctaattctcacttccaccatgtcccatcctagatctggaagttttacacagtctactttgatgatccatccctcccttacacccttccagttcatcctcgtagccatcctctttgcagaccccacacactggtctttggggtcatccttggagtagactctgtaaaacttccagttctaggaagatttccctagatctgacttcattgtttcagaaatctgtagccccttcctccagcaggtagaattgtgcgctgtcagacaatgtacactctggagccaagcatgcctggacaagttgtttaacctcttagtgcctttgtttcctcatctgtaaaatggaattaattggccagacatggtggctcaccctgtaatcccagcactctgggaggctgaggagggcagatcatgaggtcaggagattgagaccatcccggctactgtggtgaaaccccatctctactaaaaatacaaaaaattagctgggcatggtggcacatgcctgtagtcccagctactcagaaggctgaggcaggagaatcgcttgaacctgggaggcggaggttgcagtgagccgagatcgcgccactgcactccagcctgggtgacagagcgagactctgtctcaaacaaaaaaggaataattaaagtacttatcttatagattctcgtgcacattaagtggcatggtatataaagaaattggactaatacccagcatgttataaggtactatatttgtggtgaatcacaggagaaaaaaaaaacaaaaaggtattcacaaaggagcatctatccccggcagttgagaaacttcccagctcccctaggaaacctcttcagagctgtagacatgtccagacatctagaaatctaactggttgtgggaaatacactgtagatgctcaaaaagtggcagtgtgcttggtgcctgatatgagaaacagagtcagggcaaaaggatggtttagtgactcatattcacagggaattcctggttgttagagagggagaagtcactgctgaaaatcagcatgaaaattcaggactcaggagatgaacaataaggttttcccaaggagcagctcagggcacctttttaaagattctttgcccaccttgagctgctctttgaggattacctccctgtgcctcagcaaaccccaagtccagctttaaggcgttccttaacttctctctttcttcttcctgtcaccaagaaaaaaaagcctttatcaaaacaacatgagagcaggaatgctttgaaattaaattttaattaaacatcattaataaagcatcaattcctgctctatggagatgtgtggacattatcattactaaaaacaccaacatacgagacatgattcctcagttctgtattctgaggctctgcctcaaaacccactggactgaaggagagtctcagtgtaggaccctgctgtatgccagggttaagttccattctttctaaagagagaggaagcaccacttctgttggctgggtaactcgttcacctcaaggacaagatgaggctagagcgtggctctagtagattaactgaaacccccctccgggagccagcaagcaacctttaggattgagttggctgaatggctgaattcatgctgctgtcatccgtgccacaaaattgtcttctggggaatttgcagaatttgtaatttcagcacctcagtgcatttgasggcctgcgaagaaatccagcactagagagcagctcatggctgctgagccccatggcttcatttgggtagcagctgttcataagaaactaaacagattctttatttttcccttttccacaaatgtctcagacaaaaccacagttcgcttgcaccttgaaagatgaaaaccatgttgatggttttgcttggcagctcactttgactgctatttattgagcacctacactgtgctaggcacggatagacatattatatacagtggctcctgtactcctttagcccaagattttattgtgaaaattttcaaagctagaaaaatcgaaagaatagtacaaaggagacttataaacctctcatctagattcaacatttgtaaacactttgctgcatttactcatgtgtgtgtatcttatatctacatgataggtgacatatgctatgtaaatatatttatgaatacatacaatattttaaccatttgaaagtaaagtgcagaaatcatgacagttgatttctaaaccaattagcatacaagacctaaaaataagaactttatgctacatacccacaatgctatttaacctctaataaattttgcattaattttaaaatcatgtaatatacagtttgtttacatttctaataatatttaacctgattctatgtgacagaaccagggttccgtatatctttggcaaaaccattatgttggcgatgtatatttctcattgtattttgtcaagaagttcataatgtcagggagtcccagtactgatgatgtcacatatggtcacttagataagacaagaactgcccggtccctccactgtaaatgtggcaccttttttcttttgtaaagtatccttggagtgaaactttgagatggaatgagtattgtattcccctaaagctttcactcaatggttttaacacgtcctgagagtcttcacctgaaccagttattacgttggtgcttacaaaagggtgatttaaacatctataattctccctacgcttactagttagscttcttctttagagaagagttgtttctctcttcatcttcctccctgtttttggtctccctgttgattcatagatcatttttgactccgtgtattgaaatcctctactgccattctctgtgatgctcaaattgcctcaaatatggccagtggcagtctcttcaagctgattcccaggtccttttgacatgttctcattagtcttccttgcttctggcacaacaaaaatattctagactattcttttaatgtccctgccccagacctgargccaaccacttattagggatttgtggttgctttcaatggggagtggtattttggcactaagatatacatcttaggtgtgctcggtgatgcgttattgcctgtaggttctttcagtaggtagagctagggagtataatttatttttgttttaagtcatgagctcatactgattcaaattcaacacattttatacatatatcttccttctcctgcagtgagaaccctggtgctcaacatccacatagttttcatttcctgaaacacacataaaatagtttcagaattacaacaccaatccctctaaaaaacaataaagctattatactaagttaggttaaagatttcagtttttatctccttaggctgtataccactgagggtatgcagtgagaatactatgttcaaaagttcagttcttttctctgtatggttatattatcaatttgatacccagttatgttcatttgtttccatttaaaggtttgccttccacctatgctttttaattcaatttaattgtttttaatatgcaaaacagttgcatgtttcaaaagtaaaaactgtgtctcattactgggtatatacccaacagaatataaatcattctattataaagatacatgcatgtatatgttcattgcagcactgttcacaatagcaaagacatggagtcaacccaaatggccatcaatgatagactggataaagaaaatgtggtatttgcagccataaaaaggaatgagatcatgtcctttgcaggaacatggatggagctggaagtcattatcctcagcagactaacacaggaacagacaaccaaacactgcacgttctcacttgtaagtgggagctgaacaatgagaacacatggacacagggaggggaacagcacaccctggggcctgttgggggagtgtggggagggagagcatcaggataaatagttaatgcatatggggcttaatacctaggtgatgggttgataggtccagcaaactaccatggcatgcatttacctatgtaacaaacctgcagttcctgctcatgtatctcagaactttaaattaaattagaaataaaaacaccattaaaaaactacattaaaacgtatattccaaaaaatattaccgccattcctgtctcttttcactattccaatccacacttgaaaggtagctattttcattcctttctggttgatctttcttagagttctttttgcaaaaaaatatgtaatacttttcttcttcctacttcttatataaaaggtagcataattgatatactttgcatcttgtgtttttgttcactcagtatatcctagaaatcacttcatatcagttactacagaatttgctctttattttttatgacactatggtatttcattgtgttgatggaaatactgtaatttattcaaccaatatccagtggacacccaggttgtttccrttatttactatcataaataatactgtagcaaatagcattgtgcatatgttgtttggtacttgtggcaatgtatctttagggtaaattcttaaaagtgggattgcaagagtcacagagtaagtacatatgaagttttgttagctgttgagaggtactcttccatagaagttgtatgattttgtgttttcactagcagtgtagattcatttaatctgaacactaaatgtgaaggagcaaagagtgtttttttttctattttacaaataaggaaatgtagaatcccatataataattacatataatgtaattgattataattaataacttaatatataccataatattattgatatttaatacagttaatcacatacaaaacatatattatttcatttagcatcatactttttaaaaaactcatgtacttgaattgtaaggaagactgacatgcctcaggaatgagtacctttattaagtgtacatttctaatgagccaatgatcaggtttctcaggtcacagtaagctagaaggaggctgcatgttgctaaggatgagtacatctgtagtaacaagatgtggcatgtaaaaccgggaaaagggaaaagtgagagaaaaagcagaaaaagcaataacaacaaggcaataagtaaagcagtccagagtcatttagtgtaagagtgaaagctattcacaccttagtgagtcctgaaggcatcactgtattagagctcagtacatttgagatgtttaccaagatggtcttgagatattataaagggcaaagagaaatgcaattatgtttttcaagtgcacactatgaactaggcattgtgctgatactctccattcttacagtcaattcccaaatactttgatgtagatgctatcgatacagttgtgcagaagaggagtaaatagaattcaaaatcttacctgaagggcattccctgaccacccaatatataattctatacctggccaaaacctctaccgctgttctctgttttatttttctctacctcatgctgtatattgattactttattatctctctttgagggatataagcttaatgggaatagaaactttgttttgtgttgttcactctggtaatccatagtatgggctcgttgttgaatgaatagatggatgaataaatgaccattccacataaaagttcatgcccttttcgtgmtaccatagtgtcccatttatgggtattgtttgtgaagatgggggatatgtatgacgtcttttagctatattcaaagctaactcagacttgcttgcatctcttcccacctccaagttcagtagtaccacattcgttgcttcaaataaaccatggtggaaatatttacaccatggaagttggcaaagtttttgtttttatttttccctggagagcaggttgtgaaacatttagtagcatacaactgtatagttcaattaaaaggctatagttaattaagatgtaaagatttatctggaacaaatgtattttctccaacacgactaggaaatatgagactaaaattatctaaatctctcttattaagttagttccaagcctctgtataatgaatgaataaagaaatatggcaactgaagtggagagacaaaaaaatgacatagacaagtatcaagggaaactcctgttgaattgtacatggctatctgcttttatatatactaccttggtattcctcatatctacccccaaagttcaccattgttaaccccttttcagatgtagaaatggagataaagagaggagaggaggggaggggaggaaaggggagaggagaggagaaaacttcccttgataacactctgtcctcctttatgttgaaatgaaaatcttccttaaattaccacctgactttaaggcacaagaaaacatctggtttaattacagtgaatttacatgaacccactgacaagaagcacagttaaaattagcaattttagtgtgcttttttttaagagaatgaaattataaagtaattaacctttgttgtagaactctgtcaaaaggatggaaagttccatgctgttaaatagaagaagaaatgaaattgtggaaagggaaaatgtggattcattaaagaattacaaagaaaaaggaatggaaaagggatacagaattagaagataagacaaaaaaaggaattttttgccgagaagtctttttacaatgagagagagagagagacctagtttaatcaaaggaaagtaagtctatctccttgcaaaggacatcttgactatggaatggtaatgtggtgggtggaaagagcctcttacttggggtgagacatcctgattttgctgcttaaagatgcgatgacagccttttagccttctggacccacagacctaccaggtgatagaagaaaggggtgatttgggaaatgccttggaaatagaagagtttgagctatatccaggcttcatccactacttcactatgcaaccttggtttaaggactcgcattctgtacacttcagtgccccatctgtaaaatggctcgctacagaggctgtagcacatgaaagtctgtgtaaagcccttaacttactgtctgccaagagctttgctaagtagtgtgtggccaacatcagacatcatagagagctttttatttcagggtgttcaggaaaaaacaaaacaagagctctatccaaaatttccgtttgccctgggcaaaaggccacttttaaataacctctaacccctctgtaatctcattttaaacatttcactctgaccacatctcttctcttttcaatttattccctctagtattgtagctccaaaaattcagccccactaggacttgctaccttgttcattgccctcattcccttctctacccagcttaaattccttgactgatcattccagttacatccttgcataatcccccaacacctcagcctcattctcatttccagctattcacaaccctagctccatctgatttcctgcctgtgctaggtctttccttccgtagctgctgcacaccactgcgctaaccactctcacttggaagccagaagcaccactggagctggcttttaaagctgcctggcaatactgtctttccctggcccattcatccctctagtctcccagagaatatttctcctatcttcagactaacagcacatccacctgttctcacttccacagatgaccttgttacctaatagactgaggaactgaaaccattcaaagaaattccctccagctctcattgcccacatgttgcccacatatttgacctccccctcacctccttgtttctatggatgaaccatttgctttttaaataaaggccagttttgctacttaatgcagcaaatcccacttacttttttttttttaactcaatgtcattgctccagcaattgtcccctttccaccctacatcaaaatttccctttgtaactggatatatttctcaccctccacacaagctgtatttctcccatctttaaaaagattaaaaaaaaaacccagaaacacccagctctatcttctcctcaagctattccatcccctccttatgcatccattctttctatttgttcttgaatccattcaaccaaagtaactcagatccctgccattgcaccaaaacaattatttcaagatcacctatgaccttcaagtcaccaaatccaatagtcattactcagaaagtcagatcctcttacttaaccagttggcaatatctgacacagctggttgttaaatcctccttaaaacactttttgtactttgcttccaattcatcacacacttctagattttctccttctgcagtggcttctcctctttgtttttgttttaaagatagggtttcactgtgtctcccaggctggagggcagtgatatgatcagctcactgtatcctctgactcctgggctcaaacggccctcccacctcaccctctccagtagctaggacatgtgggataggcacatataggcatgtgcaagtgtgctcagctaatttatttgttttatttattttattttatttatttatttatttttgagacggagtttcactcttgttgcccaggctggagtgcaatggcacgatcttggctcaccgcaacctccgcctcccaggttcaagccattctcctgcttcagcctcctgagtagctgggattgcaggcatgtgccaccacacccggctaaatttgtatttttagtagggacagggtttctccgtgttggtcaggctggtatcgaactcccaacctcaggtgatccactggcctcggcctcccaaagtgctgggattataggcatgagccaccatgcccggcctatttatttttatttttactttttttgtagagacagagtctcattgtgttacccaaggtgatctcagactcccagcctcaagccgtcctcccacctcagcctctcaaaatgttgggattacagtttgctggttccttttaaacagcgtgtattagtccattttcatactgctataaagaactggttaaaactgtgtaatttataaaggaaagagctttaattgactcataaatcagcatggctgggaggcctcagaaaatttacaatcgtggcagaaggtgaaggggaagcaaggcactttcttcacaaggcggcaaaaaggagaatgaacgttggagaaactaccaaacacttataataacatcagatctcctgagaactcactcactatcatgaaaatggcataggagaaatggcccccatgaattaattacctccacctggtgtctcccttgacatgtagagattatggggattacaattcaagatgagattttgggtggggtcacagccaaaccatatcacatcccaaccttattggcccagttcttgggactctttcccattcgtatccataccagaggttggccaggtcttaaagtatagkctttatccatgagagggtctgtagcagctactcgatgccaccattgtagcaggaaaacagccagggacaatggataaacaaatgggtgcggcagtgttccaatataattttatttacaaaaacaggcagctggttggattcaacccaagagccatagtttgctgaccctggatccacattcatttccctaattatttcttctagtctcccggctttaaaatccatccatatgttaataattttcccaattgatacctccaggccaggcctctgcccagccctccrgagtcatttatccagctgtctcctcaacctctccacctagattgctaatcagcccgtggaattaaacacattcaaaactgagcctgtgatcctccttcaacttgttcttcccactgtcttctccatctcagtaaatggcaactctgttttattagtgtctcgagccaaaaaccttgacttctcacttttgtcagaactgaggccctggcttttacatctccaaagaaaatcccttctggctggggatggtggctcacccctgtaatcccagcactttgagaggccaaggcaggtgaattgctgggtgtggtggtgtgtacctatgatctcagctactcaggaggctgaagtgggaggactgcttgaggctgggaggtcaaggctgcagtgagccatgattgtaccactgcactccaggctgggtgacagagcaagaccctgtctcaaaaaaagaaaaagagaacctcttcaccctttattgcttttgattgagaccccctggctttgtacaaagcagcagtcttgctgttccccacatctgaaccaataacatattctcttggttcatcctgcaatgtatgtcaagaccttgaccatttctcacagcctctactactaccccttaggtccaaaccactgtgctctgcaccccagattattgcagcagcctctaaataatctttgcagcttcagctctggccgctgcattcttttctcaacacagcaccaaaatgatcttgttaaatcatgaagcaaatcatatcactccctctgctcccaaccctctgatggtttctcttgtcactcacattaaaaacccgaagtttcacggtagctcacatgctccaggtgaccagaattcccacttttgtttgcctctgtgtcatctcttgctacttgtgcctcactatgcaaattcagttatcattctcttcacatatatcagggacatccctgcctcagggcctttgcacttgccatcctttttggctacagtaaggttctgccaaataagcaggatggttccttcagcttcttcaagtcttttttccaatgtcacctctcagcaagctcttctcagaccattctattaaaaactggaagtctcctacagcacactctktgtcyctctttccagctttgggtgtctccttagcaattatcatctgacatactgtatatttcactatatgttttattatctktcttctcccactagaatgcrttccacagagacaagattttttccttgtgtktttcttactctgcttcccaagcacttagaagaacagtgccaggtagacaaataaggacacaataaatacattattgaacgaatgaattctgagtcctcagagaaaaattagatttaagatcatttaccatagaaatcagaagaagatcgtagaaagctcagtaagctatgagaagatatagcttctatgattagcaatataacatcattcggatagagcagattgaggtaaggacatcacaggaaatagcaacaatcttaattgtctctacaaaaaaatcaaattagtgatctctaggctaccctagagctgttctcagagtgaatgcaatggggccagggggaggatcagacaaacatagtatttactttgtgccagacacctaggtaagcactttgtgtatattaacatatcaaatccccaggacaacctatgtagtaggtagtatttttatcctcattttaaagtaaggaaaatgagacacagagacattaagcagcttggccaaggtaatacagtggtgggaacaggacataaacccaggcagtgtggcttcaacccttgatcattgtttaattctacaatactgccttttaggtctcagtgatgacaataagacttttgattagaaatgccaatttgatcactcttcttaaactactgtcctaaagaaatatagagaaaaacacctttgtatctgcactgacaactgtaaaacgatgccatggctgctcctgaaagaattaatgcaagacgtcatgggagagggagtcccaaatgggaaagagatgactaggctgagactgcctggaaagaaaaccccttagggaattggaggagaagacttccaagtctacatgcataagtacctccaactttgaccaaccagtgctaaaaacaggagtgggcgttggagctggtggatgggagtggggaaaggagagaggtcagtgccctggtcatctttatttgctagtccatgatgcagagaacgagagctccccctccaagcctacgtccagggcatatggcaaacaagaaaaggggcttcagtggaaggatctcattgtaaagaaacaattacaggaaggggtagtgtctgtggtaactaacttcaggctgcccctcaaaacacctaaaaagccctcttgccacggagaatcttcctgctgcctaattatttcccttccttaactgcccctcataccactgccccacaggtcagacagaactcttatccagccaagtaatgtatgaatatatctaaattctttcctttccctgtgagttggaaatatttaaaataaggacttacatggtaactagcagaatgacccattaaaccagaccatcacacaccacttcttatgaggttgcatgcggaaaggttactggacagatttttaaaaatgctttcattcttattgtaaagaacaaatctgatagtgcaaagtaaataccccctaacaattgaagcaagaaacaagatttttaaaaacaaaacaaaaaaactaatacgcatgctcagtaagaatatctaaataaatcctgggatagaacatattcatggaatggaagttaagattgtaaaggtattagttctcccagactggcctttgtaaaagagtttagcactatttattattcttatttatttgatgataaactctattgtatttagggatatgtgcttaaggagtgaaaagtataaggaaaagcaaggtcacagtatgaagttcagtactgaaaaattaatgagatgattgttttatgcttttgtgtttatttcacagtaaccaagataaatgatgatagtgtatataatcttataccaataaatgtaaaatttaggtgatatggcaaactattaattaaaaaacttgacttaaggaaaagcaattctgtatagttttacaacaaataaagaaatagaatcagtaatttaaacttttgcaacaaagtacacatcagtcccaggtgacttcacaagtgcaatcagtcaaacactcaaggagtttgtaatcctaatcttacacactttatgagaaaggaaaaagaagaagcacttcccccttcaatttatgacaagactataaccttgatattaaaagcagaaaagcttatgagaaaaaaatgtatgcaaatacctaaacaaaatattagcaaatgatctgaaactgcataaatatgcaaaaaaatagtttaaaaaattagtgttagtctaactttagtaaatctgtttgtgtaatttgctacagtaacatactaggagaggggaaatacatatcatcactacagtagatacagaaaaagcatcagttaattctcagcatgatttaaaaaacaaaatattcttgtatgcctggaataaaaatgggccccctcaacctgataaagataactaaaaaacctacaaacatcatactcaaagatgaaacaatatcatcattatctttgaaattggagatagacatatcatcatttctattaaagactgtattggtggctatcattgaagataagaaaataaaagattggaaaagagcaaaactattattaactacagatgctacaattatctctacatagataacccaaagaaatctgcaaacaaattattagaattaatataagaatatagcatgtttgccaagacattaacattaaaaagtcaattccatttctattaacctaacaagtatgtggtattttcttaaagacattatgtacaatagcaataaaaatataaggtatttagtaatacatttaacataagttttcaagatgtacgtataaatctataaaacactgaaagacgttaaggaaggcctaaataaaagatataccatgttcatggatgagaaaactaytattataaagacatgatattatctcccatttgatctataatacatgcaactaaaattcaaaaaccaaacattttttgaaaaggtacaagctagtcctcaaatgtttatgtaaagagaaaaggtaagagtacccaagacagtcatgaacatgaagtacaaagtagtagactttaccagatagcaagacttacacctcattgttaattaagatgtggtattgacacagggaaagtctaacagaaacaattgaatataatagaacatagaagtagacccatacatatgtggaaatgtgacagaagttaaaattatcaggcaaatcaactgaggaattaaaagtattttttcaatctccctaggatgaggagaaataattaaaattggattcctacctcatgttatacatagtaacacagttgtaaatgaattgaggacattttattaaaagagtaactcttaaatgtcaatgaaaatttagacaaatattctcatgacttcaggatagagaaagtgtttcttatgtaagaaaaactcttttgtgtgggtttattcagaagcagaccctgagataaggatacaaatggaagtagtttatttaggagatggtctcaggacacactcataagaaagagggaaagtgaaacaggaaagggaagaaagtcaatacaaagtttattaacaaaaaattaccatgtgaataactgagttctagaacagtgctattcccagtgtggtccaaggaccagcactgactcattgactctctaatccataacaagacaagtacagaaagagaaagtatttaaaaagaaggagcttagtatttttcttttttgctttttcaatttcacttttacttaaaaattatacttccctattaattcatttttattgtattttatgatatcatgagtccacaatggatttggaattatcattatcatcatcacaatggtttcagtgtttgaaatagtttgagaagtgctagtaaaacatgtctcagagtaacccaaccaagtagtaaggaaactgggatgttcatccatcaacttcctgtctttcattgcttgaaggatgtcttcggggcattaactctctggcacttcttgcttcttctacgtggagaacaagttggctcccacagcatttaggtaaatttgtactttgcagtaagcattattcagtgggatataggcaggccatcaacagtgtctgctactaaatttgtctctctctttctcccatacaaaaactaaaatctgatcaatttgagtacattaaaattaagaactgatccatattcaaaggtaacataaagagaaacacaagacacaaattaaaagaagtttttcagtagcacatatagccaataaaatgattagtatcaaacatatgcaacaggaaaaggacaataatatccaacaaacattaaaagatgctagtaaataggtaaaagcatgtaaaaccttaatgaagtattgttttacacttactagatggtctagaattttaaaacctgataataccaaatatttataaagatgcggaggagtaggaactttcagaacattgcttggggcagtgctgccaccactttggaaaacaatttggcattacactgtaaaaacaaagatagataagcccttcagtcataggaatagaccctctcttcctaagtgtaccttagtaaaatcttatatatatgttcaatcaaatatacaaaagtattccaataaattatattgtaagaaaccctacctggatacaactctactgttcatatacggtagaatggtggaataaataggaatatatttataagatggggatgaattagatacaactatgtgcatcaaaatagatgaatctgaaaatgatgagtgacaaacgcaaatcatataatagaaaacactcaatccacatagatttaaaagaaaccaagaaaaactaaatgatatattgtcttgggatatatgtatatatttagaactccgaataaaaatgaagagaatgattaagagtaaattcaggctgagcgcagtggctcacacctataatcccagcactttaggaggccaacacaggtgtatcacctgaggtcaagagttcaagaccagcctggccaacatagtgaaaccccatctcttctgaaaatacaaaaattagccgggtctcaaaaaaaaaaaaaaattagccgggcgtggtcatgggtgcctgtaatcccagctacttgggaggctgagacaggagaatcacttgaacctaggaggcggaggttgcattgagccaagatcacgctgttgccctccagtctgggtgacaagagtgaaactctgtcttaaaaaaaaaaaaagaaaagaaaaagaaaaaaaaggaaaatcaggatagtacctgtagtacctattttatttatttatttatttaacgatggagaaagaaaaaggagacaatagtgatgggcataaacagtgcttcaatagtatagtaatgttttatttcttagagcagatagtgggcacatgtgtatttaataattattctttgaactattcatacattattatgtatactttttaatatattgcaaaacactataaaagaaactttttaatacaatacaaaaacaatatgaacaataataaagtcctagaaatgcaatttgtaagaaataaaagaaaaacatttttaactgaggggcataaaaagaagcattaatacatgaagatttatacagtttactggataaaaggactcactttaaaagtgatactctctgcttcccaaaaaagagaaaaaaaatgcaactgcagtaaaaattgtgatgaaatatgtttgaaattttataaaactcttcctaaattcttctggaagaatacatgggtagtgatacctcaaaaagctttgcaaaagaagaataagacttgttctaccaagtatcaaaacatgtcattttaatgcgatagagaaatactgtcacagtaaaagctacaacttagtgaaatagaacagaaagccaaacaacatacactagaatataaaataatttaatatggtagtaagatggcatttgaaatcactggggcaagttttgactggtcaattaattgtcctttacaattgagaaaattgtaaggaattatagatttctaccatgtatggtatacacagtaatttcagaaatattaacgtgtaaggtgtaaaaagaaaaagatgggaataaaacagaaaataaataaattatagaacaactattcatctgtactttccattcatctgatctggtgtgagaaagagaattttccccagattggaaagaccaagatctattagcttgagtttcatgctcacagtcttcatcagacagacacttcttattgtccatcagacacaccctcctcaatttccgtcagatagaccctcaaatgaatgaatagaattttcatctctctattctgcttgccttctactctgtgattaaagcttctcctgtctttccaaattcttgatgtaattcgtcccccactacacttttggtagatggcttcaccccacttctcaagaaaacagagccattaggacacttcaattcctccgtacaaagcattagcacatttccatcctctcctcttctctcacaaaaggagagaacccttctttcaacccacccttgctcttgctttcaggaccctaccattgtaagttatctcctctttctttctcactcttcttcttacctctattctgaattttttttttttttgagatggagtctcagtctgtcactaggctggggtgcagtggcatggtctcggctcactgcaacctccacctcctgggttcaagcaattctcctgcctcagcctctcgagtagctggaactacaggtgcgcgccrccatacccagctaatttttgtatttttagtaaagacagggtttcaccatgttggccaggatggtctcaatctcttgatctcgtgatctgcccgccttggcctctcaaagtgctgggattataggcgtgggccaccaagcccagcctctattttgaatytttttcttagttgctttaatcataacctctcttgtctttaagagagtcattattttggctccatatctcattcytgttatggtttgaatycccctccttttcacagccagcattgtttacttgcctcacctcaccttcccctctcttctcaaccctcttcaggatggcttgtgatgccaacattctcccttaaattactcttgcttggctcacgagtcaccttgaggacagtaggttcaatgggcaagtttaaagccacatcttactcgactactcagccatatttgtgactgctgaccagtaccttcttgagcctctttccttctttggatgctacaatgacggcttaccttcctggttttctggttgcctctctgaacactgactcccagtttctccattcattttcctcctaattgttaattctggagttcttcttcacttagtcttagacctatttttttttctctgctctatactcttgccatctattccctgcctacggtttccatttccaaacattggccccagtcttcccatatccaactgctactcagcattgccacttggatgttctatgtatacctgaaataaagtatgacaaaaactgagctcaccagcttcctctccaaaattggtcatcctttaaggctccctctctataaacaacattttgatcccccagttgtgtaaaacaaaagggttgcagttctccatgacacatcccttccctccttcacccttatctatcaccaccaagtcattgatcttccatgttgccatcctctgagtccacatctgtacaatctatttcacttctacactaccatcattccagtccacgttacaattctttctcccgaggatgacaatgacagcctcctaactgatttttctccttccaccctcaacctcacaaagctgtccaccacactacagcacctcctccccattttgccctgataacttctacttatcaagcaactctaacttatgtgccatttaatatcctaacttgccattctaggttgttctctgcttttaataattctcctagtaccatatccctttatgtcagagtcctgattaaaaaaatgtaatgaattagttttgagtataatcgcttaatgtctgtctctctttccagaatacaagctttaccatggatttgactacatctctctttgttattggtatatctctagtgtccatcgctgtcccttcatcatattaaatacataataaatatttctggaaaggaagggtggataagggaaagcaataggatacctgactaattaaaagcttctgcatacctaartgatttcaaaagccaacaaaaaaactggcgaaaatatatttgcaacctatgcaagaaagcttacrtccttaaaatgaaattacaatgacgagcccataagacaaagatgagcaaaaatgaagagccatacaggaaaatgagcacaaggtatagataatttgttcataaaagaagcaatgtgaatggctaattaggctgaaaacaaaatctgtactctccagtattctaaaaaagacacacatacacatgcacttaattttttaaatagtcagtgttggcaagaacagacrtagtcttctgttggggagtccagaatggtacaaactttctgaaaggcaatctggtaatatatgtcaaaagccttaaaaataaaatagttcatttactttggcccagtaaattaatttccaaagcattaatcttaaggtctatctgcagagttgcatgcatacttacctataagcatgctcattccagcattgctcaaaatcatgaagaattcaaaccaactttaatgcccaataataaaggattagtgactataaaggggcaacgccccctctaagcagccattaaaatgcatggccccagagaaatgtatggccccagagaagcctgcaatttctttagtgataaaataaggtcacaatgaaatatgcacagtaggagttaacatttttttaaaaataaaaaatatatatatgcataggcatatctttttttaataaaattttatatgcataaaaagattggaaaataatatttgaacatgtgaattatgagtaattttgttcttttccttttttaacctttttatatattcttaatattcaacaaattctgtatagcatgtccataatgagcaaaactaaacatattttaatttaacaaaggggaactgattgcaacatatggccaaggctatatgtagagaggcgtagcgtgatgattaagagtatatgctttaaaactcacagacaggtgtttagttccctctttacaacttaagagccatatgaccttcagcaagttattccattttctcagcctcagttctcttatcgacgcaaaggagataatacctactgggcagaggtgttttatggcttaagtgaaataatgtaggtaaaattctagtccaagagtaagtgcttttataataccaaaatataaatagatttggcaacaatttactgaaattcattatttctaaggggttacagcagaaagtttggggaataatttgttttctggctcaccgtcttccagactgttgtaagaatagtgaaatccagcaggaggatgctggcargaagactgaccggcttatagaaggagccccaggaaaggttgcacttattagttcaaaatgctggcgtaggtcattcattcacctattcatccaaccaacaaatagttattatgcatctacttcatgccaggcattgggactcaacaacaagtcaagctagctgccttcttggagcaaggcgagcttcttctaattggattggggtttcaagccacatagttcatgttggattcaggaattagtcaagaaactgatgaagcactcctaaagttagagaaaacttggcagagtgaagaaaatgatacttggtaagatgatgggaagctcactttgcatttctcaaatacaaatcctaaaacaagcttgtccaaccagcagcccctgggctgcatgcagcccaggatggctttgaatgtggcccaatacaaattcataaactttcttacaacgttatgagattttttttttgtaattttttttttttagctcatgaactatcgttcgtgttagtgtattttatgtgtggcctacaataataattcttcttccaatgtggcccagggaagccaaaagattagacacccctgaagcaaacacctcatttcagattcccacctctggcagaactggaaactgctcatgtcctttctgcccttatccggttcagttcataaaccgacttgctcagtctgcagatgaaaagcctgatcagccttctgaaaatgggttagcaaactatggcctgtgggtcaaatccagcccattgcctgttttcataaataaagttttattggaacgccaccgtactcattcatttatggattatctatagtcatttttgtgstaaaatgacagagttgagtagttgtaacagagaacgtacagcccatcagacctaaaatatttactatctggttctttacagcaactttgtcaacccctgttctaggtcagyggggctggagaaatgatgtggaaggtgacatcaagttcataacttttccattctgtagttccaggagctgttcctctagaatccatccaaggggggccctttgaggagaagatctacatccagtggaaacctcccaatgagaccaatggggtcatcacgctctacgaggtaaggaggtcccttgtgctgcatccattggcttagctttattcaagtcacttcagcctgacattggtgaatacccattctgctgaacgtataaaggtgagtaagatgwgacataccaaaaggtttctgacagtacaatggggtgcaaacataatggcacacagtggagctgtcctggtagccccaagaacaaagaaatttgtacacatcatgcattgaagtgactatggtgacaactgacctcatccacaaaagagccaaaacccagggagtcagattgttcttatgtggaagagaaggcccaggcctggcaaacagtastgaaagttcgtctgggaaactgcaatacccacatgatgctcactttacgaatatcagtctctttgctttgaaaagaatcccaatgttattctctgcaccagggacacaggattcttcagatttaaattgctctgtgcccaaggcatattttgtcacccaggtgatggcatccaaagcccccattccaagcattagctgggccttaccatatcagagatgaaccagaacctactcaagcaggaatgtacccatcaagccaacacaatgtgccttccagaaaagttgcaaaaataagacaaactgtatgaaagtttattgcaaaacaaaacaaaaaaatctccaacagagctgatatagctaagattcaagtattgcaatacgagtaaggttgagtctcctcccaccccttgtattcttacacaacataagattacaatactagatcaagtggaaacacacaggaatgcagagggaagggcatggataccgaagctggaatgatgtagcctagtgtcctagtagctccaccttttcctgagttacctttggtagattcctcctctctttaagcctcatttttctcacctgtaaaataaaggtggtaatcacttcttcagggtttctctagggaatctgacgagggggaaagacacaagcatcccagactgaaacatgtaccacaggcccacgaagaggcttaagtcactgagagctcatgcagaaacatgcatgtatagggagtgggcttgggggaagaatattgctgccataaggaaaggtgagctctggggaggaaagtcaaggagtatttgatgaaggaaaagtactcaagattaatctaacagaccgataacctctctagagagtcacaggtggtcctgagaactctctgagggagaagattatccaacatgtacaaggtgcttaagaaaacaccttatctcactaaaactagcattcctcaggagagctaacatctccctcttagaagttgcagggagcttggcgcagctctcaggattaccagatggaaggaggaaacagacatccatccccatcacttatgagttttctcaggccacacgcttgggagaagctttcttcctggggagtaccccgagaggagggcaggtactcatactratacaccttgcctagcacattttcaaaacttctttgggaaagagaggttcgaaaatttaactgaaacaaaatccagtcacttcaaatctacatgttctttgtaaagcagaaaccacaatctctctctctctcwcacacacacacacacacacacacacacacacacacacacacatttacatgaaataaagatgtgttgtgcctggcaaacttttctttgtaaagcagaaggaaaggacccatgatttaggaagttaagttacttgatactgttatgtaaaagacgctgtgtgccagatgttcaagacttttggaattcacaggccagtagcatttaaaaaggcttgggggactaacctagggtacttcaacatcttttatttacatcgttttataaaagacataattccaaaaatatagaaaggatataatttcagaataaaagtccatccttcaaattgaataaatttatgattttttactaactcatgacagtcacattattttttctaattttgcactggattgatggcaactttgtcatggaaaagccctggtccttgtacatacctgcatttggaaactactactgtarggctatgttgcaggtggagtcatatctctgcacatattattccttgagagtaatatactttttcctctagtaggatgatgcattagattggatccttgagagtaatacactttttcctctagtagaatgatgcattagactggatgagaaatatcatgattaaaattccatgacaagaagaaagaaacagagggagagcaagggtctaaacacaactgtgagttagactctgtgtttgagtagaacctcctgcaattgaggcattattatatagtgcactctctgaagccccatgcacaaaggtgggtacagattagagcaggttgtccttctcacttctgtgtgaatctgatgccttgtggattttcagagaccagatgccagggatgttggcaktcccatggattctatgggagacaactatgatgaaagacatcttcaggtagcttcttcgctgtgacttgggctataatttgcagagaacyggaaccagagtrttgtaactggttgagttgtttgtaagcatttgaggctacttttgcggaatatgccaaaattattgrgggatgctgtaaagacagctaaggaggttgtagatttaggccattgtattgtgagcataaacatgagtgtaatcttgtgtatcaaaagctagtgaggcctaagaaaataaggatggtgacatttgagcctatatagcctagatctgaatcccagctctgacatttacttgctctgtgaccttgagtacatcaagtggcctctcagaaccttaagtcttttatcagaaaaatcaaggtaataataaaatggccttataggattactctgaagatctgattaaattaggttttgtacagtgtttggcatttagaaataacattataaatgttagctgttatcattacataaaaatgaggaaattgagtgcagagggttaaaatgaaaagaccaagttcatattacccagatgccaaacccaggactcctaaatgcaggtacagatgtcttgcccctttctgcaacttagcgtggtccatagaccagcggcattagcatgacctgggagctagttagaaatgtagcagctcaggcctctccagtttaacaagatccttgggtgattcctatgggtattacggtttcagaagcactgttctggaaaatactactcttgagaaacttttggcaattgagagtatgttctcttgagtagagagatgagaagtaactgttactctgggctcaacccaatccagccccagacagtaagcaagagaccttgcttttaaaaacatttataacaaagcatgtgtttatgaggcaatttacaaatttaattagatgaaaccaatttgatttttaaaattaggttctagttgtaatttcaagagagaaattcataaattacaaattaccctcttttggcctcaaaatagaatattttattacaaagraaaataggataatgcaaatggaagagaaattcaggattgtctgtggccttctatatacaaccttggcctcagcaaagttacaagcaaagaaaaaataagggaggggaaggagggaagtttcattactataactatgttattgttaaatacagcaggtccaagtggttcagattaaatttccttctgcacaagtccaagtcacagcctctgagtccatcctcagacaattctgccccccaaaatgtgagtggctttaagtcccattctgtctccagtcttcagtcctctgtttctaatatgaaggtgtcagactgttcttggcttcaactgggtaagaatgaaggggaaagtaaatctatgtcaaacccatgaaatcaaaaattctacctctttttggagttgtttaattcttgcctataagccagccaaagtctctgaaggtaaagtagtgaagatgaagacatatgaataaaaacagtgagtgcaaaggccctgaggtggaaatgacttaggcaagtcttaaaaatgtagtaaaaaggagaccggagtgactggggcctcctgagcrcagaggacagtgatgagactgkgtgggggaaagggtgggtagggccagggatggcaggactcctagaacttgcattttatcctgaaaggaatggaaagccctaggagggttctacacagakgaatgaagggatccaatttatattcttaaaaggtcatccagctgttgtgtggataagagatggtgggcacacaagcatcctggaaacatctggaaaatgcaccaggaggcaaggacatttccatcatctatgatattaagatgaactatttattaaaagaccttatacctgagcagaagatgtgaaagtgttgttacagctgcctctttactgctgctagcccagctttgacaccctctttttagtaatgagttattatcttgatgagcaccctggagccatggacctttagatcctgggcccaccttccctgaaagatgggtgtctcaccctgaccctattaccactccagggctatgaaaccrtctcattctgcagcagcctcaaactctctctctgcccactgaaaggggagctcagaatcctcgtcagagcccactggttccggcctcatctgagctgcaacaggaagtattaagatgaattagaccatggcctcagatctttggggatttgcactttagtgggagatgcagaatgcaattctatgatcattcccctaacagagtgacagatcatgcacagatagaggcagcaccaacggccttgtgtccacaaactagcatcattaacatmacttgcaggcatgttagagatgcagaatcgcaggccccagcctggacccactgaatcacagtcttcttaacaagatccccagataattcatgtgtacattaaagcataaaaagcactggtttaagaaacattctcaaatctcacaattgtgatcagcacaagagggtggtagaggtggtaagggaatatcaactggtctggaaagctctgcctgatgaaaacattgcagtcattgcatgaataacgtgatcatttaatgcagtaaggaatattcctgctcacctgacgtctaaacaatatttacatcaggaatatggaaatcatgacatctgcatagactcttccagaaccctgcttttgggtttgattaaggcatcagggttccctaatcagggtgtggatgtgcagaagggtggtgtggcctctctcattctgactcagctcttgggaacaaccacaactcaccaagaacacagaccgtcgcaattgcggacaggcacttatagccagaatgaggtcaccaagggaagcaatccaaccaaacagttgtctaaaaacccttcaataaaatcattcagagacaagctgttcagagttcatggaaaacagtaatcaatatgtgtttcaattcaattaattgttctcgtcttcgtccaaaaataaaaatcacacagtgtgagggaattgggccagaagatgttacacttgcaactgggttaacgaagtgtgaaaatatttaaaattcagacatatgaagcctcccagtaagcctttctgtttagcagtcaaaatcaccaagtttctaattacagtgtataaatctgagaagcttaaagggaatgagaagaccctaatgaggcaggaatgggtgtcttgattatgctagagttgattggcatttatctcacaagctattctaggtgcctggcattcagagttaaataaaacagacttcgcttcaataaaacaaggcggcattcctgtatgggagcgcctttaaaaggtacaataggtcagagggtttgtcaatatttttttcagcacacagatggttggattcaatctgaacaaaaagcacgggccccaggaatcaacaagccatcagagtgcattacaaggaggctggagcgtcttccgagacaggagttctgaacagaacgaaagcctgaacacagacattgatggagagaggggaccagctgggtggataagctcacgaggaaactctttaagacagaggcccagagaaggttcctggctctgtctggatggatgagcatgcctcctcccatccctcagctttgctgcactgaccactcagggctcactgaccccagactggctcatgactctggtccacagaggagcagtgtggagaatgggatgtgttccagatgggcaggaggtagtctaggcaggaggaaatcagctggattgtgactaatacagcccaaagcaaaaatttgcataattcaaactggatctaygttaattaggacacatgatttgcatawtgcaggccgctattgagtataactcgagccaggctggtaacaaggaaaaaagctcttgtttcctctaaattgttcaagccagaaatgagagcgtcatccgttgcccccagcagccacacagctaatccgccagaaagtttgattatttctcttgccaaaatagacacaggtcaggccgcatggcaccatctctgctgccacatyctgttctgagcacccctcagatgcttggagcatttcagttcctccctgcccacccccttccacacttcacctgttccatatgtccacactgcagccagacagawcatcttaagaggtaaatctgatcctgttcctcgtctgctttggcttcatcttaacttcgaggcactgaaggatctggcactggctgcctctctatcttcacctgccgctcctcttcccattgcttactgcagtccagctttagcctcctggcatttcccaagctcacccagttcctggcagccctcgccactctgtgtcattccttctgcctgtaatgctcttcactctacactcgtcagggctggctccttcctcttcttcacctccaagaggctttttccctccactgtccacttgatctaaaacaggttcccctctgtttcctctcttaacaacttgctttccttcataccatttccacaatctgcacttgtttcatttgtgtacttttgtatcacccaggcccgcaacagacttgaaccctcgtgagggtatgggtcctgtattggtgaattttatgtgtcaacttggctggaccacggtttgacagattggtggtcaaaccatagtttggatgattttgtgaaggtgtttttggatgagattgacatttacatgggcggacttcgagtaaagcagattgctccccataacataggggagcttcatcccatatgatgggcttcatcccatcagctgaaggtctgaatagatcagaagactgagctctcctgagtaagagggaattccccagccgatgcctttcagactggaactgcaacatcagctttccccrgttctctagcctgacagcatttggtcttgacataactaatacaggccgggcatggtggctcacgcctgtaatcccagcactttgggaggccaaggcgggcggatcatgaggtcaggagatcgagaccatcctggctaacacggtgaaaccccgtctctactaaaagtacaaaaaattagctgggtgtggtggcgggcacctgtagtcccagctactcgggaggctgaggcaggagaatggcgtgaacctgggaggcggatcttgcagtgagccaagattgtgccacttcactccagcctgggcaacagagcgagactctgtctaaaaaaaaaaaaaaagaaagaaacaactaatatatgctatatttatttttgcctttcagtgtgtcctgaggacctaaaatagtagctttcacatagtatgtactcaataaatattctttggataaatgtatggatttgtgctctatcctagcaaggggcaatgatgattatttttgtctaactaatttagctgttctcaagcttggctgaagattagaatcacaccttgagataccttctgctcaattttgctgtgaagctaaaactgatctgaaaaaataaagtctagtttggcctggtgtggtggctcacacctgtaatcccagcactgtgggaggccgaggtgggtgaatcatgaggtcaagagattgagaccgtcctggccaasatggtgaagcccygtctctactaaaaatacaaaaattagctgcttgtggtggcgcatgcctgtagtcccagctacttgggaggctgaggcaggagaatcgcttgaactcaggagtcagaggttgcagtgagttgagatcatgccactgcactccagcctggcaacagagcgagactgtctcaaaaacaaaacaaaaataaacaaaaaatcctaccttgagagcttgaaacaatgtatagataaataaataggcgtctagttacctgaatgaatgcagggatggatggatgggccttattgcggtccaaataaatcagaatctctaggggagggggcgctatccatatgctgtatttgtttgttgtttttaagttccttgagaatttcttaaaaacatccagggttgggaagaagcattgcatgaattgaatccagtcggtctcctctgatatgtaatcctagctaaacaccttctaaataaacccagtcttgatcctggcttaacctatcttcactctcactctgccagactccacctctatctgatgttacgctacagccaactcactcatacacaggcagttgctaagtgttaatttttttaaggattaaattcaagaaacattggtcttttttccctcaaggttgctaaacagtgtgtggagtaattgaagaaacatagggaggtatcgttctgtcaatatccctttgcatgttactaatggcatcttgcaactctgatgccagagcccaccacagaccttcccttgcaaatctttttccctctcctgaatagtggaagtcagtcctgttgtggttttttttgtgagattaaaaaagacatgtgcacacacaaaacaatagatttgcccagaggccttccctaaatcttaaaagtcagggccctgggatgtctaggagccatttgttctagtccacagctcatcattcaacctccataagatgtttcccctccagaaacttgaaaaatgcaggcatccctggttagatgccatatacaggtcattcgggctgacagggaagctgacaggtgtttcagtagcaacagctctggttgaaaagaatgatttctggcactcagagtctggaaggaaaagaagttgcattctgatgtgagtgacttgcatttatgtacctggtcgcattagagctgctggtcatccacttgtggtatattaggattgcctctgtatttgccttggggtgtttcttcttttctattacgacacaggtatttgtgatggagccaggtaacttgacagtggaaatcaacagatgtgtagcacttgttacctaaggatagcaaaccatgttgtcctgccagtgaggttttcacagtaaacattaatcattcagttcagctgtggaaaacaataaaggttgctgcatgaaaaatattcctgcactgcgcacatgtgaataagtatgcttgtcttggggtgtgtgtatgagcatatgtttttgtgagtttatgtagttctacactgtcacatgtatacactcatataattgtatgtttggtggcatgtctgtgtgaagctttcatcctttgatgtatccatttttccagcttcatccttaggattgttctatttcattggagagttaactgacagagatatcagagacacagggctatgtctgttttctcctggactaggggggcctgtgatcacctcatatccgtgccatggtaacaccaggggagaaactttctttcatttcagtgggctcccagctgtttaacatgaacgtctgccataatttgtctccagagttttgctaaagaaaaatgttggattaaaacaaaagtctcccggttaaattgaatcctatgcatctacagttgtcctaggagagagaagggaaggaaatgaagagtgagttctgcatttgtcagggcgtgggctttcttcatgtttcttatctgggagggaaactgcattttgctgcactgcgtgtgcacccagaggcctttgtagggtgtccttctgtgcacatggccacatggctagagatggaactttctccctggctgctgtggtcctttcaataawctgtgcccagaggcagcacttaagttgtgaagtgtctctttaaacatcacaagttgttctcttttcatctcagatgttttaccgtgttacccctgttggaattccgcctaggctgggcaatgcagcatgaatttgctgcttttaactggctctttcgcttctgttttggtcagaacaaaatgaaaaatgtttgcatattttcatctatcatcaggacatttggagcctctgttctgaagtctctggaggctggaattccaatctgtgatttgttgcttgtcttttcattagctcgggagctagcaggtggtttttctcccctcaccttaagtcaatgggcattttttcttttgactgctttttcttactctttaccaagagaaaagtaattccttaaaactgacacccaagtatgagatcttggtctacctcattatggtttcaatacatacatacatacgtacatacatacatacataccatgtctccagggtccttcaagatggcctaaagaaagttcactgctttcttgttctgttttattttatgcacgtttttaacgtgtgtatcgctgcacgtcaaatagtgggttgtgcaaacagtaaatttaagattgacctttggttagtcattgcagagtgtacttgaactagttggcttctttcccaacctgggcctcagtttccacatttgtggcttaggaggcttggaccagggagattcaaaaagctctttctgctatgaactatcacttgggtgcccaaaatgagattaatctcactcctagtttcatgaaactgtttctgtattggtctgtgcatgggtctcttttctttttatttactcattaatttttcagtaacacaccaactaaaagacaaccagaatgctgacaacacctaacatttacttatgatctacataagcacatctgtttctactcacttacgtctccccatcccatcttcctgacccctccactcttctaaatcttgtatataattcctgtatattttatatagttttgctacttgtgtgaattccttataagcatattgttttttagtgttttaacttttaataaaggattttaagttgtgtataagcttttgggacatttttattccatattgtattgcaaatgttcatccccatggatgagtgcagctgtagtccattcatcttgactgctgtctactactccactgcacgaagatactacaaaactttcactcatgatcctttcataaacattggggttgctttcagaatgttgcctttatcagcagtgatgaaatgagcatccttgtgcctaccttctcctgtatatgtgcaagattttctcytgaatttctatctagaaactaggtcagatggtaaatgaatgttaagttttacaaaaatactccaaactctttcccaaactggttgcactaatttacactcatgccagcaaattatgagtgcctatgatttcaaaccctctccaacatttggtgttgtcaagattcttcattttgactaaataaatataaaatggtatcttgttgtcttgctttgtattccctctattattaatgaggtagaatattgtatttcattttctgtgggatatctgttcatgtcttttgcctacttttctactgggttatatgctcttttctttattgatatgtaatagttttataatatacttttgataatattttgccagttacaaatgtaatttgctgtttttacttcttctaaggtatctttgaaaaacaaaagtccttaattatagccaattttatcactttgtttatatagttaacacattttgtgtccttaagaaattcttccctaaaccaaggtgagaaagatgattgcctatatttctgctaaaagttgcatagttttgctcctgaaatttaagtttttgatctatctgcaattaatttttgcatagggtgagagatggagtgaaaattttatttttttattacattgataaacactttatccaagtcctttttacagtctctccttccctgctctaccaggccatatctgacttatgccaaaatttcttatatgcatgaatttttttctgagctctctattccactggcctccatgcactrtaaccatgcatagtcatatttattacagcttcacagtgtcctgatctctggtagagaagattcctcctcctcatacttgttcagcaatatcttggttattcttgcccttggctctttcattttagtatctacttatcaagtttaatgaaaacatctgttgtttttattagaattgccttgaatgtatagaacaatatgtgggtaattgacattttatgatattcaatctctgtatatttatttaggttttctttaatatctctcatagttttattaccttacttttagagctattgcatttcacataaaatccaaactgctaccttaggtctgaaagacttgcacctcccattctctttttccctctggtctcactggccttcttttactgtgctccagcatgctaggggcccctgtctcaggcttattgcacgcagagttcctattgccagaaagctctttcacttcctcttccatggccaactcattctcctactacaggtattgatgtgaatgctaccacctcagaagggccctgcctaatagccttcaggtagggctttgcccactcaccactgtctctaccattgcttcccatttttggataacatggaccacagttcacaattattttttatttctttataaatgtctagccttatattgtaagtgccaagggatacacacatttataaacaaagggactcacaatatagggatacacatgtacaagcaagtatgtgcatataaatmcacacacacacactcctatatatatacatagctcatctctggaaagaactcagtaccttacctagtacctggaacacaatagggtctcaaatttggtggtgctttttttcttttctttttgttttcttttctttttaaaattttctcttttttttgttgtttttgttttttgttttttgttttttcctttgagatggattctcactctgtcacccaggctagagtgcagtgatgcaatctcaacttactgcaacctccacatcctaggttcaagagattcttatgcctcagcctcctgagtagctggaattacatgcacatgccaccatgcttggctattttttttttaatttttaatagagacggggtttcaccttgttggccaggctgatctcggactcctgacctcaagtgatccacatgcctcagcctcccaaagtgctgggattacaggcatgagccgcggtgcctggcctctttttttttttttttttcttatgaagatgggatgggcttttcttatgaagatgagatccctttgaaggcgtaggtagagtaacagaagtatctcttagcatccattagtccatatatatgaccttataggaccatccaaaatcataagattatgtcccaagtcttataataatctctaatagactatatgaggttccagtgaccagtgagtttatacttaactcatagaattaatttgctaaagtataaacttgttaaggttaaagatctgtattcacaggtatatccccggtgcctagaacagatcctggcacaaaatagggttcaataaatatttgtttaataaataaaaatgcattccaaacttgagtcaaggttaaggcaacaggcgtaagagatattcaaatatcgacatcgctatgatggcttgatttttwaaataatttagttttcattaaatgttagtgacaatataacaataktatatagtgttagaaaaatagggagtggaaataacacactagccatcttcatgtgggtttattttctttctagttcttgtgcatttgcaacagctttgacrtggttatggtgactttttttttttaattttcactatgcccaacatattctcatttctgtgtaatctatktattccatttaatggctctccattccctgaacatatggaccrtatttactttcaaatcactttattcgggatgtgttgattgatcttactagaatgttagatataattttgggggtatgataagagtgaactggatctttttaagcagctggttaggagagtttgaatttctgctttccttttccctctcaatagatttttcagtagcaggcagtggcattcacatgcgttccattgattgtagaactgtggtctaaataatagctcactatgttcagtagacatggatctaatggaggagagtcaaacaatacatacacatttggatgggatccataaactcgaggttagaagtggtggtcctgttttcctccttgttttaaaacttgaatttcagtttgcttatttcctagcagagggagatgaatatagggcaagtgtgtgccctgactcctccctaataccattcccatgatggacatcaataatcaatcagggcatgctcttccactgcactccaacatggcctcagaatccctttcatcatggcacagcactgcagctggtcatttccaacagaatggggttagcctgcaaggtataccctgcctgctgtctctggcctcttctcagaaggttgatagggggataggtgaagctctgccctcactcattggttcatcytacagaatctgtctttatggtaattaggtaatttctggatttctttttttttctgcagtataagcatgttgcagtttccaatccttttcacaacagttgtaatcctagtggactgtgttgcagtatctgcagggacgtcagcattatgggccaacaagaagataaagcagatggtgtgaggttctggggaaacttcccacacactgtatcccccatcggcagctgggtttccatttgccagtagattaaagcaaagtccagacatgtccgtgtcagagtcccacccatctcatgactgaactcaacatggtgagtcaaaagtgttaacagaaaagccaaactttgcaaaatcttttaaaaaggtttattctgagccagtatgagtgatcatggcctgggaaaacagtctcaagagatcctgagaaagtgtgcccaagatagtcggattatagttttagggtggcaagatttacaggcaaagacataaatcagtgcatggaaggtatatattagtttggccccaaatgacgagatatcctgaagtgagggcttatatgttataggtggattcagagatttttaaatttgtaattggttaaaggagtaagkctctgtctaaaacttggaatcagcagaaaggaatgttttcagttaagataaagatgctatgtagctggattgatggcctgcagctgtgacttaacccttgctttgcatgactttaggccttgttcataatttggttttgtattgccacaaagagtctgttttaaaattaatgctggtcaattgtgcctaaaatccaaaagggagggaatgtagtaaygtgtgatttcctttcccccatggccaagaattccggttttcaggtttctctggggtccccttggccaagaaggcatccgttcagttggttgggagcttaggattttacgtttagtttacaaaagtaccaaagatattggaagtgaaaacaagcagtggtctcaggtctctgaggatcagcctagtgacagcaagaccctagcctgtgtgtggaggtgcagagaatgtgtcaagactcttgcaagcaggtttgattcagcagcctcccaggaagggctrtgttaggcacactggtgccataggctcctgggtatcaagtcctaagtgaggcttagactgygattatctaggaagacatggggaaggtgggaactgaggatggcttgggcgtctcccttctctcatagctgttttgtctcttaacaagatagagttagttctactctctcctcatcctatgagccatgcccctgaagactagcccttcactcccagcagcagccatgctgtcagttgcaatgcctaaaggccctgtgtgtccgttcccacctactgtataaatgttctatctgctgttgtgagaggcagttctttttgatgatgcttacctgtgttaccacttggataaagagaccagagctatagaagccttcctgaaaatgatgccagaggtgagagagtctatgttagagcaagtcatctagagagtcttcatgactgaagggcagaaccacaggaagataaggccaggtgcagaggtctcaagattttgtaggaaatcccgttaaggatcttgtatgtacaataggctctctgctctccccaccaacaaatgcattctgttatcttagcctttcttggccaatttttataacaatattatagaatgtttggatatcagagaaaaagatcacctataatctcttctaccacagtgctaattttgccttgtattttatctttgttaatatgcacacatcttttacctaactataattacataaaatttgctattgtaatttttcattaactgtttaatcacaatcatgatgcctttatagaaccatggaaatagttcatcttttttaatgatggcataattgtccattagtgtatataccgtaattttcttatccatccctttattttttatatatttgataacactatgataaacttcatgtttatggtggcattgcatcatggtggaaagaacatgaccttcagatctggttgacctggattcaaatcctagatctaacgttgcctaggtggctgacttttgggcaaattaacctctgaaattgaatgatcttattggtttaatraaattgkgtgtaggagaagcaatattaagcctacaattcaggaatattataagaattcaaaatgtattgtagtcctagctgtccagtatccattcaatgtcaaagttcgttttcttcctcctctgtttagagtatttgtgtattagacactcccacccccaccgcacacacgaacatgaaattactgggttgaatggaatgaatacttttgtaactcttgctacatattgccaaattgcactgcacatagatctcacctgtgtgagtgtgtgttttaagtattgtgttgagtttttatgccagtcatcatgtctgggaagaaggcctttggcagcccaccagagatttatgtcagctttcatgatactctcagagcaggctgatgtgtgaaaagcgtatcatgcatgttggcagatccatttgcactctccaaggacktgctggagacactcttgcctcatcaattcctgttcactccctttcccctttgcccttcaatagcaagtagattgcctggtccccagtcatctcccagagggtcctggaagccccatgggaactctgaattgaaggactcgcagccaggtttctacagttcctgccaccaactttatgatacatcaccagccatgcccttccacagcctctgttagcctacctgcagaagaagaggttgaagcagttgggcctctcaagctgaacctctctgtgttcttctgttatcagcatcccctgggagctttttaggaaagtgctatctctgtccccaccccaggtcttctgagtcagggtctgcactgttacaagatccccaggttgtcactgtgcacgttgaagttcagcaygtacagtactgagttgtctgcaggccaagcattttccatcatgccaggaacatttactggagcctcagttttggaaccagtctttccctgaaccatgctcttgctacgtcaggatttcctcaccctgctgtgaaattcctccccttgcccagttatatctgtggaccgtggaccctggaccgtggaccgtggggaccttgctcatgggttagaatcagagaaaccaacacttccctccctgaagagaccaaaatcattttgctaaaatacagattatacagacactgtaccatttaaaatccttataaatcccaacagctctgaggataaaacctaacctcctctttaacttggccaacagtttcctccatgagtgactcagcccttgcgggcttgcccagttccctctcctgcttttccatccccactcccaaatgcacagactttacattacagccacactacactccccttgctatcttttccctcttcctcctttcttgcatcctcagcaccctgctcaagggttctttggggcatattttgaccctcggcacctggatgagggcttcctacttgttagtttataatagaatttattcccccatactgtgattgtggatttctacatctgtctacaacttggctcagaattcttagacttcctggcataggataggtcatccatgaatggcagtggtgctgctacctgcccttccttccttcatgtcttccctccacctttctctgcctgtgccctggcacaggagattgagtctcagacatcactgtgttrccttgccttctgttcatctgaaagagcgccttgcaggggatgaggagagagggaggagaccaagggaggggtgttgactgctgcagctttctcccctccagaaaggtcacagctcctcccaaggtgacctttcaggttctaggacctgctccctcctccacccctcccactctcgcttacttagttcactcctccacgatacctcygccccgattctctcaaccggctcacagggttgtaaatagtgcctttagtcaactctccttgaattatctgtctatttcctgctcgaatcccatggagaccccattatctttaccatgtatcactgagagtgcttatcatcatgcattttgtctcagccmttcaaggtaaggatcactatccccatttaatactgagccttagaagaaggaagttacttgcctgagatgacctgactactaaacaaaacctagattcctactaagtgtgaatacaaagcttgcccacttaactagttagccacagtgccttttccaaaggcactcaataaatgatggtgaaattaacctgaatttcccaatcatgatcaatccacttgattagggtggccataagcttgcagatgtagggtggggaggagtaaaggcrcagttttggaatgaagagggtgactgaggtctggatctagccttggcttggaawccatgtagtctacatggtgtcccccaagcttgaattgccaaatccttgaggaggggtgccctgtcagtattggatgaacaaggcttgtgtagggaaatgagtgggaaaaaacaaatgggatgagttgagtttcatgcccaccatggaggtgacttcatcgtcatgattgtatttgcaaattccattcaacctgaacattcctgcaactgagtagacatattcagagcccatscttcccctcctgtgaagctgagtggcatgcttgacctgatggctttgggagggctctgacacaaataggcactgtctggtgtgtcaacatcaaaggaaaattgcaaaaggcaaattgggctaatatttttcattactggaaaaaagtttcccataccaagtcaattttgaaaaaagaatttcgtctcttacatctgcacagaaatgtcaaaatggacagggctgtctgtaaacaagaaccatggcagttcatgaagtttctcactttcaaattaataattatttaaaaagaraaatgaaaagaaacctaacctgggccaccaggatgactgcttctataacctcaatgttgatgggtgaacccagtgactgtaagtggtagtatggtcaaggtagcatttctccaactgtaatctatggaaccctttggcatgaggtgtccacacatttatgcctgggggtggccatagtctgaatgttggtgtttccccaaaattcttatgataaaacctaattcccaatgtagtggttttcatgtgcgtccgtgtgaggagaccaccaaacaggctttgtgtgagcaacatggctgtttatttcacctgggtgcaggmgggctgagtcccaaaagagagtcagagaagggagataggggtggggccattttataggatttgggaaggtaatggaaaattacagtcaaagggggttgttctctcgtgggcaggagtggatctcacaaagtacattctcaaggctggggagaattacaaagaaccttcttaagggtgggggagattataaagtacattgatcagttagggtggggcaggaacaaatcacaatggtggaatgtcatcagttaaggctgtttttacttcttttgtggatcttcagttacttcaggccatctggatgtatacgtgcaagtcacaggggatgcgatggcctggcctgggctcagaggcctgacagtggtattaagaggtgrgacctttgggagatgataaaatgcttggatgtttgggaggagtctgcccttattaatgggattagtgctcttatgaaagatgctggagggagcttgttcaccccttctgccacgttaagacacagckmsawggcgccatcgatgaagaacaaaacctcactagacactgaatctgcaggcaccttgatcgtggatttcccaacctcaattgtragcaataaattgctgttgtttataagttacccagtctgtggtaatttgttatagcagcccaaactaagacagattttataagttttacaggtttgcaggctaacaagtttttaagtttgagaaacacttaaaaggatgaaagaccttccctttttgtgtattctttaactcccrtggtacttcttaacctcagtaaagtattgccatgcagtaggtgccaaatagactgttacagaaagaaaagaatgggggagaagaggagggatggattttactttctaaatcaatggctttcaaatctgactgagctttcaaagctctggaggcttaaaagacaggcagatccaaattcttctaaaagctactgaatcagaaacttcaggggtggggccaggaaakatttataaatggagcccagaggagtctcttgtgccaccatgtttgacagctactgtggcaaatctgtctgcactgacctctgccctcctacctttgccctggttgggatctcaaattctcaggactcctgcatccatcacctgctggcttcccctggtcctttctccaagatccaccctccacatcagccatctgaccaacctgctgaaacaagagggttccctgaccccccttgcaggacacacaacaggggtgtgactcatccgttcagccactgtgcacattcaaaccccttacgggagggggagctcacagacaggcaggtgcaggagctcgggctagcacttttgggctctggccccacagcagcatccaggggtgggtgtctgcaactcccaaaacctcagtgggcatgctacagtgctcttttagctctgccatctgcagacggcttaagtgttaaccaattcagtgtcctcttagtacctgggttcttgtccagtgtccaggaagaatcagttcacacatggacttgaaggatggtaaatgtgggggtcttattgtatggtggaggtggctctcagcaggttggatggggaggtggaaaggggatggagtgggaagatgaccttcccctggattttggtcatccagcagccggtttcctctctgaacatccccagctgaactcctcttgatgtttggatgctccttctcttctctcctctgccatgccattctgttactcttcttctcttctgtttgtctgcttgtggagcccggggtttgggttttatatgggtacaggataggggagtgtggtgagccaaaaggccacatttgggcatgaaaagaggaatgcctgttcccatttagggctgtgggtttccaggcttgagggtgggggttttgccagggaaccctcttctacccagtatttccctgactcctatccgtatcactrtgaaacacacagacaactttcacgaaccatacagctctttaatccagcatttgggtacccctggactcctcatgacctctttagcttgctttctgatcatctgctttttccacctctatgttctggcagcaccaaactgcttattggcagccccttccagaagctsctctttacctttgtacttctttgcacattgataacgctgatttgccttcaaggcctccctctctcatccactggctgtttgctgggataatgtctgcttgcctcaatcatctcagtcattacctctcttttrccccagctttattgaagtgtacttgacaaataaaaattgtatctgtttagggtgtgcaacatatgtatacgttgtgaagtgattaccacaatcaatctaattaacatatccatctcctcacatagttatgatgttgttcatggtgagaggacttaaaataagctctcttagcaaatttcaagtatagaatacaatattatcaactatggtcaccatgctgtagattagatccccagaacttattcatcttgcataactgaacctttgcatccattgaccaagatctccccattttcttcaccccctagtttggaggacattatgatgagtgaaataagccaggtatggaaagacaaatattgcatgatttcacttacatttggaacttaaaaattcaaacttataagtcaccgagtagaatgggcattacctcttttcaaagagacttcatctcacctcctctaactggtttatgcacccccctcatgtaacattctggagtatttttgtcattgcaatgactgcattgcgttatagtaatctttgtgtgggtttgcttgtgtgcatctcacgctccaggcaaggattttgtcttgttcatcaatgtttcccagacatctagaagagtacctagcagagagtggatgcatactggatgtttgrgtaatacagaacccatattactcataatacgtaactcacaaagaaagaattggcctttcttccccctcaacctgtcctattttagctgagcagtaaattccgtaatgtcaragaaatatagaaaacaaaaagcatttcttgttttctttttccacacacttttgtcagccgtgtctatttgcttaaatccatctttttccacgcatacgtcagagagaggcaactctctttaacaggattcttactggaaccatctccctacataataccttaaaggcatcctagattccctcttgcgttcttgtcttgggaagaaagatgttgctaaggactgttttatatttgtgttctcatctgacaaaaagatgtgccatggctgctatggcaaagtctgtttcacagtgcccaggagcactgcaatttgctgtaatttcactgcacttggtgtggtctgggggctgctgcatccatcctcatagacagtgacttccaattacaccagctaattgtaccaaacttgagctgcttgtgtaaatgagtaaatcattcccaaattaggcacagggaagctcattttgcttgctgtttaaggcttttgaggcacagcgagccccctcagacaagtatccctcagtttgagagtgggaggcaggtggaaggtgtttactaccagctctggtgttctctgcccaaggctctggaatccactggtrggaaacttacagccygacccatatgggtcctaggataacaatgcccttggagtaaccttgaaagctgcaatctgggctttaagtttctgtcagtaaattgggagtattttttgcacagagaaagtgcacctgtgacattggatttcagctggrgacaaaaaggttttgttttttgaggtttggaaaacttgagtgtccaaagtcatgacaagaacaaaaatgttttaagggccaaaaaataaaaaataaaaaacctaaatgctttaaggttggtcccatcagcatctcaagagcatttggttcttttagcagatgccaaataaatagagatttactgggggctaagtcacagtttagcacaagctttaaatttgttttaaaaagttagttgtttatatttataaaatrtagtaacagaaaacaaattatcagttactcagaatcttacttttgtttcatttttttctcctagtacctgtctatatacatatgaaatttttctgtaattattgcatctttattattttaaatgctttttcctcatgtaaaatgatacatagttacattgttagcattttaatggccacattctgtcccatcaagtgacactatcatgatttatttaactaccttatgtgacattcacatagcctctaacatttatccattatggaaaatcatagaggtttccatgaacatttttatgaacttgctttttcctgtcttgttaaattatttccttcaaataagtttccagaattatgattgtgatgtcaacagcacaaccccctgatgtttttctgggtttatgcttcccctagagtggtgcattgcatcaacccaagctctgatcaaaggggctggaaataaagaggcttcagctggaagaaggctgaggccagtgaggggcctgggcacaggatgaggccacaggctgagagagttggggccagactgagggtgtattagaagggttgtgggcaaagaatcacataaaaaagggaaatgcagtctaactgtgccactaaccctgggtgacgtgtcattccctggggcctgatacctagcctataagcagggagactaacaaggactctgtgaagtttgccacatggtggaaagggatactatgcaaaagtccctggcagagaaattgactcatttctgattcttttattagtctttctcttcctttttttttttttttttttttttttacttttaaggtcaggggtacaagtgaaggttttcatgggagctaattgtgtagattatttcatcccccaggtattcagcctagtacccattaattatttttcctgatcctctccctcctcccaccttccaccctctgaaaggccccagtgtgtgttgtgtccctctatgtgtccctgtgttttcatcgtttagctcccacttataagtgagaacatgtggtatttggttttctgtttctgtgttagcttgctaaggataatggcctccaccgccatctgtgttcctacaaagaacatgatctcattcctttttatggctgcattgtattccatggtgtatatgtatcacattttctttatccagcctatcattgatgggcatttaggttgattctgttggctattgtgaatagtgctacaatgaacatctacatgcgtgtgtctttataatagaatgttttatattgctttgggtatatacccagtaatgggattgctgggtcgaatggtatttctgtctttaggtctttgaagaatcaccacactgccttccacaatggctgaattaacttacactgccaccagcagtatataagtgttcctttttctccacatcctygctagcatctgtttattttttgacttyttagtagtaaccattctgactggtgtcagatggtatctcatggtggttttgatttgcatttctctaacgatcagtgatgttgagcatgttttcatgtttgtttgccgcctgttgtcttcttttgaaaagtgtctgctcatattttttgcccacttttgtatgggttttttttctcttgtaaatttgcttcagtttcttatagatgctggatattagacctttgtcagatgcatagtttgaaaaagttttctcccattctgtaggttgtctttttagtctgttgatagtttattttgcagtgtagaagctctttagtttaattaaattccatttgtcaagttttgcttttgttgcaattgcttttggcatcttcataatgaaattttggcccatgcctatgtcctgaatggtattggttaggtcgtcatccagattttttatagttttggattttacatttaagtctgtaatccatcttgagttgatttttgtatatggtgtaaggaaaaggtttagtttcagtcttctgcatatggctagtcagttatcccagcaccatttattgaatagggaatccttttcacattgcttggtttttgtcaggtttgttgaagatcatgtagttgtaggtgtgtggtcttatatctgggttctctattctgttccattggtctctgtgtctgtttttgtaccagtaccatgctgttttggttactatagccctgtggtatagtttgaagttggatagtgcaatgcctccagctttgttctttttgctggattgtgttggctattcagggtttttagtggttccatataaattttaaaatattcttctctagtttcttgaggaatgtcaatggccttttaatagggatagcattgaacctataaattgctttgggtagtatggcaattttaatgatattgactcgtcttatccatgagcactgtctgctctcctcccccaaacacacacacacaccccgtcagcccatcaccctcatgtgctacctccacatgtccctgaaatcccacaactctgtcttcactcctaccaccttagtcgtgactgtcaacgtctcctggtttcttgtcctgactgtgataatctcctgcctgttgtccctttctccacacttttcccaaataaggtcacattcacagattccagatagatgtatcttttggagaccgccacccaacctgctgcacttggcaactcctttaaaaaagtgtgtgtgtgtgtgtgcatgcgtgtgtgtgtgtgcgtgcrtgcgtgtgtgtgtatgttagggggtcaggaacttgctggaaacaccacatgtcattacgttgagaagagaagtgcagactgcatctaatttttcagaaagatgggaggtaatcagactttactttttgagggtttatatgggatctacctgattccaaggagaattaaaagataaagaagaagcagttctggatcaaccaagaacagacacctgggctaatatgattcacctctgggtgagctatgcatgacttagggcaaggttggagcttttaaactcaaaagaggcagtggtgaaatcccctgtcaccaatcctaatcctttcctaaggttcagaagtgcactctgggttgcttcaactactgacaggggcttcttccatagctgcctcacttatccgcagcaattcccaaaccccactacagtgttctctgcaacacccccaaatgttgtgaggtcttggcgggggttggtcctagacccatgttggtaggggttggtttcagaattgcttaactactaacaatttattgggctcttcacactctggggacagacgaagacagaccagaatccccctcaaaaggtgggggctgtgaggactacatcagtggctcagacatcagtaaccaagtgagtatgtgctggacagcaaggtgagttgaatcccttgtgagaccagcgtaatgaggaaagaggaagagaacataacacaacatcaacagtgattagcctggcgtaaggagaagggaggcaaattattttccctttatgatttgtttgttttttctctctctctctccgggttttctaacaagcatgcattttgtttgcaatcagagcaaagaagcatttgtgtggggttgaggaagtggtgcacggccagaataagcaccggagctcagacatttatctgagtcaaaacgagttcagcattcctttttcatgataaccccaaactcagagattataggcattggacagtcgtattcaggccctcagataaatgtgtttacataatggttcactttttctcattgaaattgtgcctgttggtaaccaagtcacctgtcataactgatgacagacagacatagcaacccgatatgattttcccagggctgccataggaaagcatcacaaaccaggtggctttagacagcagacattcattctctcacagtctcagaggctggaattcagaaatcaaaatcgaggtgtcagcaggtccccaccccctccgaaggctgttggggaaaacctgtgccgtggctttttcacagcttctgctgttatgagcaatccttggcatcctgggcttgtggctgcattgctccagtctcgcttctgtctccacgtggcgttctcgctaggtgtgcgtctcttcagtgtctctcctctgctctttataaggacaccagtcatattggtctagggcccaccctaatgacctcatcttaacttgattatagatgcaaaaaccttattttcraataaggtcacttcacaggtacagaaggtcttcaggtgatcctctactgtcaggacagaaattataggaggaagtaaccagaaccagggaggtagggaaggggctggaggagaggaaatcctaggagagggagaagaaaagagggcatgagggggataaaaggagtactcaaagctgccttaccccagcctcaagttccagcatccacagtgcttaacatctaaaccacatgccagaaagtactattgcctggaggggagtcttagagttgtgagrcaaagttctaagaaaaggaggtggttcaaagcagagacatgctaaaatagaggaagccatctgttcatgtttcccccaaaatctaaccttcccctgctgccctggtactgtaggcaccttgaagctcctccctcttcactctttgctaaagcaatgaacccctctttccctcatgctcgtgcaaattgtgtgcatgtgcaactgagcttgaactttattccagccctggtgagccaggctcaacctctgtcttggccacatattgggtgggatggacctatgtgtacagttggaacactgacactgaaagtcaggggcctcatgcatcagagggacacacaaaagtcgtcacagagaaaaccaggctcattgtagctgttacagtgtctcactattggcagcaccctgtggggggaaatcaacccattcattcatttgctagttcatttgttcagtgtttcttcaacactcattatatgctgggaactgttctatgcagttgggatacgctgatggaccaaacagacaaatctctctcctctgggagctgatgttttacttatagtgggaggcagcttgtatgaaatttgggaagtctttctcaaaggcaagaggagataggagattcatctttaatagcttcctcctccgccgggggagggtgtcctacagccaggacagcctctcctgtggtcaagactggggtatgtgctgcagcagggatttcccataacatgacccggcccctatggtcctggctgaataccctacccctctccagatctgagcggcagtacatacctgagagcctgggaacccatctttgtgtccaggtaatttgcgtctctctgttctgctctgatttggacattgattttgagtgcaagctattggtcatcttcctattgtctttcacatatcagccataaaccacacatttaatgattattggctagattaaatttttttccatgtagttgttaactatttatgtgttatttctgaaacattgttttctaactcatggtccttgctgtggrggcagagacctaagtaaggctgataatgtggtcagttttggagccctgagccagagtctaagctagactcatcattctcagttctgtcattttagactggcaccttttagtagaaacattatgtgagtcacatatgtaatttaaaattttctattagctgcatttaattaaaaaacaggtaaaattattttaataatgtatagttttagtaatatgtaatccaaaattgtatcatttgaccatgtaatttaatataaaaatatgaacaagatattttatactttttatactaagatttgaaatacagcgtgcattttccacttacagcatgtttcagtccagacraatcatacttcaattgctcacttgacaaatttcagtttccttatttgcgtaatgaggggatacaaatacctgttgaatgtcactctgaggataaaatgagcttatgtgtgagaacttctggaacattgtaggggatcaaaaaatgtcgagcagcctgggaaacatatagagaccctttctctacaaaaacttttaaaacattagctgggtgcagtggctcatgcctgtcwtctcaactcctcaggaggctgaggtgggaagatcacttgagcccaggagtttgaggttacaatgagctatgatcatgccactgtactccagcctgggtgagagagtgagactttgactctaaaaaatgaataaataaatagacaaataaatgtcaagccttcctcatcttcatattattcattcatcttgggcatgctagatacagtaaatgtttgcttcaaagtatgaatgaagttttaaaacagatattagcttgtccatttttttttatttcattatttttctctaactgttattttccttttattttctccctaaaaattccagggagattactctcctggaggattgaattttgtctcccccagcaaaatatatatttaagttctaacttaaaagaggagaaggaatataggggtagcctctttttgtgtttgcagggaaacaacgaaacaaggcatgttcaggaaatagggaggaatctccatgaagaacaacatatatatagggttgggggaagagaatggcaggaggctgcttgggtaaaatccaagaaagccaggtcataggaagggctgaggtgcggggttattttgtctgccattgtatcttatccagtgtttgcatttacctggaatctgccaagaggaatttcagcttcattcaaaaatgaatttgaatcattactcaaaaatccaagactycatactgtaaatggaggtgcccagttctctattaggacaaagtttgatagagcttctgtacagggccctttacttggagatgatagggcatcctttctccctctccagcttctatgcaccctgtgagaaactgtaggctttggtgccttttttgtttccatttttactatagcacaaacaccattataatagcatttctaagactctaaatggaagaagaaacacccacagtcccacagcccaacatatccacctgttttaagtccttgtccacatctaggaagaattttgtcctggttgttattatattgtagatacaatctgataacatactttcttccacttagcgttatgtcaaagaccttattttttccacattgcttgtcttaatcattatcttattcagtcactatgtaatattttatcaagttgatggaccctaatttacttacccaatcccctattattggacactgttactctaatacagataacacctttatctctttaaccaggagatcaaaagctgacaaagcagatacagccagagtcagccatgaattatgcatagggccaggttgcaaacaatttcttctatttaacttaggggcagcaaatagaaggccagtcggtccttggaggtagggagaaactgaactgtgaggtgaacgagtggattttcaaagataaatactggggtttgatgatgttgggaagtacagttttttcctgtggcggctgtaacacattatcacaaaccctatggcttcaaacagcagagatttattctcttacaattctggaggtcagaggtctaaaaccaaggtgtttgcgggcttgatttcttctgcaggctcagaaggataatttgttccatgcctttcttctagcttctggtaactgcagtgacccttggcttcccttgtgtcattgacacatcaccccagtctctgcctcagtcttcacatggccttctcctctgtgtgtctttcctcttctccatttataaggacacttgtcattggatttaaggcccaccctactccaggatgatctcatcttgaaatccttaacttaattacatcagcaaagagcctatttccaaataagatcacaattccaggttctgagcagatgtatcttttaggagtcaccattcaacccactacaggaagagaaagcatttagatttatgaacacagttctacattgcaagtttgtgctatatacatgttgcattctaacctctttactcaacaagataacattgtctttttgtatcaatatatagaggtctcttatgttcatttttcttagtcatgtggatyaataatgtttcacccctataaataatgatggagatgaccatcctcatacagcatcactcccatgtacacactttgtccaagatagctaactagttgtgctaacaacttctttcctctacaaacttaaaataagaatttcatatatgtatgcaggtatgtatgctagcatgtattgactatttcctaaatgccaagtcctatgctagcatttttatagattatttcatgtaattatatcaaaaccatctgaggtcattactattattataatactattcttccccactaccatgcaggagaacaatgttttccagaaaggcagagcaactgggctagacrtggtggctcacacctataatcccagcactttgggaggtcaaggcaggactgtcgcttgaggctggaagttcaaaagcagcctgggcagtgtagtgaaaccccgtatctacaaacaaacaaacaaacaaacaaacaaacaaaaaagacaaaaagcccagctgagcttggtggcacatgcctgtagtcttagctgatttggaaggctgaggcaagaggatcacttgagcccaggagctcaaggttacagtgagccataattacaccactgcactccaccctgagcaacagagcaagacccttctctaaaatcagtgactaaatgaataaaagtaagcaacttgcctatggtcccatagcaagaagaggcaaaactgggatttgaacctaatgcccaaccattgccctaggctctactgctgccttttacttacaygttccttcagttctatttctggactctattctgtagtattttccgttgggctgttctgcacgattaccatacagtttcaccttctgtacttttccaatacattaccaatatttgatagatctatctcccgctatctttttcaaacactttctggatattctcacacacttatttttccagataagtgggagagaactgtaagttgcaatagaaatcctactggatttatattctatctgcattgaatttatagattaatttaggaagaattgatacctttacaatattgaatttattctgacttcataaaatctttcatatttctgagtagaatttcatagctttattcacataggtacttcagatttctagtttcacttgctcctagattattttttctgatgacttttatgtataggattcttcttgcattacatttttgaactgatcattacttcctttgcattttctgtttattgtacattgtgaagctactggcttttcatgttaattttataaccagctcccttagtaagatcttctatttattttctaatagtttttcagctgattcaccaaggctgacctgcaaataataactgtttttacctcctttttaaaaacaggcataccttttatttcagtctcttgtttaattgctttggcacttatatctggaatagaggacatccttgttttgttctgaatctaatagaaatgcttggattatttcaacattaaacagaaagcaaaatttggatatgagatacttttctcttttgtcattttaaaaagtagctgtttgtttccattttaccaagccttttatcatagatagagattgaatttcttaaaacccttgtcaatatctactgatattmatccatcaagtattggttgagtagtgctaggcattctgtagacagtaaacaaagtcttggccgggcacagtggctcatacctgtaatcctagcactttgggaagcggaggcgggctgatcacctgaggttaggagtttaagrccagcctggccaacaaggcaaaactccgtctatactaaaaatacaaaaattagccgggcatggtgkctcctcgggaggatgaggcaagagaaccgcttgaacctgggaggcggaggttgcrgtgagccaagattgcgccactgcactccaacctgggtgacagagcaagactctgtctcaaacaaaaaataaagtctctactctcgtggmgagtgatggttctgggctggtaggaaggtgacatatcaaagatagttcaagaaggctagttctctgtggaggtgttctttgagtgaggtttgaatgccttgtagggtgagccatgtgagatcttgggaaaggtataaaccagtaggatcagaaatgatcaggtgattttctgttggatctcttaatgtggtaatgcatgartgcacattttctaatattgaaccatcttgcacagctgaaataaatctcattttatcataagatatggtattttattgagctgctcaagtaacaatatttaatttaaaatttttgcgtccatattcataagtaagattggcctgggggtttttaagcctaccttttgttaagttttgctatgggggtgagagtagctttaaaaaggaattcctaaattgtctttcactttttatgtcctagtaccatttcatggatataggaattacttttttcttaaaggaatgaaaatactctttcctaaaactgaatgtcctggtgctttggggagagtataggagaagcactcaaaccactgggatattcttgatattcttatgtgttttagttcattttaygattattgatttatttagcttttccatgtgttttcagtcaaatttgttcatttgtggtttcttggaaatccatccaggttttcaaataaaatggtggtagggttgggcaaaaatatcgtgccgtatcactctaatgtcatctttgtttctgcttgtttgcccaaataaataattttgtatgtgtttaagtttcaaaaaatattatctataataaaatgtaccatttctaggaggaaaattaaatgaattttgataaatgtatagttgtataaccactaccactattgaaataaaaaatattttcataatcccaaaaagtttccccatgcccctttaaaattaattcttccctgtgctcggccctgaaaaccagtgatctgctttctgtccctatagtttttctgtttctagaatgtgatgtaaatgatatcccacaggatgcagctttttgagtctgatttccttcatgaggcatcttgctgtcaaggtttagccacgctactgcatgtattagtactttacttcttatttgctgagtagtatttgattgtatgaatatatcacagttcatccattcatggatagaaatctgtgttgttcccagttttgtctactataggtaaaactgttatgaatatttgtgtacaagtctttgaatagacatacatttttatttctcttggataaatatccaggatttgattttctggkttatatgtaaagtataagtttataagaagctgcctaactgttttccaaagtggttgtaccattttgcactgtatcgaagagtcccagtcatttcatagccttgtgaggacttctcattgtctccctttcccctgctttggccacatgagtaggtgagtgtgtaagtgattagagctcatagtggttttaatttggatttccataatgactgatgctgttgggaatttttcatgtgctttttgtccttcacatatcttctttgatgacatctttgttcaaactgcttgcctatattttaagttgaactgtctttgtaccactgaacttcaaagttctttgtgtattctggatacaatcatttatcacatttgtgtgttttgtatatatttcctccctgtctgtgacatctctttttatctttttgacagtgccctttgaagagcaggagtttttaatttcaatgaatttcaactaatcaacctttctttgttttgtactttatgtcatatctcaaagttcttggcctaacaaaggtcacaaaatgtttcccctatgttatgttctgagttgattattatatatagtgcaaggtatgggtctaggttgatttcttacatatggatatctgtttaagcactgcttcctaaaagtactattctttctctgatactattttttttttgtagatatttggtagaattccccagtgaaactgttttcatatggatttttcttggtgaaatgcgttacctaattcttgagtgagatttggtagtttgtgtctttcaaataatttgtttatttcatctgtgctatcaaatttattggcattaagtgcttctaatatttatttttccttttaatatctcaaagatctgtagtaatgttcgtccttgtattctcgatgctaacgatttgtgtcttctttcttttctttctcgatcagtctggctagagacttgtcagttttattgatcttttcttttttcttttttttttttttttttttgagacagggtttagctcttgttggctaggctgtagtgcaatggtgcgatctcggctcactacaacctctgcctccctggttcaagtgwttctcctgcctcagcctcctgagtagctgggattacaggcgcacaccaccatgcctggctaatttttgtattttcagtagagacagggtttcaccaagttggccaggctggtctcaaactcttggcctggctaattttcatattttcagtagagatggggtttcaccgtgttggccaggctggtcttaaactcttggcctcaagtgatctgcccgcctcggcctcccaaagtgctgggattacaagcatgagcctccatgcctggcgttcatcttttcagagaatcagcttttgattttaccatttgttttcattagttttctatattcaagttcactcatttctgttcttacctttagtatttccttctttctgcttcctttacatttattatgtacttctttttctagtttcttaatttagaagcttaaattatggatatgagaacttttctgttttctaatataagtattttactgccataaatttacctctaagtactactttagctgtatcccactgccacacatagtttgacatgatgcgttttagttttcaatcaattcaatgtgcattagcttttctagtgatttactctttgatccatggattaagaagtgttttgtataatttacaaatattggggaatttttcagatatctttctgttattaatttttagtttaaatctactatagtcagaaaacacatttcctgttattgaagttcttttaaatttgttaggatttgtttcatagtatggtatatggtctatctcggtgaatttgccaggggcacatgaaaagaatgtatatcttgctgttgttgaatggagtctgaaataacatcacttaggtcaagtggttgaagttttgctcagattttctctaattttaataattttccctctacttgttctatcaattacygggagaggaaagttttcaaatatagttgtggattttcatatttctctttccagttctcagttttgttttatgtatttttgttggtggtgtatttttgtttcgttttatgtaactgctgttaggtgcatttgtacatatttttatatttctatttttattgattttattagctgttggctcatctacattattatctagatggaaatatgtttgatttccaacaaattcaatctgaatatgtcttttaaacctactcctttgttacttttcttttattaattcctccttctgagtacctcagaatttcatggtatgcttttttcaccaatatttttgaattaaatgctttcaataatttattttcacccttcctatatgtaatgaaacaatgaaatatgcagttttggcagtattccctaagtttttgcatgaaacatcatagttaccgttgtttttcaaaatttctggaacaaaccgagattttgacttctttgaatcaaatttttattatatatttaaaattttcctttttttccaagtggtttgggttgtttgtttgttcttactttcatgatttctttttaaatttactgagttgtactcagagactgcagtctgctccatttctagaattaaacaagttttcttttaagccaagtagatagtatgacagcagctatagamattaagtaacaaaaatgtgttgctatattctaacaaaactttacaaagatagagcaaaggttgaatttggcccatggccatgccaaactctttcctgaagggaccaaccaaactctaatttgcatcatcttagttccgttatatttcctttaacattcttctaaaactacatcagaaacaaaatagagacacaatttatttcagactgctccacctttcaaatattttgccttccagcaacctattggcacttttataatgcaagacattgttgatatatcagtttgtataaataatacttttttttttttttgcgacagagtctcgttctgttgcccaggctggagtacagtggcacgatctcggctcactgcaacttccacctcccgggttcaagcaattattctgcctcagcctcctgagtagctgggactacaggcgcgagacaccatgcccggctaattttttgtatttttagtagagacagggtttcactgtattggccaggctggtctcgaactcctgacctcatgatccacccgcctcagcctcccaaagttctgggattacaggcatgagccactgtgcctggctacaaataataccttcaatttgacattattttggattttgttctaactttttttgattgcaatggtataactatttcaggataacaagcccacgtttaatagatctatcagtggtaaggtctgaatgtgttccttcaagtttcatatgttgaaatttcatcatcagtgtgatagtattaggaggtgagacccctaggaggtgattaagtcatgagggcagagccctcccatgtggggttagcgttcttatgagagagatactggggagctatcttccccttcacccatgtgattacccaataagaggcacatcttgcaagygcagagcaacccttatcagacaccaatctgccactgtttatctaggacttatcagatgccagaactgtgagaaaataaatttctgttgtttataaattacccactctcaagtattttkttatagcagcagaaggcagaccgagatagttagataatctttttccttataatttcatttttgtattgcaagatggattggtctgttatcaggtttaattctctgttcacccatgtatagccaatatataattttatcctaataggaaaaaaawaaaacacaggatagrtttcacacaaaaggtccagtttcctatctaaaggttagttgttttgaagtgatcattcttcatatgccttgtagattccctgactgcatgccctaattttgttgccagmagaatacttactttttcttaattttatcaagaaaacatcaccttacatattaatctaatttctttaaataagatakacacagacacacatacacacacacgcacgggttttactgaattaaaattccatatttgtcacttactatatactcatataaaattgaatctcttctggtatttctgttttattctactaaattattatttctggaccaataatatacaattttatttactttattgtaagcttaataaagaaacatcgtggttcctcctacttttacagttttcttggttttcttagacatatactcttccatatacactttaaaatagtttggtagttaattttatgaattaaaattatgaagattctgagtgaaattgtatttcatcaacgtattggttttgggaagactgacatttataatattgagtttgctcattcatacatgtggtattttaaaaaatttgttcaggacatgtttttatatgtttcaataaaatttattagttgtttgcattttaatatctttttaagtttagaaccattcccatcaaatgtattttttccttgtctcatattatttaagtcacattatgattgggagtttcttctgatttttttattattgctcttgattttttatgtacttagatagattctagccaaattatcagctcctggataaattctagacattttttaagtagtcactcaagttttttaagtttagagtcacatcatttgtagataaattctattttgtctcttctttttaaaatatttttcctgagtatctcatttctttactaagtgcattggcttaaccaccaaaacaatgttaaatagaaatggagatggtaagcatacctgtcttgctcatgatattaaaggaaatggtttcagaattttgccccttaataaggggttcactgaagtttttttcaaaagtctttattatatttaagtactgcccatcaatttctgttttggttaaagttttcattaggaatgtctactggattttatcaaatgtatcctggcatatacatcaatgaaaacttcctctgtgacaaattccaggaaatcttaacccaaattgactccagtgaaaagtgaatgcattggcttttataactgaaaatgctcagaatgaggctggcttgagaccagcttgatacaagggttcaaactgtgttatcaggatcaggtaactcttacagactcttcccccgtggcccctcaatcagctgcaacaactgtaaaactcgtaagcatttagcttcaaatctagtggtagaggaagagatagggattcctagggctcccagaaaatattttattgcatctctctgattggtacgcccatagtcttacctctaaatcacaatcattaagaccagggaaatgtgatgtgctgattggctcaaatgtagatcacaagcttcacccctgagctgggtaggatctcatcccctctacatctgcttaaaggagatgagcaggtggattcccagaggaaagctttggtawcagtcaccagaagaagggaaaatagctactgggtggcacaataacagatgtcacttcactgtctattgattcaaccagatggcttttcccattaatttctgtttgtaatacattgtcttaatatatttgttgatgatgagccatgcttagaataatccttgcttagtcatggtttgtactttggatgcactgattgattccatttgtttaacattttccatctgtatttataggtaaaatttatctctagttttatttttgcattatttgtatcctgttttggcatgaaaattatrttggatatataaaatgaatggaaaagctttatttttatatggactgagataatttaaatattatcagagttatctttccttaaaggatatatttttaaaatcatttggaaaaaaaaggatctagacctgaggtggtttttataaaggtatttaaataactttcttaaactgttacgtgattttcttctcctcggttgaatttcattttatttactagaaaaattatcactctcgaaattctcaaatttcttattacagagttatacataatattttaaaatttaatatcttgtctatttatggttataycacctttctcttttttaatatgttatactctcttattttcatttgcttcaccaaatgtaccatgttttttcaaaggacgacctttgattttatttagatacatgttttttctttatgtcattattattgtttacttcgctaaaaagaaaataatgtcattatttttagctcttatattcttctaattttattttgttattttgttcctttttttctaatttgtaatgttgaaatgcttggatcacattactctggatatatccctagctgcctccacgtgttttggcatgaaattgtctctttttcttgattatttttaaaatagtttataatttacatttggatctcctgtttgatctagggtctgtgtatttaagataaagtttttcagtttccaagaagttaaggctttctttttaattgaattatattatgattagaaatgtggcctgcaagttagaatggtgatcattaaaaagtcaggaaacaacaggcgctggagaggatgtggagaaataggaacacttttacactgttggtgggactgtaaactagttcaaccattgtggaagacagtgtggtgattcctcaaggatctagaactagaaataccatttgacccagccatcccattactgggtatatacccaaaggattataaatcatgctgctataaagacacatgcacacatatgtttattgcggcactattcacaatggcaaagacttggaaccaacccagatgtccatcaatgatagactggattaagaaaatgtggcacatatacaccatgaaatattatgtagccataaaaaatgatgagttcctgtcctttgtagggacatggatgaagctggaaaccatcattctcagcaaactgtcrcaaggacaaaaaaccaaacactgcatgttctcactcataggtgggaattgaacaatgagaacaggtggacccaggaaggggaacatcacacaccggggcctgttgtggggtggggaaattggggagggaaagcattaggagatatacataatgtaaatgaccagttaatgggtgcagcacaccaacatggcacatgtatacatatgtaacaaacctgcacgttatgcacatgtaccctagaacttaaagtataataaaaaaaaagaaaaaaaaaagaaatgtggcctgcgaaatcacttgtataacagaatgtatgatgatttctttttagccaaatgaacaatttgtatatataaatttacatatatttatatttatatctaaggacataaagactgtacattcataggacttcaagttcttttagtgcataatggtgctatatgatatgttatatatttgtgtgtgtgtatatatatatatatatatatatatatatatatatataaaattaattggccctctattcacatgcttacttttgtctcatttatctgtcatgacaaaaaattaatctcactactggaaaaaataaaatctcatacttcagttgtttttatccaattttgttttatatctttggcttttgtgttgtttatgactgttacgtttttcaagatgtctattcaattgggattttcaattgatattgggaatttcaattgacattttgaaaattataagacatagcagtcatatttagttccttacatttgaaattttcttgtaatttgtcaaatccatacaatgttagggttaggagaattcttatgtgcaatgtagactagcctcttgattttactaatggggaagctgaggccaagagagcagaatggccttgtctaaagtcatacagcttgaatttgatgaatctggcctctttccaccacatcacattctctaagtgccctgtagtcaaatttttctatttgatgctgtaagaatagatgatctggcacaggcaaaaaatggaaataatgaccagaaaaccataatttttgtttaagaatgatggttgaatgaatgttggagggtgtgtggaggtgagatctttactcagtcattcaagcacccaggctctttttatttggtgtcttcatcatcccctaaggcattcaagtcccctgcagggtctggatggctgaccagggaaaggagagtgatggattccacacaggatctcatgaatcaagcctagaagtggtatagtaacttccacctctttttcattggtgagaactcaaacatatgaccacagctacatgcaaagctttgtccaactgtgtgcccaggagaagaattagctttggtgaatatctagccagtctcaaccatatcttgttcttgggtgaacgggtctgaatttgaatgtggaagaagctcagctgagtccagggcttctgttgatctggagatcagaatgaagttctgagtttgaagaactggagcttttgttggaaatggggtcaaaatcccagagggcctagaggggtgaggaggtagactcccatagaatgaggagaaaagagcccagtatttttctaagtacaaaaggcagcaggataagycatcgagtagtgagaataggtcacctgtaccaaccaggcaggtttggatagggccagattagaaagtcagaaccatcactactgtgagcgaatgtggtggagaagaagagtggaggtgagaaagcagagacccacaggtccaagtccctgcacttttctacaggactttgtctacagatctggtcattgaagagggttttggtccctgttgcccaaggtattatgatgcttgcattttaaagggagcaattgaagactgaaagtcttcaaagcagaaagggattcatttatccaatattgaaatgtaaccatgaggtcagattttaaatcccacatactttaaaaagctcatccacacaacctgtcaccttgtcttcatatgtaggtagtagtagtaactatttgatgcacttgaggaaggtatctgtttatctgtgatatgcttaacagtacaagtccaacatagggttaaaaaaacacttgtgctcacaaagctagtcattgtggtatcatttataattgtgaagaaaaatctattggaatatgaacaaatagagaaatgtttaggtaaatgatggtatttgcataccatggaatattagagtcattaaaaatgttgataaggatgttcaataatcaaggatgcaagtttacgaaataatataagcaatatatgcaaaatgcaaaaatcgtatacctagaatgactgaaactatgtaaaaatgagtaggaaaaagaaaagrggggaggtaacacatgaaagtattaagatttcttgggtaatcagactaagactttttgttttcttttatgtattatctacattctctaccgtaagtattgcattgagaataattaaataatgattgccttcttaaaactgtgccatttttatatatgwcagctgtatattttaacaattcacagaatcagatgttatagtggtccttgtaatacccacatgctcatgcatgaacatatacaagcacacgcatgtgtatacacacacacacacatgcacatacacatgcacacacacacmcccccaaaccacagtccccctgagagagcaaaacacaaagcggcatgagtagcagcagatgttttcacaaatcctgcaagttcctccagattaaatgccttacaatccacaccaagcattattatcgctttttctttgttggaagccagactgttgagtcccctttcctcttgtgtgcccacaccaccgcctccctctctgtcttgtaaatgccgcatattattggatgtgggtcattgggtcagtctcaatgcctttcagaactggctcaatactgaagtctttagctgtcgctgacttttcctttttttttttttttttttttttttaactgcactatcctccctgagcaaacagggcatctttctgagaatgatcatataaatttctttgcatttttcacaaatgtgttggttgcatgctcgcctccagcctcttgggcccaattatctgaaaataggccctcatctgttttagcacaggcttggttggttacaaataacagaaacccactccacctggcttaatcaagaggacaatttgctggaaagatataaggctaacacaaatctcaagtcagggatgttttggggaaccaaaacccacaacagaaactgaggcagtggctggctctgagtctctgtccttctctccccatctcccacacctctgtgctctctctgcaaacttgcttcattcacttttctctattctctgctcccctccttcacctggcagaatgtgccattgtagaccacctaacagttcttagcctgattagaatcagagcgaaccaatttcaaattcccaccactaagggtctgattgtcccaggacaggacagatgtccaccagctgtgaccagtagggtagagagaaagctctggaaaaccaagacaccctgcttccccagcaaagcagcagttacaaaatatttaagataacatcttacaatgtaacactgtggcaatcagtttcaacggcttaggcttgttccagtgatctgtcttctccacttggctggtgatcgggctggcagtgacagagatgatgcctggggatttaacatcctttggttaagcctgtactgggcacatccattgcaacatgccatcctctctgctaaccccatttcctaaaggaggggattggggctcggagagaacaatgtctaagttcacattgggttcatcagctgcagagaaggtgtttgaatccacctccggctctctgttcacttgttcttcagtgctctatggctgcctttcgtgtgtgtgtatgtgtgtgtttcctgttctgcaaagtgctgattaaaaaataatgcttgtattttccttacagacattattactgtaaaataattaggtagaagcagtttgaaggctatggaatatgatataaatattattattatcattattaacactttttccactacctaactccgtaacccctgccaaggtttacgttaaacattgtcttgagttggcagaactttccttgcatattatcttgtcagggaatattcagaagagatggtggagagtgagggaaaagggggataaatcagtaagcttcggagacattaaacctgtaatgcgttaagatgtccatcccgatagagacttttttaaataaaggtttgtttatttatttatttatttatttatttatttattactgttttgacattttttagttactccaaattgaaatctgcgtcaacctatctgcttatcaaaactgtccctgctcctgtgttcctgtcctggttaaaaagtagacccaacacccccaagccagaaacctagggggtcctcggctccaccctcctcccgaaacccacatctggccactaaatcctccttccttccttccttcccagtatagcttcatctgttaaaaacccgatcccttatccctactgtagaattactcccacactgtttcactgtctttctttaactcgtcctcaaggttgctaccaactttccaagatgtgcatttgatcatgtcacactacctgctctaattccctccataactccattctctaaagcctgaggacttagtgtgaccaacaagacctttcctttctcttctttttcctgaacatgcaagcgtgcttggtattccctcaatacaccatgagcttccagttctcacctttgcaaagacaattcctcttgcagggatgttccttcatactctctctgccctgcacagtccaccttatccagcaagatgtggcttcttggtggtgtctttcctgacctactcagagacagatagttctgttgtcccctggactccccagtttcgcatatatctttgtttgyccttgctcacaaatgtagaagtcatttaaataccatctcctctctaggcttgaactcctcaagggaagaaattataacagactcatctccctaggacatagcataggacctagcaaaatatggcttcttaataaaaattatcaaaatagttgaatcaaccaatcaactgtgcttgtctagggtcatgcttgctatgaaaaaaaagtcatatggaagtcccatatgattttttaaatgatgtccctgaattagacactggaatagttttgccttaaaaatcaatgatcagttttactccacattgctgtctctttagtaaaaagaaaaaatgtaatctggcacgggtaatgcccatggctccgagttgggttaaagacaacatgaggcatctgagaaccatgtcaaacactgatgtgggcagtactgatgagtgcatttcaaagtggaccaggctgtgttttcttgtctgcctggaatgaacatctggactcaactgttaacattcagtccaatttgttgctaaggcaaccaagttacaggccaccctcaatttacaaaagatgatattgcaaaagtcatcttataagtcagatatttgaaagacacaatacattcttccgggtgaaaagtgatgtaaatggtggctagaatctagagaattgtatttaacccacattgttgtagtacttgtgcaagatgagtcagtaaatatatctcatgtctccaggtcacagcaatagtctcaaaacaatttggctgctaggaaaaaaggagcctctctccagtattcctcaaaatgagtctgagccctcaggatatcctgtgtttagtgcaaagatttcaaaaccaggttaagcatctggattacctgggagggatttaccaaaagagttattagtccaaccccaggcctatcccattgaaatcagaatcctctgtgggctctaggagtaagtgtatttttaaagctccccatcccaggtgattctggtgctatttctgaactgttatttagacttcttggtttgcactgccattttctcctcccctgccttggcactaagggtggcttctcatattgctgcccaagcttaaagctatggttacataggtgataaactctgagggtgccatagttcctaccgccgaaggatgacctttgtgatagataatctgttacaatgcataaagtgttatagtaatggttctcagtgaatcatacatccctatgcccatgcccatgcccctttgcaatgtgacattgccactcttctcagcaagaggcggagcctaagtctccagccccttaaatccacactgactgtgaatctttttgactaatagaaagtggtagaagtgatgatgtgcaagtctagaaatgaggttttcaaaygccttgactgactaggaatgtttgctcttgccctcccagtgtctggggccacctttctgtgaagaaactcagtctggtctcctggaaaatgagaaattaaatgaagagaatcagtgtcctaaccaacagtcaggaccaactgccagttgtatgagtgaggccatcttggaacatgcagcctcagctgagcttagatgactatggctacttgaatgacatcgagcagttctagcagaacagctcaggttgctaactcagaaaactataagaaataatcaattattgttgttttaagccactaaatgttggagtaccaatagatacctgattcagccctatgtttttttaaattaaaaaatacataaatttaaaatggaaaattattacacatagagtctctgtgaggaggtaattattgttattaaagatgacttccttccagaattttaatattcagatcaagacatatacaaagagattttgttcttgtcgatgcgccatttgaattctgatatacatgctattttgtagcctgcatatttcatgaaataatacactcatcattttcacatctcaaataatattttgcatcatttaatgacgatatagtactccatctttgagatgtacatactttatttaacctgctcctgtttttagataatttttggctgttatgctcaatgctgtaatgaaaatccttgcacataaatsttcccacatgtaaatgattattttgttaatacattatggctactgctgcttgatatttttgccaatagaatagaaaaaaacccataccattttaatttatttcattttattaaccattagtttaatcagatttgtacacatctattggttattccttttaatctattgttttattaaggaatgatcctctcatgtatgtatttttttttacaattttttttgtggaacagacacacataccttgaggtagtataccacagacaatagatcatcaaaccagatactacctctgctactttctagttatttaatacaaagtatgttaactacatttttcaagcctcagtttcctcaaatttacagtggagatactaggtgcctatttctttgaatagttatgattttgatgacataagaaattgcccaagaaaatgactggtacaaagtaagtgtctactgttagtggaaattaaaattagtccagycactgtggagagcagtttggagatttctcaamgaaccaagagttgaactaccatttgacccagcaatcccattactgggtatatactcaaaggaaaataaatcattctgccaaaaagacacctgtgatgtatgttcatcacagcactagtcacaatagcaaagacctggaatcaacccaggtgctcattaatggaggatcaaataaagcaatgtgttacatatacaccctggaatattatgcagacccgaaaaagaaatgaaatcatgtgctttgtcacaacatggatgcaactgaaagccgttaacttaaactaacacagaaacagaaaatgttctcacttataaatgggagctaaacattgagtacacatggacataaagatgggaacaaagacactgggaatttctagaggggaagggagaatggagggtggtagcaagggctgaaaaactacctattgggtactacactcactacctgggtgacagattcattggtatccaaccctcagcatcacgcagtatacctttgtaacaaactggcacatgtacccctgaytccaaaataaaagttgacaaaaaaattacatatccagtaactattggctttcctagagatttgtttcacaaaaacaaaaaattgtttataacctgtgtgcattttaattaacgcaatattttcatttattcaccaaacacatgaatacgcatcgtaggtctagcatttttccaggcactgaaatgacagtgggaaaactgacaccatctcactggagcttatgttctagttgagtgcgacagatagtaaatgaatatatagtaaatcagacggcaataatgctgtcaggkaaaaaaaagcaggataatggggacagggtgtactggccacctgtgtgggagggacattttattttcaatgaaagacctggctttaaaggtggcatttgaacagagacctgagggaaggcaaatttctgtctggaggaaggctgttccaggcagtgagaacagaaagtgcaaagtgaccgggctcagtggctcacgcctatagtcccagcactttggggggccaaggtgggcagataaccatgaggtcaggagttccagcctggccaacatggtgaaaccccgtctctactaaaaatgcaaaaattagctgagcatggtgttgggtgcctgtaatcccagctactcgggaggctgaggcaggagaatcacttgaacccgggaggcagaggttgcagtgagctgggatcacaccactgcactatagcctaagcaacagagcaagactgcgtctcaaacaaaaaagaaagtgcaaagggcctcacgggagagactggttagcgtgttccaagccagtgtggttggaatagagtgagtaagggaaagagtggaagaaactaatttggctttttgtttaaatggatcatgttgtctgctctgctgacaacaagctaaaggaaggcaaggatagaagtagagaggctgctgagcaggcattttaataatgcaggtgagagatggtggaggctcagaccaaagtaggagggagtgatgagaagtagtagaattctagatgtagttttaagataaagccaatggaatttggtagcaaagtaggtttgggatgtgaaagaaagagaggaatcaaaaatgaccccaggtattttagactgagcaaatggaaggatggagttgctattaactgagataggaaagacactggaatgagcaggtttcagagaaagattgggatttaggtttggcatctgttaagtttcagatggattcctgttggatattttgggtgagatatcaagtagacagatatgccagtctggagttcaggggagaagtagaggacggagatgttagcaggggagtcagcctatgcacgagctttgcagacgtaaagctggaggaggtgaaagggtctcagtgtaggtagaatagggagattctagtgctaagctttgggacccttggatttttaaggtggaaaatttgaggcagaatcatcaaatgagacagaagtatcagccaatgaagtaagaagaaaaatgagggcagggtccaggaagccaagtaataaaaaaagaacaaaaggagaaggtgatccactgtgtcaaatgctgttggtagttcaggtaaaataaggactgagaattgaccattagatgcagcaacagagaggtcattggtgagttaacattagcaatttataaagaattgtgggtactgaaatctgattacacaggcccaagggagagcagcaggagaggaattgtatagaaagatacaaagaaggcagagacaggagacagtacctgaagatgttctctgatcaaaaggtggggagttgttggtattttataaaatttgagaaatattagaactaaagggaaatgatccaatggaaagggaaaaagccccaaagaggatggacactgctcttgggatgacgtttggtaaatgagagcacagggggtctcactcacacatagaagagttggtcttagatgcggcatargtccttctgctgtagaaaaaggagggaagacagaatgtatggggatgggtcagttaagctgacatgtgccgtgttctcaccatggaacttccattttctctatgaaacaggaagcagggttatcagctaagagtgaggagagcgtggaggtgttggaggtttgaagagactccataaagtaggaaacagtgtgggagtctgaaaatgagactgaaatggggaaatgtaaaggatcaccaggaaataccaagggagcacttgaggttagcagacaggagttacracgagaccagttagcatgggtcactgctttcctcacacttgtccagcagactcggagtaggcagaaaatatgggcttcagcagagttaatactgtgacaaatgacttaaatgagcaagaggggcaagaacattttgaacatttctcaatatcaatgtatattacatttatatcaccttcattttaatggtttcagaggattctgtaaaatgggctcaatctatttagccagctccctcatcttgggtatttagttttttctagttgttcattattgcactgaacaaawaatgattcaatgaattcccctttatgtcactctttgctcatagttttgattcttctgaaagtagtattgctaaacaaatagtaaaataatcagctctaagtaacaaagccaactcaaaatgacttataccatatggaaaatgtgtcacatcatataacaaggtatccaatcatatcctaagctgcggaattgcttaattcattattttaaaaacatcatgattgactcaggtttttctgctctgtcaaccccagtgtgtgggctttgtctttaggctggccgtcctcttggtcagaagatagctgccatgccctcagacatttcctgtggacctggggacatcccttcctaagaatctcttaagcaaatattcccagatgcacaatgtaaatttctgctcacrtttcattggcaagaatgaggtcccatgcccataggttaaccgatcactggtgaagaaaatagttatcatgattgactgagattcttcaatatttattctcgaggtggaataaaccttgagatgggataaagggggatctcctttgatgaatgcatagccacattaaagagtaaataccacgcaaatcagtgtttgccagaagtgaagaagagggccggggagagagatggatattacatagacaagtgtgtcttctgctaaggaagatacacattttyaccatttttgaaggcatatccatcaagtagtaaaattaaaaaaaaaaaaaaaagacctgtcacatcttcatagactttgtgcatttttaccttcctccttatttgttttggacaatcctgccttactgggcatcttgcaggttgtattcgggaatataggaagccgtagtcttccctgactcttccatgcaattctgttgatatctaccctctttactcacccaacgcttgcgaatacagtcagttctgatgtcatgtgacctatacattcctaaatatcgccacgatatgtaaaattgcacactaaaaattacagggcttataggaagaatgaagttaggatacaatatttaaaaactttatcagtgacccaaacaataggaacctaggaaaaatcttagctcagttttagacatgttaaatagctaaggaatacataaatactacaataaatatggtactttactttgaragagatgcagtctgtgtgtaagtgggcatcagattccaacttgtgtgttattgagaaatggtgtatggaagatcgtctgaaatgggagggaaagttggaaccccagatgtggctgacacacactgtaatctgagtggggaagcagatgtttgaggtgtatgagtgcatacattttgtgtattccttcgtggttggttcatctgagtgcagttttctccagtcacctgcttttctctcctgtgaaatgaggcataatcaaacatttgtgttatgttcaaattattccctaatatacatgcatattttaaaaagggttacaatgaagatggatttactgacttcacaatcgatggggttcagaacatgctacccccaaatatggcaccttggcatttgggtagacagcagaagtaggaggatatctcaccttcccccagccttctcccctgaagaaagtcctaagacccttattccagaggtgcccttcctattcccagaggagaggaacgtccttatctctgaagacacagggggatggagaagaatcgttacaaaatagatcttgctaaattcccttcagtttatcaccattagacaatccccactttttccaattatattttggcacaactgtccactcttcatcaaatgtaagcattaaaaaaaatcagattttcctctttctttgggccttcttttctgaagacttccttgttgtgtaaaacatgtattaaatagatgcgtatgcttttctcttgttaatctgtcttttgttttaggtgcctcagccatgaacctagcaaccgatgaggaaagaaatcttttcttccctgcaccacccatgcccttttctgtccttttccatgtgaattccaccttctgaaagctgttcaaagtttcttgcatatggatgatactccctctgagttttcagggcccgggcaggcttttccaatccttatactgtgaagccataaatctctgaagataggggtagaactaagcagctgtgattatgttgcaatcttttctaggaaccaaagctagttctgcctgactctgtagctcctcacttcttcctatgccaagccaagtgaactgtaggtcattgcaaaatggcagttatttttttaaaaagaaagataaatatgtgggttaaggtaagaaaaatgaaatggatttttttttttgagaaataccaaaagaaagattagtaaagcaaacgcccttcagtagaggaaaatgtcagcctctattttcttatcaaaacctattattttacttttttcccatttttcctgatgtatgctaatagccctcttacctttcaggttcttagttgacttacagaatagagggaggaaacaaagacatttcatgcaaggtctgagaaaaggtagggcaggaaatgttcatatgtgttagaactgagtgagtttaagtaacattttttcctggaattagctgaaatagaagcaagacatgagggaaaacacaggcttgtaggagacaaattaactgtgaggtagggagttggcatcaggtataacagtgggatagaacaagggagggcttggggcaggtgggtgcagcagtacagtgtggtggcaaggacagtgcacccctctctggccattgcccatcatggcagggaggaaaatagagcccgtggcaatgttgttgactcctgtagggcatccgacattagaagctcttctgttggggagaacctagacagtatcatcaatgattaacttgcttatgctcggcatctgaaagaaaaggaaatccaatagcatttagttataggacagagcatttacatctgttttcagtatgtaggacttgctggatgacaccaggggcaagacataatcaggtttcttctattttgatgaatttaataaaacatcttgtctttcaccattgtggctagtggctcatccaagctctatcattgttgcattcccttcctcccgctctttaggctttaaaaacaaacgaacaaacaaaaaactgtggcgtaccctatcactacaggaagtccaagaagaatcgctggtctttggtccctccaggttgcctctgtgatgggagtcgtccaggcctgaggtgccctggaacctttgctggtagtgtccgtgccccacacactaagtttggccgccaggacattggctatggctccagttcctgaggctgccatgttatgtgttcagattgtgacatcaggggaccatgtctgggttcttgcaactcaggtaatcctcctccagcttttcagacttctacacttgtgttcagaatcaagccatgcccctcttctcttgctgctgaagcacaaaagtctcctcctcctttcctgtgaggtgtagtygagggatctgaaaagtgaactcttaattcctacctggacaagcaagcccagaactcacaatgaaaaggacatttgctttttaattctcattttaaagagttcctagccacgctcctccctctttcctctaaaaaattctcaaatacctcttaattcattaataactcaccccactacatattactcaatttgtgtttaattgtggcccttaaaagtagatattattctgattttaaaagcaatgaaaagacctaagtaacttggtcagggtcagttataacatcggagtaaacctaaataaaataaggttgcaaactcaattctgactccataacctaatttcttagtcctacctgccagcctctcggtcggtactcaagaaagttcctgttctttggttaaatttaaatttcctaccacttaacagatatttattatcttaaacagtttgtgagagtcaggaatcttagagtgacttagcttatggttctggcccagggtctctcttaaagttgcagttgagatgtcagctggggctacagtcatctgaaggttggactgggactgggggatccacttccaatatggtgtactcacacagctattgtcagaggcctcagtatgttatgacatggcacatggctttcactagagtaagtgagccaagagaaaagggaaagaaattataatacatttcatgaactagccttggaagtagcagagtactacatctggatgtgaataacaggaggtagggatggttggggaccatcttgggagctgactaccactgacatttacgttggttaatggaagctggcatttactttggttaatgttagtactgtgtgggtctgcagcaccatggtgacaaatgattcctggtttatactttccttaatcaattaatcaatcaatttatatttttcatcaattttttcaactgaagtagagatgtaatttcataagcataatgtattgactgattgcattctctcttttactacgtgttgattcattcacaagtctttactgattacatgcccagaactttttaattttttgtagtgacagggtttcacctaatatgtgccaagtattatactagctgctgaggatacaattgggagaaaattgaatgctgttcctcaccctcctagagtccgttgcatagggaagaaagctattagatggctgtataagtccatactgtgctgatataaccgaataccacagactgactaatttataatgaagagaaatttattaggtcacagtttagcgccttcttgctgtgtcatcttatggtagaagggcaaaggaagagagagagagacagagagaagagttaaactggcagcctcaaggctttctttctttttttttttttttttgacagggttttgctctgtttcccaggctggaatgcagtggtgtaatcatggctcacttcagcctcagcatcctgggctcaagcaatcctcctgccttaacctctggagtagctgggactacaagcatgtaccaccatgcccagctgtatttcttaatttttttgtggtgacagggtctcattgtgttgcccaggctggtctcaaactcctagactcaagcaagaagtctctcgccttgtcctcccaaagttctgggattagaggcctgagacaccatgccttgcctcaagtgcttttataatcaacattaatccattcaaaaggatagacacctcatgacctaaacacctcccattaggccccacctcccaacactgctgcaagggtaataagtttccaatatatggttttgggggaacacattcaaaccatagcagtaatcatacaaataacatgtctctcaacatgtgatgtgtgctgtgaaagaagaatttagtttgctgtgaaaacataaatcgtggaggacctaatttaccttgagaatcagataagaccctatakcacgtttctttttttttttatactttaagttctaggatacatgtgcacaacgtgcaggttagttacatatgtatacacgtgccatgttggtgtgctgcacccattaactcgtcatttacattagatatatctcctaatgctatccctcccccctcccctcaccccacgacaggccccagtgtgtgatgttccccttcctgtgtccgagtgttctcattgttcaattcccacctatgagtgagaacatgcagtgtttggttttttgtccttgcgatagtttgctgagaatgatggtttccagcttcatccatgtctctacaaaggacatgaactcatcatttcttatggctgcatagtattccacggtgtattatgtsccacattttcttaatccagtctatcattgatggacatttgggttggttccaagtctttgccatagtgaatagtgctgcagtaaacatatgtgtgcatgcgtctttatagcagcatgatttataatcctttgggtatatacccagtaatgggatggctgggtcaaatggtatttctagttctagatccttgaggagtcgccacactgtcttccacaatggttgaactagtttacagtcccaccaacgtgtaaaagtgttcctatttctccacatcctctccagcacctgttgttgcctgactttttaataatcgccattctaactggtgtgagatggtatctcattgtggttttgatttgcatttctctgatggccagtgatgatgagcattttttcatgtgcctgttggctgcataaatgtcttcttttgagaagtgtctgttcatatcccttgctcactttttgatggggttgtttgtttttttcttgtaaatttgtttaagtgctttgtagattctggatattagcgctttgtcagatgagtaggttgcaaaaattttctcccattctgtaggttgcctgttcactctgatgatagtttcttttgctgtgcagaagctctttagtttaattagatcccatttgtcaattttggtttttgttgtcattgcttttggtgtttcagacatgaagtccttgcccatgcctatgwcctgaatggtattgctatatcacgtttcttaaccttagcactattaatgttttggactgggtaagtctttattttggggactgtcctatgcactgaagaatgttagcatccctgggccaggcgtggtgactcacgcctgtaatcccagcactttgggaggccaaggtgggggatcacgaggtcaggagttcgagacgagcctggccaacatggtgaaaccctgtctctgctaaaaatacaaaaaatagctggacttagtggtgggcgcctgcaatcccagccactcaggaggctgaggcaggagaataatttgaacccaggaggtaggggtttcagtgagccragattgcgccattgcactgcagtctgggcgacagggcgagacttcatctcaaaaaaaaaaaaaaaaagaatattagcatccctgaactctaacttttagaggtcctttacccacacatacacaagttgtgacaaccaaaattgtctgtaggtatattcaaataagtgttccttggaaggcaaaatctcccccaattaagaagctaaaatttgccctataggaagtttccagattaaaaagtgttggagtcgggagagcatttcaggagaaggaaacaatctgttagtgagatttttgtggatacggattttcaaataataacacaaaacaaatgacgacgacaacaacaacaaaaagaccatggttacccacctctacttctgaagttaaaattcaaatcactgttgcctgtatgacttgttgctgcccctttaaacaaaaattcacaccctgtagccagcctgcttgtgctgaataaggtgtcttcatataattgtcaagaaaaaaagcaggtctggcctaaagctgtcttccaaaacatattttaacttattgaatctctgggctggttaaagttgtttggccttcagcctcctggtttatatcactgmcccaagcagcgtattaccactcaggaatacatggcctcatttttattggaatgatatttataggtaccgcttatcctctgtatgaatatgtttaatatgaagagagtatataaccaggcttggtataaagtcagatcatttccactaagacttgccttatttcaatttcgaacagataaaaattaatttgtgtgcttagaatcctgaaatctggagcaaaaaaaggaacttagaggatctagtgggaaaatcataggtttcagaatgcagacaattatgggtcacatttggtctcagctatatgatcttgtgatcttggacacataaaacagcttcaattttctcatatgtaatgaagataataattctttttttttgtttgtttgtttgagacggagtctcactctgtcgcccaggctggaatgcagtggcacaatctcggctcactgcaacttccgcctcctgggttcaagcaattctttgcctcagcctcccaaatagctgggattacaggcgtccaccaccacgcccagataatttttgtatttttagtagagacagggtttcaccatcttggccaggctggtcttgaactcacgacctcgtgatccacctgcctcagcctcccaagaagataataattcttactttgcaggatcgttatgaaggtatgaaagatagaagcaatgtcaagcataccatagatgtccaaaaatgaaaggtccctcttccctttggtttgtccagttccactcctctcaggtatccccagtggctgttcccctaaaaatttgagagccagcctgtcctaagaccatccctcatcctgtacctccagaggatcttcaaattctctcaattttacctccatttttagttaggtccccgtattttcttttttaaactcctgggatagtttttcaattataccactaaagccaaagacaaaatctaaccctgtcactctctgtataataccttttattagtcccacgggtttctaaaattcaggctctaaaatgggattttggctcacctctccagccccatttctcttagaccttaccttttacatcctgtgctctcacagtgccaaacttctgatgatgtcctgcatgcttttcatataatcatgccttttcaacatcgtgtgtgtgagtaaaataacagtktttttgtttattcaaagctttatatatgtgtatgcatggcatagagtcacatgttttagtttgtttattttaggacaaaggtatctatttattttatttatattgtgataagaaaacttagcatgagatctctactcttagcaaacttttaaccttctgatatggtcttgctatgtcccatctaaatctcaccttgaattgtaataatccccacatgtccatggaggggggcaggtggggataattgaatcgtgggggtggtttctcccatactgttctcatggtagtgaattagtagagctgatggttttataaatgggagttccccctgcacaagctctcttgcctgctgccatgtaagacttgactttgctcctccttgccttccaccatgattgtgaggcctcctcagccatgtggaactgtgagtccattaaacctctttttctttataaataaccaagtctcaggtatgtctttattagcatgagaacagactaatacactgtgaaacacagtactatgaaatgtaagtacagccttgtatatcagatctccagaatgtatttacctcatataactgaaactttatagctgttgaacagcaaatcatgtcctccctctacccagcacctagcaaccaccattctatccctgtgcctatgatttggctagtttagatacttcatataagtggaatcatgcagtatttgtccttctatgacttgcttatttcacttagcataatgccctccaggttcatctatgttgtcacatacggcaagacttccttttttattttgaggctgagtaatatggattaaagatttaatgtactaatattaattaaatatctctcacatctactgctgtaagacacctagaagaaatagggggaaagctccatgacattggtctgggcgatgatttttggatataacrttaaaagcataaacaacaaaagtaaaaataggccattggaatcacatcaaactacaaggttttgcacagcaaaggcaacaagcagcataatgaagagacagcctacagaatggaagaaaatatttgcataccatatacctgataaatgtaacatccaaattatataaggaactcatataagtcaataccaagaaaacaaataacctgattggaaagggggcaaagaacttgaatcaacatttctccaaagacattcaaatggacaacaagtacatgaaaagattctaaacatcactaatcatcatggaagtgcaaatcaaaaccacagtgagatatcacacactggctaggatagctattattttaaaaacaaraagataagtgttggtaaggatgtggaaaacttgcacactgttggtggagatgtaaaatggagctatraaaaaatagtatggagttctctcaaaagattaaaaatagaattaccatgtgacccagcaatctcacttctggatatatacccaaaaraattgaagttagaatctcaaagagatatctgcattcccatattcattgcaacatgatttacaatagccaagacatcgaagccacctaaatgcccactggtgaatgaatcgataaagaaaatggggtctattcttcaagccattttggatgttgtttccttagatggaaacaccctcgcacccttgtccacccatcagaatcctaccgattcatcctcaaggatcagccaccttctgacctcacatttgcctccttccccactgccgtcacttctttgctttgacacaaccttgtacacatttctacactggtatgtgtgacacagtggttatttaagaatttgttaatgggtctgtgttcttcacagaagagtgaattactataaagcaagagccacattgtattaatctttgtgttcccagctagtatcactgaccctgtactagtgcatggtccatatgcatttgatggatgagtccacatttaacgtgaagccccacagtgacaggaactcacaacattgcaaggtattcacctgatttggaccatgtgccctgtgtcaaacttatattgataaatcttccatccatattgtcgtctctacgtccctaccccatctacccacatatcctacttagaaagaatacatataatccgtcgtaaaatcagctgctgtttgattactagaatgcaaccaacatcacctagcaataactttttctcttytggagaatcctttcaattattctttgtggggcataaagtctgcgtcactcaccactttatctccctgatggagatgaggtgtgggtctgtagctaaactcaagatgtcacatctagaactaaattcaagatgctaaatgggctctgacagcagggtaagccttggccctacayatgatatagtggtattttcccccattcttaggggacaaaatataatatgcttgcaktattcctgtattttcctattatagctgyaatggtaaccaactctaatgggttcttaccacttatcaaacactgcagaatcagtggcctgagactagtcttctctctctactctctgaattcaactagttggccattctcctgtcctcccatttatactagaagccctcttggtgagactgcttcaaggttatcagccaggttggtccattcaaatagttgtttttttttttgtctatccctscttagcagtgtccttctgccagcatggcaagaataaaaacccatgagcccatggtactcacagtcacataagccatggatcacagcatccagtccaggcaccagggaagccagaatgtctaccctcaaaaatgtctgctgaattcaccattcacgggtcactgagatctgaggacctgtattccataactccaccagtgtaactataatttcagaagtcctgtgctctgcccgaagtctcagtgttttaaaccactcaaatttatttaatgaaacttataattgctcacatgtattgagtgcactttagataccaggaagtcttcaggcagattcatttttaaattgaggaaactgaggtttagagagattaactaacttggcccagaatattacacttattatttagcaggagaggtaggatgtaaacccagatgtaattgcagagctcagacacctaaattccatactgcactgccttctgaatactttattctcatgctatagtgatagttggagatcctatcagtagtaggcagctggaagccaagaccaaggaaaaccttcaggagcaatagtgaccacctatgggtggcaccatttatgcagggcatggatagggacaaagacaaatggaaaagtggttaccgtcctatagggttctccatgccatgacagcatgctctggttcctcttacaccccccaccataccccgattctccctgttccccaccttactctctgtgtcaattgctattatgtgcagccattatttattctgctttgtcccccttctccccctgttttcctgcacggacctagcacccatctccatgacactctccacctggcccaggcagtctgtgtttatgaaattcatcccttatgtctcagttccaggackgctctgtcttgtccatgaacacctatgagagatattgccaagtgatgtacagggatctggaagcagtctgccaatggtgtacccaggcagaaggcagtgtggatttctcctgggatcagaaacatgtggatgctttagaactggctctagtccagggaaagagaagagccatttccctcagtaggaaaatatccccgaactccatcctctcagcaaaggctagctcaggcccagagtccatcaaaacttcaattttatcaaagtctcctctatagatgccattgtatgtgctattaaacagaacaatgcagctcaccagtaaaatcatttgcaataacagcccattaaaagctttccttaatatggaactttctaattaatgtaaatggggtgcaaagcttggaaagccaagttgattctaatgttcagaaagtaggtaaaataggaaagggtcttatttttcattagcaatgtattatggaatctaatgaaatctttatggcttggatatattacccaaaaaagtcacaattgctttgtttcctgcctcatttctctgccacctttctctataaatatcgctatgttacacattagatttgagaaaatagaattttcttttatacaaaaaaaggcatggagtttgtgtctgaatcgtatcaggttttctgtgttgaaggtagaagggaacacagtaaagatgaacattatttcccagatgtctaagttggaaacagacccaaagagaggtgaagactaatcgggtcatttacatatttctccctccttctcttttcttctcccttcccttcttcccccattttccctccctccttttcttccactcctccttcccttcctttcactcaccctaaaacatatattgagcactgtatctgtcaggttaggctagattacasctcaataacaaattcccaaatctcaaaagttaaacatcaaacatcaaaagcttatctttcacccacactatatgttaaaacatcaaatgtttacttctcacctgtatgacacgtccatcatgggtcaacagggagcagtcacacagggacccgggctgayggagctgccaccaagctgaacgttgctagtcatcatgtcagagggaaaatagaaagcggcaaattgggctttggctcttaaagcacttacctggataaaaacaggtcacttctgctcacgttttgttgtccaatacaagtcatctggccatacctaacttcaaagggctcaaaagtatcaccctacaatgaatctaaaaggcccccaataaggtttgaatctgtgtccccacccaaatctcctgttgaaatgtaatccccaatgctggaggtagggaggtagggcctggtggaaggtgattggatcatgggggcagtttctcatcgtttaacaccacatccccttggtgctgttgtcccgatagtgagttctcgtgagatctggttgtttaaaagtgtgtagcacctccctcccttactcccactcccaccatgtgaaatgtgcctgctcctcctttgccatccaccatgattgtaagtttcctgaggcctccccagaagccgagcagatggcaacatcatgcttcctgtacagcctgcagaactgtgaacaagtaaacctctttctttatcaattacccagttttaggtatttctttatagcagtgcaaaaacggactaacacactaacatacctccatgagccaattaaggtaataatctatgatatcaaaatgaattagaaacacaccctactgtcggggagctcagagtccaatgggagaacaaraacacgctcaagacagcatgataagtgcaatgcaaagctacgctaagagccgtaggaccaagcaggctcattttctttcccctttggcagccctttcctggggcttctctgtttcttgctgtgtgaccatcttccccattccgattggggcccaatgtctgggagggagacacattctctgttccagttctcagacccaaaggcttatgagaaggggaactatctgaaaccaaccaggccaggcaggcctggggctaagggaagtgaggagtgcatggagggaaggcccaggttgttccacatctgaggcaggacagtgagtgtgggctaaacctgatctctgcatagcstaccagtcagtgcctaatgcatctcggtgccagaaagctggccattttaggagacagtgctccagcacatggagaaggtggcagcgtgatttagatcagggatccagtctccacagggagctagagagagtgggataaggaaactgaggcaggatgcagcagagggcaacactgaagttcaaggtttttaaaaatcagcctgcagtagcattctgaccccaaagctatctactgaaatagggcttagkttcttagtggactaccagcctcacacgtttactctataggccttgggcaggattgactatcgaactcatgggagccagagattaaagctttgggagtgaaggagtccttgatttttgtgggcttgctatggatggccagacttcatatccttcacgtccctctgcaacaggccttttgaaagcccatgagaaaatgctctgactgcctttgtaatcactttccaatcagcttcacagaattgtaaaattgattatcctgctgatctcacacaagctttggaggaaagcatgggggcactttaattctttgttgagttctgcacactgattcaaggagactttagcttttccattcatgcccaagaagaaggaagttcaaattaccttgaaattacaatttaggggcatcaagcctcggccagtctgtttcattttcccaatcacccggccagggccaaggccgagaaaggaggtacctggcatataactcctttgtaggaatgtggagaaggggtggagctggagaccgagctcctgctgccctccacaggctcaggtgcctctaggaaaagtaagagtgagaggctctgggaagcatgcactggatgcctcaaatttgagtctggttgttctagggtctccccatgagatgatgattagggtgtcatagttataccaaggcactcccactcatttttctttgttttcctcttctgttrtgattaaacagttgggatttctctattgctgcagggaaatgaatagaactttgtcatgcatttcaccagcctagagattcagggaaatcttcctgcaataaaggggcttgacccgggacttgagtaatgaccaggtgttggccagttgtagaaaattggaagttcatcacagacagaggtgacagcatatgccaaggcacagaggcactttgtggagcaagactgagggagggagtggtaggcataagactggggaggctgggcacgccagagttgagcacctgaaggcagaagcaaaggcttacatgttcaaaacgaaatgcagcattccaagtgcaaaaatggagctgtgggggcacggtagaagcaccaagtggggaatggttgccttggagacttgctggagcaagttgagtcagtgtcacacctgtcaaattacacatggaattcacaaggaatttcttttttctctaaatgaggctgataagtattgaatgcttactacatgtcagaactattttaacagctttgcatgaattatttaatcatttcaaaatcctgtgaaggggataccattagtatctgcgctctacagatgaggaaactgagcctcaggaagttaaataatttgcaggtcataaaactggtaactggaggaatcaatattcaaatataggcagtctgaacctagagcccgtatcttaaccgtggcacaatgctgcctccagtgatcttaagaaaatagagcttgttcattcctttgttcattcgacagatactcactgagatatgcctcaggttttgtgccaagttttgggattacagggttgtgcaagatggcaacttagattcccacattggagaactcggtctagtggggagacagaaaatgagtgaacaattaaccaaaaaagatactatcaggttgcaaaggaagagtaaaatagggcatcaggagagaaaacacaggaactggaaagcatctttggtgccacacagcccaaatcctgacttttcgagatgaaagaattgaagccaagaagagaggtgtgatctcagaatcatacagtcagtaggtatctgagaacagaaaaagaatcaaagactcctaatatatttaagagatgtttatctggtgcctcccgctgtcctaggcaccaggaatgcaatgctgagcaagaccatcacggtccctctccttggggatcttacattctttcccctactctgtgggggttgctgtgctgttttcaatacacacttcatttcatcaaatgtcggtttggctccagaatctgaattctcaaccagtgagatgtaccgcatctgttaagccttctattctgccccaacctctgcctctgaaataatcagtcctcctctgggtaggacccctagtactatttctgcactattagttataatgatgctatttttactactgctactctattggtgctsctgctgtattcagaatactatcatccaggttcttcctatagtgttatttttgtgaatcacagcactaatgctaccacttcactctggcttcatctttctcttccttcacttttcttttctgtcctccaaagccatrtcttccacaggcaatttacagaggtggcgaactgaggctcagcgctaggaaatgyctcctccacagtcacaaggctcacaaccggaagcacaggattttaggttgaggtcgtttgttaggttgaggttttaggttgaggtcagtggtactttgaaattgagacaaagagcttgcagctgaaagtctattggtgtttagaacctcgttacaccatgtaggatccaccaattaacaacagcatcagaatctcctgggaatgtgtttgaaatgcagaatctcaggccccagcccaatctactgaatcagagttcagtttggtcgtaagttaaagcttgcaaaacactggtttatgcatgcatacatttgtgttgggggagtgcaatcaggggcaatgaccggtgtttgcccagagggaccaccacgttttgggcatctttaccttctaggaataaaccacttgttggaggagcattagacttgaggatttctggagttagcatgtaccctgagctcaggggtccacttgggctcacaggcagatctcccttgcttttctctcttctgtgggcaactccacccagtgcctgacttctattgcccctgaatgtttctgcaaaggttcttcaagcacaggtgaaatgcatcgctttgctgagaaggaaacagagtggtgaaaatggcatttatccaagttatcaaaggacggaggtaattgcaatatgaaccaaaagacacgcatctgacagccttgctccctctctttctatgtagcttctctttacacgatccaaactatcacccgtgtgtgctttctttaaaaggggaaatatgataacgtcagtctctggtttaattccacagctggcatcccacagttttgtgaagcttgacttccttatcgcgcctttcaagaccctttgcaatctgaccccaattcactactcttgctcatctcccccactatagactcgatcacccagaatttgtcaccattttttcgtactccccaggcttttgtggctggggatctttccttgagctgctccttctgtctggaattctttgcctcaatctgcttaggagcttcttactcccatttcatgtcatgaacactgctgatatccgcccaacacccaagtctgagcttttcaccattgtacctcctgaatcttccctttcagaaggggccatggaaagggtgaggttcttggggtgagggttagggtctggctgtgaacttctccccagagagcctgttatgctgtggtcaggagccctgtggcatttcttttccagaaaggcaactggactgtctggtcacaggaatggaacagaagacatgtctccgcaatggagccattgatcactgtcatagagtgcaaccagctgtggcctggagagggaacatgctttggagaagttctctcagggagagtattccttaatatgagactcttgagagtgtggtgagggtcagccagtgtgagaagattctttcccgatgacatttctgagacagttttgtactgaatcaactgtagaatgtctctcctttctgctgtgggaacataggattgctatttctcccctgcagggtggagcgtttccatctttcatccggcaagctcgtatctttttagtcccgttcatcacagttttctcacgtaattggggatgcaattttccccatccactgtgatcatttgctgttggcaaaattcagcctttggattctggaactattttaatttgtagagcttccacatttttttcccaaagaattttgctatctttatatcctcccatgctgctttattggttatggtggttgtttgtttgtttaattctgattgcttgtattctgatagcaatgttgaacactaatgttctgagcaggcacccccttctttgttttttgctttaatgggactgtcctgactttcactactaaaaatgaaattgactgtcaatcattctataagccttcaccctgcttttcttcatagcatctatcattcacttccttttatgtttaaataaagaaaatctgcctatctatccatccatctatctatatctcatttatttatcggtttacttggttaccacctctcttagttcctttgttctgttataacagaataccatggactgggtaattaataaagaacagaaatatatttctcaaacttctaggaggctgggaagcccggatccaggggggcaggtttggtgtctggtgagggcctagtcccttcttccaagaggacactttgaatgccatgtcctcatatggcagaaggctgaagggcaaaaaagggcctaagctagttccctgtagccttttacgatggcaaaaccatcctggtttaatcacttccccagaggcctcacctcctagagccaccacaatgggaattaagtttgaacatgaattcagtagggttcaaatttacaccgtggcaccccttgtctttcctagtagaatgtaacctctctgagggcagagactgtgtctcactcttccttgtatccttgccacctgatgggcagtcagtaaaggattgttggatataacacagacatgactgtccccttccattaagaaagactttccctgtccccccgacacacacaccccaattacaaatacattactttttctttagaaattgatattgaattttgtcaaatacattttggagtctttgggattaacttcragctatggctaaaggtaattactttggtcgaatgttaattacaataatcctggtggaatttctggaatagattcttatttgtaatagtatattattcttttaaagttgatatgctggtctataattttgtttttggttattggttttgttttgctgtgattctgctctctgtgtcagattctagttgttactaacttcttgtaagaagcttccagccatgagattaaccccaaaagatatataaaaccccatcagcaatgcatgaaactctcactccagcaacactctgtattatcattttaaattatctttactgtttagaaaagcaaacctagatatctaatataaacttgcaagtatttgatttctggtgaggtggaatctcttttccccccattggtaatatgtatcttggtgaatttcctgttcatgtcatttatcattgtttttctatttgcatgttcttcttttttattgatttgtaagagctttttcatatttgaaaatattgackttctctgccatatatgtttatgtatttttcattttgttgtttccctttaatattatttgattgtaagttttaacattattaccgtatgatttttaaactctatcactgggtttattaaggtacattttcttcatttacttgcgtgtttaaaaagtccagaccagagatcaaacaactagccacagctatttacttctaataaatgtgtggctttatttattttacgtttgacacttgatttaatgaggtttccccttgtccacagaccacacctgaccttttccttgaacctcagagggcagcagaccctgcctctgaaaagttcttgagaagaaagagctggtgttgagagtgagacagatgggctatggcagtgatgctctctgctcagggaaactgccacatttccctgcagctggcagacrctgaaacacactgaggtcattgcttttttatttagatgttaggggttagaggtgctgacttgcacctgttctgcctcctagactgtcacttgccctctctgctcccacctccctggagcccccagttcccaaacagggtgrcagaccccaccccagcaccctctggcctcagctcaggttctccgcctggttcctgcatgactcatgctgtgaggtgcttcattggcatctttgacctgtggttcctgatgcaggtcttactggtgacccattctgggattcatgaactgtagggtggtacagggcaaggagagctggacttggactcaaacagtgtgcatgtgaaatctgacctttcattctctggttttggtatatccacagctttcctctcctccctgcacatggtgtcacaccgttctgcatgctacacagaattgtggtcagggtcaagtcattgcgaatgagacgcctctatatgtatgtccataatctctattattacaactgcgaattcatattggtatcaacaggttcatttatagtctgaggttgctgctgctggccactgctagcatcaaaggctgttagatgcatccatgcgggagacaggtcatttggggatgtgacaatcaaaaaggagtggattctgttccctctgagagttcttgtcaatgataggatcctgtcagtttacaaataaaaaatctaaatatttagaaagcacaagcttctgcctgaaaataaggattaaaaatgaatatttatgaactgatagttctgcaactctgtcctcaaaatgcttcctttggtgacacttacaaggctgtcactctttgaacagaagccagagcccagcctggcagcataccattagttccatgaccttgactaagtcactcaccctctctgagcctgtctcctcagcagtaaagttggaagggtggtacttcactcctggtgttactctgcaaagtaaataacgcaatgtatactgcagagcctagtgaaatgctaggcacacagtaggtactcagcaaaatgtgcrtgtcctccataggccctatttcactgagatccctgtcatttcttcctgcctaggatgtggcagaagcctctgtgttttgttatattttagttagacattgttttagtccattcaggtggctgtaacaaaataccacacacaggataacttataaagaacagaaattttttcttgcagttctggaggctgggaggtccaagattaaattgccagcaagttaggtgtctggggtgggttctctttctcgtagatggcaaacttcatgctgcatcctcacatggtgaaaaaggaaaggtgtctctctggggtctcttttataagggcgctaatccttttcctgacagttctgccctcccaaaggtcccaccttttaatattatctttttcagagttaggtttcaacgtatgaatttggggggacattcaaactttagcaaatatcctctaaattgaattaaaaaccctttatcagaatcgggaaaaccctggcttggcatagtggctcacgcctgtaatcccagcactttgggaggctgaggtgggtggaccacttgaggccagaagttcaagaccagcctggccaacatggtgaaactgcatctctactgaaaatatacaaatttagctaggcatggtggtgcatgcctatagtcccagctacttaggaggccgagacaggagaatcgcttgaacccaggaggcagaggttgcaatgagccaagattgtgccactgccctccagccttggtgacagagcaaaactccatctcaaaaaaaaaaaaaaaaaaaagagttaagaaaaccctgtcttctgtttaacagtcactctccagtccagaacccctattttctgaccaactgtcttgctcctctgtctttaattgtctcccttcacttggaaacatagccaagggctgatggrtcttctcatctttgaaggttggactcttcatgcttttattacatcttggatattagggaagtaaggaatgtttggagtctcttgatacagggtgactccactctccccccagtacccaaaatagcctgaagactagctgcataaacatcctaggagtagagaagtcttgctaaaactgctgatgtcctgactacattctggaccaacctacatgkagactcagccccaaccacctgccatatgatccctctaaggtgaccccagtcttactccctagttcaactggacaggggtagaaagactacaatttagcagctcacctggacacaactgataatgcccccttgatgaaaggactgattctgaaattaccagccagtgtagttgaggttcttaacatttcttcccttgaaccagggactgggctcaaatatatgatatagtggtagaatttcaggcactgggcttggcaatttggggctggagaacagccctgggcactgaaactggagcttatttattcatgcaacaaatatctattgaggatctactctttgttttaggtgctaaggatactacaatcaccagagccaacatggcccttttgtgtgtgttgcttagagtcttgtctgagtggaaaatattaatcagataaacagataaatgtgaaattgcatgagtaatatttgcttcagaagtagctgcaggagagggcttgaagtagagtgtcagttgctttttcttagtgtgttctctgtaagtggtgctttggcagcagatgttaagatgatagtgggaagatggtagaagaagcaatgtgagacataagaccaaataatcagtgctttgactctgagtcacaaagaaaatgttggcacaggatggtgccttttggatgtccttattccttcaccgaccagtggtacagatcctggccccatggtcaggttttacctctggctgaaaccactgccctatggggctgctgttctgtaccactccagaggtcaccatccccattgttatagtgtgaacaatgctcctgcaagttgtgcaaaatcatggttcttgtcctttaaaagccattgtggcacattggacttgagcagggaaggtttgcccaagtaaataacaatagagctcagaactgaaggaagaggtgttaaccaaaccaagagagggtggaaaatcatgctgtagtgagggaacagcatggccagaacctctggtgaaagatgtagggccagtacctggggtagggaggaggcaaatgtggtttgagtgcaaaatcagtgagatgatgtgggagtaacagcaaccagggcaagaccatgtgtgatcttcaggccacagtatagatggttgcttttatcctaagaccaatggaaaactattgaagaactttaatgtcttaacagtaaggatagattgtgtttatccagtgcttattatgtccaggcactgttataggggctttacaagtattatctcagttattccccattctgacctayaagaaagggacatcattgtctccatttaacagaagagaaaatcagggtaccaagatgctaagcaccttgcccaaagtctcaaagctagtaagtggcttacattgttaatcactgaagacagttgcctcctgcttttgacaagaagtgagtaagggctcctaccgttcttgagtgtagcaaggaaaaacgtagcccgtcctctgatgaaaaggcccacccctctgccagggacatgtccaggcagggcagcatggtatacctgagagtttgtgtagctcaaggggaaggcttgacacctggcacaggtactgactcctgtcgctggccgttatctggagctggtgcctgaggattccgacaaggcagagaagcccttatcagcccacacagctgcttcctgggctgtttcccccagggagttacatggcagtgaaatgaaggcattgacattcagttccacttcttggacaagctgtgctgccttggggagcaccagatacccatatgagttagtgtggtttggagtctgcactttggatgaatccatggctcataacacacgggttacaggatttgggatgggtaagcatggacctggacacagagagaggaggggacatgaaggcagctactgagctaggggagccagcatctcttggcattttgctgaggaaagagcaaggaaaagattgaagatccagatgaggtgttcacttaggtgagatgttctcatcagggaaatatactttctgaaaacacaacatccctcaaaatagctcaaattgccttacagaaaatcttgagcaggggatgaaaaatgatttggcatcatggacatacaattggaaacccgatacccaggcttctcttccttttctgttccccattgtctctgcttcttgcttccttaagtgtgtctgccccatcctcctttctgcacgctggcttttctctttgtttgggtgttgattttctcccctgtcacccacttcaaaggatgtgttcttcagcctgcaatgggactaactctggcccccactatctctgggcctttgagctctggcacctttcatttttattttgtggcttaatatattcagccctcttagcaattgaatatgttcccacagcaccattgactctataacagcaatggtggttcaggagctgggagaagtagcctgcgaagcataggttcagggtagagagggtattaaaattctccagatgcacccagatttggagacaggtagtgcgttccttctcttacagtctcatttgttggagtgctctcacggttcatgagttatttattctttggaggcaaaatctgggcccctagaatgtttgtcattaaatgaaagagccaagccagacgtggtggcacacatgactgtagtcccaattactctggagactgaggtgggaggattgcttgagcccaggagttcagatccagtctgggcaacacagtgagaaagggaggatggatggatggatggattgatggacggacggatggatggaaggaaggagggaaggaaggaaggagggaaggagagaaagaagggaggaaggaaggagggaaggggagaaagaagggaggaaggaaggggaaaaggtaaaggaaaggaaggaaggaaaggaaagggaagaaaaaaaagaaccagactcaggactcctccacccctcacacacaggctaggcagcccaaggcagtatggttgagacactgtataaccccctctgaggctaacagtgaacccagtgagacagcgataaggcaagaagccagtatgagcaggtctccatgggagcgtttctatatttatattcagagcacttcaaagaatatttcaattgctattactttagcaaaagtctttcatgcaaattttgatatttttcaatgaaggaggcttcatccaaatcaatgcaatgattctttccacctcctacatgaaacacccagcaccttttagttacacaccttcaacatgccaaggagagagtctctgagttgctttcctcacatttgggggatttgtgaactctgaatcttaataagagcctagagttctaggtgtaaaccttgtaaagagtttgtgtgactttaaatattgccccagcgggttaccttgtctctgaaagcctgctacgctcccagccatacttgaagggcaatgggtttcaagatctcggggtccctgggatgctaaagctggagggtacatctgctaaagctcagggaactcccattttcggagagcactgcttacaataacctttgatgtcttcaagtcaaggtccacactcctgagatttagcttgggatggccatgctgggtacgcagtggtcatcttctcagatgcctcctcaataccctgaatttgtgttcatttttcctgcccagggcataatctatgtccttgttcttccccacactcacccagaaggagcccctgaaggaagcctcctgggaggttgttgagtcaggcagctgaaccagaaggaaaggtctagaaactgggctgtgcagcatcccctgggcccaggaagcatggaggtgggactcctgcaccaacttgtcctctcaggtccgcagcacccagagcctgggtagaagagcctcaggagatcaggggtccctgcatcctgcatctatggtctgagttggagctgttacctttcaggakgaagagttcagtcctgcaaccagttctcaccatgaagtctgtctcagcctggctctcacaatttgtagcagcycccatgccacccaggctagatgcctaaatctttcaaagactcacagagatctgtgtgacycacacacacccctttcaccccatctcccactctcctctcctggaaagctcttctcttgggtatccacttagctaattccctcacctccatgacgtccttgctgaaatctcactttctcagtgaggctgatcagtctcacccctgcatcacctgctcatgcacacctatcctccccaccctgctctgctgtctccttccttttcttttgttttctagagaacttatcatctactaacataccaaataaatggcatatttattacattcattatatttttctcccctcctctcaccttcctagtaactagaaggtaaactctaggaaggcagtgtcttcactggtttgttcctgggcatatctcaggtgcctaaaataacagctactgatactgcccaagagatagttattgactccacatgaatgagtctgtggtttccccaaaaataccatcaaacaccctctctgatgttgtagattcagktctgactgacctactcgayagtctcccaagtgctaggaattttcaagctctcttatacacatggacacatttcaacttcatgaaaaacctttcttcttgatgatggaatcgaatattattgaaggtcacccaggtgctaagcatcacagcctaaaaccagcccagcacacccaagatcaagttcacattgttaatcaggttcacactgtcttttataatcccaaagtatttccttttattctccatgaatatttactgatataattcaaaacaactccttcctattatgaaccccttcccaaataaaatgcgggagaaggattacatctataaagaaacacaatccaagaagtacattttaagggaaaaaaaggcaacgtctcaaagccactttcttttctggtttttagtttgacttttccctccaatgggtgcctaatgaggcgtgactgcagaaggctgggcaatcaggctgctcacttcgtgggttttactctgcaatccccagcttaggacaccaagtttatagccttcgcaatcagcttcgctcacatgtgccgtgtagccactagaatcacaagaggggcagagagaaaaggcagtcttctatgactccagtgctcatgttcttacagcactgcccactggcagaatcacaggtgagtaagagggactgagttccttgtctccaaagtgttccagatgattccttgatggcccctggcattgcttgtaggggcatgtctcactcagatgggacagaagaagaacgggacagaagaagaactggacagagagggcagagtggtcaatgacaaggtagagcttcttgggagccacaggtgcagaaatggaccctactggccagtgggaagccacgagatgggaagsgaagcaagtgccagaatctctcagaagctgagggagaaaaccacttagcacacagttagcaacctcccaagtctggggtagactggggcaggggtctgggaggagttggaaaatggagcatgtgtctctgcacagataacaagcctgggcaccacccatctgccaatgggcactcaggggagggaagagaggcttggtttgggtgtcaggggacctgggctaccctcaagggtggcctctggaccttcagcattaattaggtgtccactaagagagagaaggcattgaagaaggtggtccacaaggccctgctgccctgggctgagttgtggccaggctgaaggacagagcccctggttaccctgtgagggctttgggaagtcccctsgagcaggagggaagtcatgggcagagagcacgtcttcctggcaactggctgcaggtgaggagggggacctgactcctggcactcagtgtggaagggaatgtgttggaaacagcaatgcaactccaatattagcattggtgccacactcagcaccactggatgctttcccacaagaactgcctcatttagtccacacactcatccttattttacagataaggacctgaggctcagggccgttactgcttgctctagacgaagcttgtccaaccctgagcccacaggctacatgcgacccaaaacggctttgaatacagcccaacaaaaatttataaactttcttaaaacattatgagattttttcatgattttaattttttttttgtctcatcagctatcgtcagtgtgagtgtatttcatgtgttgcccaagacaattcttcttcttccaatgtggcccggggaatccaaaagaccggacacccctgctctagatcatgcatgcttaataggggtgccatcgaccccaagagatgaaaattggttcttggtggtagtggtgggggtagggtggggaaaaatcccttttcatacacatatgcataatacgcataaagcccacatacagccatgcaggtatgcatagcgtccatatacarctatacaccacatctgtagagttaaaattcataggggtacaacacagaaagtctaaatacatttcttaggaggtgatagtaaagaaaaaaatgattgagaaaccctggtctagctactagctacaagtggctattaaacactcaaaatgtggctagccggaatagaaatgttcagaatataaaatacacaacaggtttcgaacacttagtgggaaaagagaatgtaaaatatcctcaataattttgtgttgaatacatgttggaataatagcattgtggataccttgggttaaagaaagtatattactgaaattaattcccacctgcttctctttgccttttttccccatgtggctcctagaaaatataaaatcacaaatgtggctcacatcctatttctaatgggcagtgcagctataaatgaccatctgctaagaggaagcatcaggatttgtacccaaggtttctgactcctttgttatcccatcgctgcctccttcgagtagaaccagttactgtggggccttaggtgtgcttcctaacctctctgagcctcagtttcctcctgctccmatctcctttcagcactctgtaaatggagtagttccttccagctgtgaggttccactctggacccagctatgagcctggggtcactgcagaataggagaacgtagagtccccagatgacccatttcatcagaaatgacagttccataaacagcagtgtcacctgctgtgtgtctgcttctggggaaataccacagaggcaaagttagaaaaaggaagcttctaacctgaggccagagggttggagaaaaggttagtataaatgatcgttttaaccaagaagggagaaaaaaaaatgttcatctcttctagtaagaaggagatataacaaaaaaaaataggctttacaaaaccttctcatagtaagtaggggcgaatacaatttcttacaaatgctactctgctggattgaattgatggtgtagtctccaacatgccctccctttcgttcctttcctaatgcctaatttagtgggggagaaaatcaattctattttaatttcatgagaaaaatgctgaatgaaagaaaagtgcaatagagtgaaacttcagccttcagccccgcactggcccagaatgtgtgattacgtgatcgatggatttctccttagaagggcctctcaacctgatccctgacttggcctctgacaatgatgcaggaagttcccaggtggtcagaaaacccctctggggtgcttggaaatgcattctagcatcaagtcccctgatcgcccctrattctccagatttatttccaccccatttcaccttaattttggcctctgtgcccccaacgatgcactcaaaagctctctctgcctgtccaaatactcctaacatgtctttgcactctagctgatcctttaagagatttccagcaaaagtttttggtctcccaggccctggaagtaagactggccactcttcaygatgacaaaagagctccaaggttaagcaggtggattctagattcatactgccggggttccaagcctgcctctgcctcttcctatctgtgaagacactgggaagttgctccccttaagtctcagttttctcatccgcaaagtgggaatagtaacggtagtagcctcataaacttgtgggatgattaaacgagtaatgtgtggaaagtgcttggcaaggcacctggcaactagtgagtggtattaaatgtcctctcgtgttgttaatattattgtaataggccgggcacggtgactcatggctgtaatcctagcactttgggaggccgaggcgggctgatcacctgaggtcaggagtttgaaaccagcctgaccaacatggagaaaccccgtctctactaaaaatacaaaattagccaggggtggaggtgcatgcctgtaatcccacttactcgggaggctgaggcaggagaattgcttgtacccgggaggcggaggttgcggtgagccaagatcacaccactgcactccagcctgagcgacaacagcgaaaactccatctcaaaaaaaaaaaaaaaaaaaaaaaaaatatatatatatatatatatatatatatataattgtaataaattgctgcaagaatgtgaggggtggaggggtgtgcctttggcttctaacttgtgggtccatgattacagatttgccaatcaatgagacttagtgcacattttttgttcttttttttaaaaaaaatatttagttcttttttttttttttttttttttctgaaatggagtcttgctctgtcgcccaggctggagtgcagtggtgtgatctcagctcactgcagtctctgcctcctgcattcaagtgattctcctgcctcagcctcaagtagctaggattacccgcgcccgccaccatgcttagctaacttttgtatttttattggagacggggtttcaccatgttgaccaggctggtctcgaactcctgaccccagrtgatccgtcccccttggcctcccaaagtgctaggattacaggcgtgagccaccgcgcctggctcaatatttaattttaaaataattttagacttacagaaaagttgcaagattagtatggagtttctatatacccatcacctggcttccccttatgttagcatcttgtataaccacaggatagtgaytgaaaccaggaaattaacattgatagatactttaagctacattataatgaacactataatctacaggccttatttgaatttcacttatcttcccactaatgtcgttttccagtccaggatcctatccgtgtttcacttacttgtcattttttccttagtctcctccagtctgggacatctcctcagcctttcagtctttattatttttttaatattttatgaccttgacacttctgaagaatactggtcagttattttgtagactgtcctttaagttagtttttttttttctttctgatgttttctcacgattagatcgagattatgcatttttggcaaaaaataccacacataaccctttctcagagcatcgtatcaagaggcatatgatgtacatatttatttttatttttattttttacttttgttttttagagacagggtctcactctgtcaccgaagctggagtgcagtggaccagtcttgcctaaccgcagcctcgacctccctggctcacgcaatcctcccrgcctcagcctcccgagtagctgggactacaggcatgcaccaccaygcctggctattttttaaaaaaaattttttgtggagatggagtctggctatgatgcccagcctgaatgtccatatttctcattactggtattgttgacattcatcatttggctaagaatgtagcatgtatttgttaagcatttactgtttccttttggggatatgaaagagaataaaatattgccgatgctctttaagaaactcttgtctaatgaacaaatggtgttctagttactactgctggtaacaaatcactccaaaatttagtggaataaaacaacaactttattatgcttacatattctgtgggtcaggaatgcaagagggcagggatgatttgcttcagctccacaatgtctagggtcccagctgagaagactcaaatgaccaggggtgaccagagagccgagaactggactcacacggcagcctcctcacttagctgtctgttgcccagatgactggactcagctggggctgtcaatctagagcatctacacagggactgtcatgcaccctgcrtttgctcacacatggcggccccaggggagttagacttcttatacagcagcttagacactgtagacataagagtctctgtggacaagtcagaaactacattgccttcatgacctaatcttagaagtcacaaaatatcacatcccctacattgtatcggtgagagcagtcccaagtcccctaagacttaaggggagtcaggggatataaacaccaccttttaatgaaagcagtgtcaaaggatatgggctattttctaaaaagcaccaaaaggactttctacttacacaggtttagaaattcaggcccagatacaagaccttcaccaccttgggcctccttaattattaaatacatagttactgagcaccaactctgtgccggacaggcatggacccagcttctgggcttgcttggcaagtccctcctgagtggggtgggctcagacagaccctctacaaagcctcgtgttctgacagttgcagcctcccctcaatcagcccctctccctagaaactgttcacacaggatgtgcacagaggagccaaggccaaggtggcagggtggggcggagaatactggacttcaggatcagaatgacctcattttaaatcccagttgtaccacattgaggatttgttacattttcattcttaatcctcatgtatttggtaaaccttattgactccttctctatgccaagctgggtgcttggcaattattacaatcaataaatagaatctaggctttgcccttaatgaaggatttgttccaggcggtgtctgccagaaaggctgttagtatggctgcagggttccaatgagcaggatcatgggattatttaacttcttgcatctccatgcccaaagccaactggagaggaattggtcatgcaacttagcaayttaaccaggttaaacttagcagaacagaaatcagctgagtgtgaagttggaaggcaagcagctcacgttcagaaacccaagaagtattgcaatacagactaaaagccattgggaatattgctagacagactcattaaacaagaaggtttctgtgaaaataacaaaatcatagcacccaggacaccccagcatgagactaaaagctgaaaggaggttgaggcttcatattattaggctgcattatggtagttcaggaagaaagagcttagagccgtctgagttgatggtggccctgctatgggactctgactgcattctttgaaatttagggcagctgggaagagtgaatctcagaatatccctctcatgtgaggcaggggagggaaggcaatgagtctgggaagcagcccggtgctaaggattggaggggccagaggtgttggtggagggagcacctgttgacaggaatacactcacctaaagtgtgtctggtagctaaggagcaggatggtgacacagggaagagagccatatgcatggtaggcacataatgtttgttcctgttattatcacccactaactaaccctccattttggttgatggatggtgaatactaaggaccctgggccagctggatttcgagtttgttttctccctatgtttgatcccacagccaataggaaaacagctgaagtcagagagcagggcattgattggaaatcrgcaaaagccatgttgggcaaacgagttaacttccccactcctacaacagccctttgatccatggtaaccaagaaagtccgcaccaggctagaggaagcccctgcagggccgcagcaggrctgatacggccaggaaccacgggcatgkgtccctgtgctggcagtgctggggaaggtgtgcagcccgggcaggccccggcacagccaaccaagcctgcaggctgagcctctgaccctgaagcttggcttyggaaagcagggaagcctggcagatgctgttcagaggcgttgctgctctgttctgttgtctccagggcccttcggctggtgagggtacaaaatagagcttcagtcgcttaaagcttggtaagtgatgggtcagagtttcagccctggctctgcaagactgtcagccagtggtcttccctcccgctggctgagacccacactctttgccttcatgaatgttaacagcattggaagcacgaggccagtaaggatacttgcaggtcttccccagtggttttcagccttaggaggctcaggtctggggccatgtgttggctccgtctcattcttacatttctagggacctcattcttctccagccaggactcagaatctctcagagtcactgttgtcacttctccatctcctctgcttctggttgaaacaaggccttctttgtatttgtcatctgcatgagagccagaccctccaaagggaccccggtgttgttcctctggtcatttcaatcctccatccccttgcctgagaaagtgtttctccaaactcagtgtgcatgagaatcacctggagagcttatgaaacaacagagtgctgggcctcagccccggacattctgatcaggaggtctgggatagactcatgaatctgcagctctaacaagctcccargtggtgctgatgctgtttatctgsaaaccacacgtttagtagcactgtggtatgatcctgtgtctctcttgatggcctaccctctcctttaatggctctatattaccctcgaaataaaatatatacacttgagtagttcaytaaaggcttccataatctgagctcagcaggaatgccacctactgttgcttagtttgtgcactgcacaaagacacactaccaaggaaatgaaatccattaaactctgtgctgtgtctkccaggaagaatatgactgggcaccaagaaaagcgtatcttcttcttctcacaaaggcagcatcagctcactgaagtacagggggctgagactgagttgagacaggcaccttttctactttgcacaaaagcatcccttaggcaagcagttgtcctgcccaagagccttttcttctttcattctccaccatctcctgtcatgcctcccacccttctcccatgctcctcatctggttaacagcttcacactctatgaggaaggcatctggccccagagactcaatctgttttctctgttacatgctcataagagccatcttcccttccttcagaacagagctcttaatgtgccttgcccgcttattcctgtgggccatacctatctccctcaccaaattgtaggttcctgaggattctctagagcttagtacatggccaagcacctagtcaagagctcaatggatatctgtttaggttctgttctgcagccacaaagatgctcacagcagccaaatctcagcatgccatttgttgtcttttaaacaattgattttgaaataagtttacagagaaactgtaaaaaaaaaaaaagagagagttttatacccctcatacaactttccctaatgttaacatcttgcatagccatggtatatttattaaaattaagaattcacttcagtgcattattattgattaaatgccagacttttttttttttccagatttctccaggttttccacagaggtcttcttttttcttctaggctctcacatagcatttcgttgtcatgtctccttgttcctcaacctgtgaccatttcttggtctttctttgcttttctatgaccttcaaacttttttgttttgtttgtttgtttgcttgcttgctttgagacatggtctcactctgtttcccaggctagaatgctgtgctgcgattgtggctcactgcagcctcgacctccagggctcaagtgatcctcctgcctcagcctcccaagtaactaggactacaggcgtgcatcaccatgcccagctagttttttaaaacaaattggtgtagagatggggtctygctgttttgcccaggctgctcttaaactcctaggctcaaataatcctcctgccttagcctcccaaagtgctgggatttcagacatgagccactgcgccttgatacagaagccaaagccactcatggacattctggagccttccttccaaaacaatggcttgtcttccaggagtaaagaaatgggggtcactctgcaacataaaatggaaactaaaattagaattataatttttcccttgaagaactcgaggctcagagaggttaagcaatccctcaagctacacagctaatttaattattcatttagacatgcaaaaggatgaaatgttgaacaaacaccagatacgatctttgcctccttggagcttaaagtctagtacagaggtctgcaaactttttctatgaaaggccagaaaataaatattttaggcagcgtgggctgtagggtatctgttgctacttctctctgctttcgtagtgtgagagtagccataagtccatatttaaatcaatggtgtagctgttttccaataaaactttacttacaaaaacagatggtagattgaatttgacttgcaagtcatattttttcagctcctgggctggtagaaaagggacttattgatgaaataattacatggttacatggaaagttagtggctcaaaagagagacaggtgactctggaaacgtaaaataagaacctgggagtcagagaagatacccataaaaagagtccctgtaagtgaggtccgctaagggtgaggagtcatgaatgaggcaacaaggaggcatgggaaggaagacggggcccaggctgacagaagagctggtgcaagttcctgtggcagaaaagaccatggctctttttagtactgaagtaaggcttggggtgctggggggaggacgagcgaggccagctcacgcactgagctgattaagaccacatgacagagacacattcttcatcctgagagctctgggaaagcattgctcttacgacatgattggattttgtcattgttgttgttgttgagagggagtttcactcttgttgaccaggttggagtgcagtagcgccatctctgctcactgctacctccacctcccaggttcaagtgattctcctgcctcagcctcccgagtagctggggttacaggcatgcaccaccacacctggataattttttgtaattttaatagagacggggtttctctgtgttggtcaggctggtctcgaactcccgacctcaggtgatccacctgcctcagcctcccagagtgctgggattacaggtgcgagccactgtgctcagcctgggatttttgttatgaagcacctgctttggtttctggctgtggatcctactgtcagcaactaaaagagaagggggacatccttgagtactttttgcagccagaacccatgccaggagcccagggttgatgtgcagctgtgtacccttccccctactaaccctttattttatgtttgctattctacaaatcttccgttttccccgcttataaatgaaggttcatattatattatacgtttacagccacagctccctcccatcccatttttctcacctttcttctttccctccccagcccgatccctcactaacttcgtgaaacttgcaagttaaatttttcaaagactgtttctgacaaagcagtgggaattagatttggtgaagcccttcataaaaaattgaagacatgctatattaacatacattgatttattcatagtgtttcattacaagtaagtgaggatcctgtaataccaggaaaggttaggagagcagaagagcgcggtatattatattgacagctcggtggaaattgagttgcttttggattgaatttggagcgcaggaaaggaattggctagtaaataaggcatgagttttacctcccagtgtctgtatatcaatgtagttgccaccagtccaagcagggggacggggacagaattttcaaagaatgcaagcacacgtcctctccactggtgcactggggttggtggctacaggctgaactgtctgtacatctccccttttctgccacagtggaaaccagaatccacctgcatgctgaaaactccatttgcccccatttgctcactgctctgcagtggctctgggctttgctctgtccaaaccttttcccatcccagatctttgcctacgcggttccctctgcctagaagctagaatactctttcctcttctgactcaggattgtccttcggatgtcagttgcactctctcctgagatacctccacgagcatttttccttagtttggtcattctcagatgcagaccctgagatggggatttgaatatgagcagtttgccaagaagtttaagaaacaccagtaaagagatatggagtggggaagagaaaggaaagtagccaatcatcactgtgttttcaaaccagctgcctctagaggcaagtggagctgagcctctcagggaaattgggatgctgcaggaataccaaggagggggagcttgcaggggtataaggaaggggagcctggagaatgtatgcatcaactcccatcagggctggggtgttaattaacccccattcccagcaagcacccatggagaaagtcctcaaacagagaggcagatagatgcctgtagcacttgcctctgagaaggagtggggtgggtaggggtgaccagagggaatgctgtagacaggtccaccagagcagcctgaagctagcagccacctgcatggtgcacatgcacactcaggtgctgcttgaaaaaaagcccaaagccctcagctccctgcatttttcctccctcctgcgcacactctgctctgggcaccgtctgacctctctcctcaaggatgcggcaccactactgtttaatataggacagagaaatcacttttctctccaaaacacttggtgccattgccagtaacagcaaattgcttatttttgaagggaagttggtgtgcttccttttctgcctgggtttggccattcttgatggaagataagtgatgtcagctgtgtatatagctggcttacctctctcaagaatggaagtcacttgaggatgaggcctgacttgaattcagttgggcacctctccagcagcacacagtgcagggcctagaacacaggagtacacaggaaacactgtgaaggagcaaataagtggatgagtgaattcatttttcaactgatgcactgttaacaggccaggcaatgtggtatagaatatagagtayaggctttggagtcagacctgcctagtacggtgtctgcaagagattgttgaatgtacctgggaatgccttatttgctactacccatgacaacatggatgaatcccatggacataatgataatgttgagagaaagaaaccagaaacaaaaaagcrcgtttcataggatttcactgatacacagtgcaaaaactggcaaaactcgtctatgctgttaaaagtcacacagaggtgatccctgatggsggtaggcaagtaggattgcaagggagtgtgaggaaaacgttttgggcctggtaatggtttggtttttgattatatgactgtatccagttttcaaaaattcatcaagagttatgcttttctgtatgtatattataccataattaattttttttttaattttttagagacagggtctctctctctcacccaggctaaagtgcagtggtacaatcatggctcactatagccttgaactcctgggctcaagccatcttcccacctcagcccctgaatagctgggactacagatgtgtaccaccaacccagctaattttttaatactttgtagatacatagatacagagtcctactgtgttgcccagactggtctcaaactcctggttctagcaatcctctcaccttggcctcctaaattgctgggatttcaggtgtgagccaccacacctagcctaattaaatatttttaatggaacaaaccaggtaagacaaacaaaaaatcttgtgtttgccacttcacaactgtgtaatttcaagatgtgacactcaaagtgtgatccgtgggaccagtgctgggctaccaattgttattttcacccttgggcaagtgcagaagttgagagtgagtgcttcaaaactcttctagtaccttgctgtgacactcaagtgtgtgatcagggaacagtagacacaaatcattccacaggtgtagaccagtttggttattgctgaactcacatgatatgtcacatggggcatggtcttcatataccatagacaaactatctccatatacaatttgaaaaatggtgattgcatgcaagttgcttccattggcacctcagtttctccattattaaaatgagagtagctatcctgatgcccccaaggatttgaggaagacaaaaaagataatgcacgagaaagcaccagtcagcaatcgctatctgtctggaatatggggcctgggatctgcatttttaacaagactcataaataattctcatcgggacgctctacctggacactgttctatgactgcagtgtccagcatggtgaccactggcctcacggggctactgcacttatgaaaagcagtggctagtccaaatgaagaagcgctgaaggggtaaaagacatatttgtaagacttcatacgaatagtagaatgtaaacaattccattcaatttttatgttgtctacagattgaaatgataatagtttggatacactgggttcaacaagatgtgttgttaaaattagtttcttttttttttacttcttttcatgagactgtcagaaaattcaaaatgacatctgtgggtcgccctctgtttctttttttaaaaattttttgtgggtacatagtaggtgtatatatatttatgggttacaygaggtattttgacataagcatgcaatgcgtaataatcacatctcgatagatggggtgtccatcccctcaagcaattatcttctctgttagaaacaatccaattatacccttttagttattttaaaatgtacagttaaattatttttgaccatagaccgcctgttgtgctagcaaatgtaagatcttattcattatttcaattttttctacccattaaccatccccccaccyggtactgcccttcccagcctctgataaccatccttctactctctatctctgtaagttcaattattttaagttttaactcctacaaatcaatgagaacatgcattgctccagtgggtgagcaatggggtatttggaggctgggatcatctggaaagtggacagcaacaggcagcttagcagaatctgctggccaagttcacatgcctgccccttcccccgcctccmtaagkttcctctaaaggagctccatccagcttcctgagtgaggcatttatttgtttgtttgtttgctggcttgtcctacagatcaactacaaggctgtcggctcgctggacccaagtgctgacctctcgagccagagggggaaagtgttcaagctccggaatgaaacccaccacctctttgtgggtctgtacccagggaccacctattccttcaccatcaaggccagcacagcraagggctttgggccccctgtcaccactcggattgccaccaaaatttcaggtatctctgctagaaaggaaaaaggaaaaaaggttgtttcacccccacttcctgattttccttgaagtggaaatttttcttgaattgtcaccctgtgatatgggtggaattaggacgatccagtccctagtgagttaccattgttgtctcctatgaagaaaatctaagtgatgaacttcctaaagtgtaaaaattagattaattaggtggcaagccactaaataatttkcccacaggsttgcattaaatagtacacgtgtgtgtagataatgtatattgcacacaagttggttattaaattcattttcaggaacattctttttgccagaacaagacattagcgcaggttctcatgaaatacctgatgaatgaatgaatgaatgaatgaatgaatgaattactattatagggccacagtagtccaaaattacagactgccatcacccgtagggccccctctgccactagacagcaacaatgcagaattatttcagaaccttttttacagctttcattatcctaaatatgtatgcaattctggtctgcatacatacatattttgcacatggttttccagaaaaacatgttttttttgtagcttaatgttttctcttatctttatcccataagtgtttcctatgttgctacattgctttcgttataatgttctgtcaagtggatggacgtaatttaattatacattcccctgtggttggatatatttggtgcttccgtgtytttacaaaataacgcttcaataaacatgttacaaaataaagtttaattcattggtttggattatagctttaggaataaattcagaatttggaaaaactgaattaaaaaggatgtgggttttaatagctgttactacaaatggctaaattaccttcccaaaggaatagatatagtcgcattcctatcagctgagtatgagggaagggaggtctcatgaaggaaaaaaaaaaaggtagaggggaagtagttcataattgatgtaatttgcattttaaatgtgtttggcaaggttgactctgctttcacttctttgttagtacttatattccctgcacatatctgtttattaggtgtggaacgttttggttcatgcaggttactcgacagatcattgctacccttccccacactactgcaccttgaagaaacctactatgggcaggttgggcatcggggcctcctttactgaaggcctggaaggcttcttatccaacccctttcctaaacgtcctccctctatccatgctgtgtctttaaggatggcagcaaggggcngtggggagccagttgggaatctgtgctgaactcacctgcactctctgtttcctgtccagctccatccatgcctgagtacgacacagacaccccattgaatgagacagacacgaccatcacagtgatgctgaaacccgctcagtcccggggagctcctgtcaggtgaggatggttcttcacttggagtctgcagtttttcttctctgtgccacatgggcctccagttgaatcatgtgactggcaatgcccatgggcaagactggccaggarcaaagcttcctcrgaggaaggaggtcagcagccccaagcccagttcaaagggagcccctgagttcaaggcaaacctgggtgacatagggagaccccgtctatacaaagaaaaaaattttttaaattagctggatgtggtagcacacgcctgtagtaccggctactcgagaggatgatatggaaagattgcttgggcctggaagaccaagagtgtagtgarctgtgatcatgccactgcactccagcctgggcaacaaagtgagaccctgtctcaaaaaaaraaaaaaaaacaaaacaacaamaaaaaaaaaaacaagaaacatcctaatcaggacctgagatggtctagaaggaaacttcctggaacatgtttatggtaaatttagttagtggggtcggtggcctggaacacagtctcctggaaaggtcacttttctttgtgtcactgccagtaacagccagatagacaggtttgctgaatactgaaaacaacctgctcagatatcacaaatctgacaagacctggggactggtccagtttaaggctgtagggtgctggagtcccataggggcacttgctgtcaaggtaaaactgctgattttaccaaacgtggttggagatcaggaatacactgaygcatctccatagttaaactgaccactgctagttcatgatatcaggagcgtgggcatctcttttaaacaagatacactttgcacaagggcagcaatattgactgccggttttgcccagaactccaggaaggaggactacagtcccttaaaatgaagcagagcattgagtggaacaactttcaaattgctcagttcaattcatcaagcataaactcagtatgttatgtaccaggaatgaggcggggcccaaggcctaaaaaccattcattcattcattcaacaaacatttttttttaagaatccaccctgtctcgggcaatgcttaagtgcttggaaacacagcagtgaactagccatggataagtcacatcctaaagaaagtcaaactctagttggggagacagaaacataattacagtacagtgtgtcgttgtggagatacgcataagagctcagaggagagaattcccagtggggacactgagctgtatcttaaatgatgcttaagatttcaccaacgttgtaagagtgtccagtgtgagcacaggcatggaggagagagacagcatgctataacagggagcaaccagggcggttgttgctttaacataaacatcaaggtgggagtgctgggatgagaatgggagtgtgtttgagaggctcaggcctgtttgaaggacatgggsagctactagagagatgcatgcagcctcactccttgtgtcactggaggctaggacaccagcccagaagggggcttttgagatggtctagctagccattgtctatcctgtatccagcttcatctagaaatgataggcattgaaatagacagaaccaaccaccaccaatttagaagttcctatgtagtctgaagtctttggacaatgctccccctaagtcagagaagtctttacactttccctctgaatctctatactcttggttttgcatgtctacttaacaagcttatatatcgtaagactcaacaaattatgaggagggataaggggatgaaagtttcccagtagcaatgagaaatgacagttgtcagggtgcaaaggaatagcgcaactctacaaaacagacacagggactcaaaaatcaagcaggcctacatgctgtcatccctcatagccattcgtgtttattacttggtcctggtttaccctgaaaagatgggtctgcaacttacaggagcctgctagctttcatttaaggaacaagcacttgctaccagcttgtctctatatataacactacctgtattctcgcaacattgtrtaatagtctcctcattttgcaaatatagaaattgagacaaacagaagctaagtcagttgactcaggctataaagccagcaaacggtacaggcaaaatttaaacttagttcaaatgacctaaagccaacactcattttactatactataccacctcctaggagaaaggtgtgcatgatatattttggtgacatttttatccaaaaataaataaataaataaataaataaataaataaataaataaataaaagaaatgtcactgctcaaaggggaaatggttggtgtctggaaatgtctggctgcttttcctctcaaggctctagagcattgagggtgggtgtagactcagtttctggaattatttccagactgtttcttgagcatttgactagaaggggaagtgactaaccaatgccacccagcacgaatttcaggacaactggaaggacagaagtggaaatatcacaatggatttcagttatcttgaccttcattcaccttgaactctgggcagtaggatgttatatgagaggtagttgaccactaggtcatgcaacaaatatttattgaacacttagtatgtttagggaagtgagctaagcaatagggatacagtaaggaacaagatagccacacctctgtcctcttgaggctccagtaaattgtttgtgagtgaggcagggaggtgggacattaagcaaacacacaaacaaacaaaatcatgaaattagcaaaaaaagtgtcactgaacagaacttggtctgtttgcccatgcacaatagaaagccaaactctgaagtactgtgtttttgtagagagaaaagtttattgcaaggctgctgaacaaggagacaggagtcaggcttttggaggcggggacaggttttataggcagaaggtaatggmgtgatctgattggacatttgcaatgtcgtgatgtgggagacttgatctgactggatcatgtcatgaggtgatgctattgaatcatggatcatgccatgtggtgttcacttattaaactatccccattccttagtccaagcacctaggtcccaccaatggtgtcatgcctggtgcatctggtgtgctcggcttatgtttcttgcaacccaggggtattgagctgcttctgcagttccactgtaagatgatatgaaaccactaggtacattgactgtagtgattgagagaagcggtagactggctggacagatgagcaccacccaggaaagcagagcagtgtgcagttgtgtgagttggggaggtgaaggatggagaaaacaatatggacactctatgatcccaggactcaaagaactcactagatgcactgggttaaggatgcttcgaataaattttacagttaatagttttctgaattagttttctgaattgttcctttacttccattgtattatctgatcctcacctacctggtgagtcagctggttgggaaataccatctccattttggagcaggaaactgaagtctaagatgttaactgattggcccaagcttgtggggcttgttacagttaaagacagtgcatagacctagtatcctggctctgagttcatggctcccctgggaagttctgagttcctctgcctggtatgtcacgtgatgaccgggtggcccttttgtgggggtgctacggagtaaacctccaccaaccagggcatgaggggtgggcaagaggaattctcaggggtcctccaactctgccttgtgtgagcccggtctatcacttgtgagcttcagtgggtccctctttgagtggagctgtgtgttctcaaacagactcacacagaaactttggccttcagaccccactcaggcaggctcttctttctgccagtgatgctccaaccctggctgagccaaactctagcccctgctttgccacttactgctcctctgaagccctgtggatctgactctatctggtagaactgagtgtgcaggggggcgagatgtgrcagggaggactgttgctgtgtggggctcccgcaccctcatccctccagccaaaccacctcarcagcttggcytatttttctaacactccacaatggagatttattgcttttgtattgctttcctcaggccttcaaagatttattggtttttaagtgacagaatcccagaattgcttaaaagatcaatcaaatagtgactagaatctaatattcagttctggcttgaacatgccgagccttcttcccccacgccccacctgtcacactgatgtgtgactgatccgtactaaccttcataagaaagtaacttagccatgaattagtcacctataatgcagtccctgaagtgaggctgggggcagagccccaggttctataacagaccgtcccctgatccctgaagacttccttggaaatgttctttccccctcattcctccccttcccatctaattagtcatggagactggtcctctggacttcagaacctgggccaagctctctcttcttctcccacattggcactttccagcctcatcctgtggacctgcacccgccaggatatgcttgctggagtgcttgctgcagcttctcatccttcaatccaccccccactgaactgctggagtgatcctttggaagcacaaattggatcaagttaactttcctgcttaaaattcttaaatgggtcattggttttccattgcattaagtacaggcttcttagcatggaattcaaggctcatcagaatctgtccttagccttgtttccggtttcctttcatttccgtctgcccctttaccaggttttactcaacagtgacctatatagttccttcatagttctttcctgagcctttaattgtgttatacagctgttcatatatatatattttttgttttgttttctgttgtttctacatacccctctataggctgtgagctccaagaaatctgaaggcttggtactactgaattccctttacatgggatagtgtctggcatcatacatatatatacacacacacacacacacacacacacacacacacacatatatatgtatgtatatatatgtgtgtgtgtgtatagtaactagttttatatatatatgtatatctatagtaactagttttatatatatgtgtatatctatagtaactagttttatatatatatgtatatctatagtaactagttttatatatatatgtatatctatagtaactagttttatatatatatgtgtgtgtgtgtgtgtgtgtgtgtgtatatatgccttcagctacctcttattctgaaaagagtgctgttcaatagaattttctgcagttacagaaatgtcctatatgtgtgctgtgtggtatgactgccactgaacacatatggccattgagcaccagatatatggctagtacaactaggaaactgatgtttaaaatttttattttaattaatttaaatttcaggagccatatgtggctactgactgccattttggatggtaaaggtctacaggaaagacaatcagaaaaagaaaaggtgccaatgagcctgtgtttggccagcttgttcagaagtttccatgagagttcagtagagaggcagcccttggtagaatggtgagctcagaagctgggagggcttcctggaggcagtgttgcttaaattgagacctagggaatgaggaggagttagtgaagaagggaagagtgtaacctagaagaaagagcagcctatgcaaaagcgcacacagagaaggtacagggtgtgtttggggagccacaagtagctcagtgcgtggggacagagagatgaggagagaagcaaaggagcaggcagggtccaggtgaagaaggtcttcactctggatttagactttgttcagaagggagtgtggaacattgggaaggtgagtgcccaactgtttgtccttctctgagcaaacaggcccctagtccatgctgttctctccaccaagcatgccattctccacctctccaacatccggttcacattggccacatccaggaccatctccactcttgcagcagaatgcaccagctccttctgagttgccactctgtcatggtcatccctctgtcagtgccttgcgttgtcagcctctgctagactgtggcctccctgagggcagagatgggtcccatacggagctcctcactcagacctaagaccattatgctcttcctgccatagctgacttcccagttggatacactgaaacaggagtggctcctaaaatcagaccagtcttatccaattgtcccactgggtatactggaagcaggtacttattttctctgaaccrtaagttgcttgtcgrtaaatgggaatacctacatcacagattgttttgaaggtcgaataagctaaactgtgtaaattgcaactggtaattgttcaacatgctctttgggggctgggcctgatgsctcatgtctgtaatcccagcactttgggaggctaaggcaggcagatcacctgaggacaggaattcaaaaccagcctggccaacatggtgtaaacccatctctatgaaaaatacaaaaatgcgttgggtgtggtggcaggtacctgtaattccagctagttgagaggctgaggcactagaatcacttgaacccagtaggcagaggttgcagtgagctgagatcacaccactgcactccagcctgggtgacagagcgagactccgtctcaaaacaaaacagaaacatagtccttgtgtttggccaagctgttgaggcaaagagtggctctaagccatgggcagccatgggcaagaattttctctgagccctgctgcaagccaatgcctatctgctgtgtatcctccagcactcatgtgagatctactacatgcgaagtgctggccagtgtagggcacatcaggaaacctacactcatctccaggggtgatcttcaaaacaacattaccttaaaaataggaaagacaatcagaaaaagaaagtgcctatgagtctgtgaacttggtcagatatgagcacctttccgaaatataaattcaagcagacaagcttgtagtatctcattgccaaagggccagcacagtcggggttaagagcaacacccttgggagacagttacattgttcagataagaaatgaaggtgacccaccactagagtacttatgacgatgagatacaacttgtaagaggtaaaatggacatggcttgtgatgacttctccaaggggcagggtgttggggtgtgaaggaaaagacattgtccagcatgactcccagttttctggcttggttcgtgggatggaaagtggtgccattctctgagccaatagatgccgagggagggaagagtctatgaggacatttcatccaggaaaggcgaatggtggcaaaggtggtctgggaactgaatgggggagttaggaactcagctgagcaaggacagctgcaacctggcgtgtggtctaggagagtgtgggggacttctaagggaccttttacaaggtcagttaggacatgagacctgctttcttaggttgcttgaggcatggtgcacagggtgtgggaaytctagcctggaggaccaggggtatgaaagatggaaccctagaagacagtgtaacaagatatatacttctaaaggtcattgcaagttctcttcacctcctgatgagaatctgtgatccttttgcatttgacaggtgcagttagttaagaccatagattctgaactgcacagtgattagctacagtaccaattggagatacagcctacttttaaagaaagaagaaactttattgggaagaaaagcaaacgattgccagatttccttcaggattcctttaataactgtgaagcccagagtgggagcacatgaaacaatcacagaggggttttgctggtccatgaagccgcagtgagcaaaattggaatcattaccgtctgattctcagataccagcatatgatggtgtccaattaggaaagagaaacgaacatttagaggatttattgacacagggcagcctgaggagtttgtgaggccttgtccacattgggaaagatgagaaactgtaattacatttagacactctttctccaaacctcatttattcacttagttccccagttctctgggccacctttgctgggacctgatgatgaggaatgctatgggtcccactttggtgtattgggggttagggggacatggataagagatacccagacataacctgggagaagacgtagctttgttaacaccacttttagccatgcctaaaatcacgctgggacttcatcacaccagattgggaaataggagaagccagatatatgaagaggtaaccagaaataaagaataagggatgaatgttactgtagtgcccttctccatgaggttgtcccacagtctacatatgccaaccattgggatacatattgaagggttatgtgtgtaccaccaaagacatcaccctaggagacaaaggtcagtctggtgatatagcacagagctgcaattagatgattgttcaggaaaacaaaagggaagaaaggtgacacccaaataatgtaggtgggtttgcattcacttcagcttttaccctgactgcatttcaggtccccttttataaggctccttcctccaccaacaactcagcttaccaagaattggctctggtgttaggattctggattatattacttaggctccaaccaaggaggaaaaacaggtgtttggggaagaatattttaaatggagcagtcgatggaacatgaagatcgaaagagtgttctattttggactgtctgccatctggagagatggagacagggactgttactggcatgagggaaagaagagtggttgtcatgctcacctcctaccatagggactatttaaattccaaaagtctggagtgctggagaggcatctgagcaggggttttagatttgggagtcattagcatccaggtggtatttcaagtatggaggggagtggatgacctcatcctgggagagtgtagattagaagagatgagaaacagaacagagagctacgaaactttatcaaggaaacacacaggagatggagaaggactggccaaagaggtagaaggaaaaccagggctgtatatttcattttgacttttcttttcttttaaaacaagaaattcaagggaagaatcgtttaatttttttttaatcgtttaatcttctccaggagcttcaagaagctcttgtagtagaaaagaagaaagacacacaagttgatccaggactacagagaaatgaagatgatggataatgtcaacaaaagtgctggaaaatggaccatctggtgtaggcttgctttaaaaagaatgtgaaggttgctgttcagaaaatagatatattgagggccaggcaacctggatgctgttgaagaatttgtgcagagggtacaaagcagggagagtgtagaaagacaggaagtgctatttggagaataagatgatcaaatataaggtgtcagtaataaaactcttctataggatatgatggctctcggtgtgaccacattggcagtgatggtgaacagacagtaatagattcaaggtgaaggtcattggagccaaatgttgcaaggaacacgaggccagactaaggatggaggggcagtccaagtagatgtagttcttataatacaaaccctccaaccctggggaactggtgaaactccttgaaagaactcggtgaccttgcaagatgccttctcctggtccttactttttctctaacttttttttctgctgacttttacttctcccactgttctgggccccatgagagtttgcatcgctgctttgtctcagatcttgcacagctgataaccgatggctctcggtctctgtccgcaactgcccaaaggtcagactttcaagtctgcttccatcaagtgcatttctatagcctgatctattgatgttcttctgagttagagcatggctctgtgccatgttagaatccaaggaggtttgctcttatccaaaaagcattctgcacgatgcctgctccagctgttgagggctgctcagggagttgcctccacttggcaacagtgagagaagtgattctgaaagccctggctttttggtaggaaaataacatcttaaagttagagtctccaccaatgggccaaaaaaatgtgtggttactctctcagaatacaattcacccttttcttacctggctacagctgcttagggtttgctatttagtgcatttccacttaggtataggcttacgaagaattttataaacatataagtattcatgcccagagcaagatgtagcacccccagtaacaactgcaagaatcgagggctagactttagacttacactgtccaatacagtaactatcattaatagctacatgtggctatttaaatttaagctagttaaaattaagtaaaattaaagcttcagttcattggttgcattagccacatctcaagtacccaatagccacaagtagctagtggctgacatactggacggcatttccatcatgacagaaaattctattttactacattgctctagaccctaagaaggttggtaagaagaggtcaaggcccatgtttggtttcagagaggttatttggcaggcgtttggggagagaggtaaaggccagggatcctatcataagagatgagcaatgtaatgaagacttagacagaggtataggtcctgaaaacagcgtgggacctatggctgggcttacttactgtggagattctgatctaccgagctagacttctaaaatttccccacatcacttccactggatatagaatgtgggaagtggtataatcccaaggtttccaaactttaatgaacatcataatcagctggggttctaataagcctgcagagtcctgcctgtccccaaggactataggataatgcctgagaatctgcattttgaacaatttcccaggtgacctactggtcttggaccacgcttgagtactactggtgtggcctatgggtggcctcaggtatggagaaaggaacctgtacagggaaccaagtcatctcttctatggcaccaatatttgctcattcttgtgatatagggaagcaatagttttgccttgttctgtgaagttgcccctgttgagtttacagcttttggatctctcatgtctctctcagtgtgtgtttcagcatgaggataaccagttttagctcctaaaagctgaactagaatctctgccagcttatttctctatccctgtccacgtgggggctaaaaacacacctctgttttcctatgatgatgacaataactggtgtcaaaataattcatgttgtgttgttgcatgctgacagcatatctgaatacggtcacttctatgcggatgttggggactaggtagaagatggatgtttgatgaggctgaatatcagaatatcagaatctgaacaaatctgtgttcttttgtggaaggctagagcagcctgggagaaacaaatccacttccaactttcactctataaaaagttccatattttcttagatcagacaaaatatattgagtgccaaaatgctgcagcaatatgcacgcgtcactcagctgggttggaatctgtatgcattgtccccccgggccagttttgattatgttctttttccttttattgtagtcagcaaatctgaatttgctattgtggggagagcaggaagaagagagaaaaaatgaaggtttttaaccttcagacagttcagaggttcagtctgaataagcacaaaaactttcagtgtgcctctgaattccttgaatttgcagaacttctcagaatcccaagagaactaccttgcacataggattcaggccctgctttgtggctaaaaggcaaagctgaaattatgagagagaaacagagttagaaaaagtaggaagaggaatcaatgttttttttcaaaaaaaggaatttggtcccaatccaggctaagtttcagcctattgttcaatttcttcaattcaaagccatctgcttcccrcggctctcagataacgtctcccctgccaggacaccctgttcctgcttaattgaaattagtttccaagaatagttgtccaaagcagtttccaatggtgggaatgttttgaaagtcacaataggagttgaagctttgggatgcagatgttcaaaggcatcacatggtctacaacagccatcatatttccaaagccaggagttctctcattggcctctccaactcacaaatggctcctctgcaactggcaccatctctctatcagggacatgtaatactgcaagtgtgaagggaaacaatcacttccattcaggtttagagcaatgtgtttcccaggcttaattatactgcaggtatataaattacagaaacatgttaatgctcccatgattaaaattatagagtgcctaattgaaaaagcataaactgaattgaagaattcctaattatagtttgctttgaggtgttaatttcctccataacgaatgcataatttcttggaacctaaaaaggtggcctctgcctcagcccataggctccaggcagatggaaaaggtagtcatctttcagttcaggaagctgacacgggaggctctgttcaggtctggaggctgggagagccttagaagggagcttaggaaggaggtggagctggtacagacatcacaccaaggttctactctatttagtaggcatcaggaccaaggcagataaggaacccttattaagcttttccgtcctgcctttgcttttcctctccaaagtctcaaccattttccaagcyggtattttgtgcctgtaagacagtaattctcaaagtttggtcccagatcgaatactgatgtattacctgggacttttttagaaatgcaagtgtttaggctctgtccccagccaactaaatcagaaactctaggagtaaagcccagcaatctgtgttttaacatgtcctccaggagatgctcatgtgtgtacagtctgagaagcccagtcctaaggagtgggtcatacacactcaaagtcacatctaactgagctttgttgagctcctcctctagatcagaacctgagatgagaacctgaggataccaagcatcctttcattgactgtacactcacaatacagccctgaagtagaaaaaataatcccctgttctcagtagagaaaactgagatcctgagaagatggcttgctcagctcatagtatcttaggacctgtagctcttgtaggttctgatgcagactcagatgcattatgttacattttttcattgttgtcatataattttcatcaatagctctgctaagaaatgggttttctgacacattgtaagttggaggtcgaactacagcttggaatgacttccaggtgaggcttgactttgctaatggtgagtctaactgtagagccagggaagggggggcttctaaatatctgtaagcattgctattagtggcatcaattgtgagtatgcattcttcctgaagagtgatgcaaactctaagtatgaaagaccatgccacagctcaaaaagaaactcttcagttttgggaaaaaactccccttgcccagtgactgaagtagctgcgaggccccctattaaggactctggaggccacagaaagttgtctagagtagagatatactacatctcctcctctctttagacatccagtttctctcaggtttctatttcctagtctaaacacatcagggactttgtatgtgtgtgtgcagtcagttttagctaatccacagccatctgaaacaataaactcatgttcttggtttatgaaattttgtcagctttttgcgtaattcttagctatttccatatggttgaaaatttgggtcatttccagttttttttgttataaataaccaagcaatcasaaatttattcatgtttttcttttggtattgtacctttaaatagcaaaaatccccaggaatgcaattactgaaatgaaaaaaattgaactacagtgtactgagtgccttctctaatatgccaggcactgacagccaattcatatacattaacctttttcattctttaattaaaaaatctcaaagtaacaaatacacatagttggaaaatcaaatagcccaaccattcccaacaccaccatttacaaccccccctcccccagtcctgtgcctcagaggcaaatgcattttaattctttgctctttcttctgggaattggcaatgtcactacataatgtgctattttaaagttatcgattgcagacattatctatttatttcctgctatgatagatggtaacttgtctgtcttaaatcatccaatacctcccttccttctttccaatgtagttaagccacagttttttgttaaataactacacaatggccaactttacaattccataaaaacaggtcacttcagagccaaatggtatattacttcttttacagtataatataatatgtaagtattatattattacataattaatttaaagcttgctaagattttaagttctttatgtatattaactcagttgattatcgtcaaaaccctaccaggtagaaactagtrttatccctattttacagatggggaaactgaagtactgaaaggttaactaacttgctcaagatcatgcagctagtagcagccgatatgaaatttgaacataatggtctagccccacagtctggagtgtactactatgttatactacttctaattactcttcttgtgggcttttttgtttaattcgttatagaatgtacaattattctcatttcttcaggcagtttatttattaaactattcatacatttttcctcccacagaactccatcattttaggtttgcctttaaatactctttttccccttttcttttctgccaatttcttctatttcctaaaacaaaacagaacaactccctcaaaaaaattctcawatttgtttataattttggcagtcataatttttcattttgagctacttactgttctttgaattttttttcttataacattcacttcttatttatagaagtaatcatttctcaaacatctcaggatatkattttgattttggagaagggggaagcttttctgactcctgtattatctctgtttcttctagagtcattttttttaattcactgctctctttcatgttggaagcattgcttacctaaccagtgaacctccatagccaatatttaaaagtaaggtgttgagaaagttgactggaggtgctgtgcttttggaggcggaggcattcaaattctgaaatgaaatcctcttcctatctcctgcctaaggggtagagggcagacacatagctctccatgttcaaaggtttgatggttttgtgtacagacttttgataaacaccccttttcagccccacattttacttccacactgtccacacttgactactccaacatcagaatctctcttgaaatctgtggggcaaataaaatccattcttactcacatgtctttgcaatttgactttctttatctcatcacatgtggtacctctcctctgaccatttttaggtttccagaattttcttaaaactgctcatccactgatgtcccctctcctgtcctctttttccttgtggatttctatgctttttcacatttcactgcaataacagtgaggagatagaagaggtaaatggagtacattaattcttccgcttttaactagaagttcacttacattattgtctattgcagttctcaaataacaaatgatggaggcattattatcgtattcagttcttataaatgctatcatttaaataaattaaggaagatcacataaccagtgagattcagagctaaaattcaagtttaatgctgattcctgagcctatgctctttttacttccaggtcataaaaacatttatgtcttgaaaaccattgccagattattttccccaatttgatgaatcaattaaaaatgctactggaattgtagaatcctaccagttcaaccacagcttcactgaaatggcttgttataatttatgcttacttttactaatttaatgcatttaaatgggaacatattgtcattttgatttgcatgtcttggcttactggcaaggcagaatatttttctaggtatttttatgctattaacatttcttttttgtgaattttctttttacatccttttcctaattacctatggcagtggttctcaaccagcgttaatttgtcccttaagagatatctggcaatgtcaggacatatttttgtttattacaagtcggaggtgatactggcatctagttagtgagtgggggtcagggatcctgctgaacatcccacaatgcacagcacagccagccccctacaacgaagacttatccagcccaaaatgtcagtagtgccaagattgagaaactctgaaccatgggggtcttaatagacttttttttaaaaaaatgtatgattcacaggttcttgatcttttaaatttgaagacccctttacactcttaaaaattaatgaaggcatcaaagaacttttgtttatgtgggttttgtctatcaatgtttactgtattagaaattaaagccaaattcaagccgggcatggtggcttatgcctgtaatcccagcactttgtgaagccaaggtgggcgggtcacttgaggtcaggagatcaagaccagcctggccaacatggtgaaaacccatctgtactaaaaatacaaacattagccaggtgtggtggtgcatgcctgtagttccagctactcagcaggctgaggcagaagaatctagcttgaacgcaggaggcagagattgctctgagccgagattgcacccctgcactgtagcctgggtgacaaagcgagactccatctcaagaaaaggaattaaagccacatgttaacaaatatttaaattcatttaaaaacaatactaagcctggctgggcgcagtggttcacgcctctaatcccagcactttgggagggcgaggtgggtggatcacgaggtcaggagattgagaccattctggccaacatggtgaaaccccgtctccactaaaaatacaaaaattagatgggcatggtggcacctgtgcctgtagtcccagctactcgggaggctgaggcaggagaattgcttgaaccagggagtcagaggttacagtgagccgagatcacaccactgcattccagcctggtaacagagcgagactccatctcaaaaaaactaagcctatacatattaatataaataatatatttttatttccccaaataataaagttagggtgaagagatacagtttcacattttgcaaatcttttttaatgcctagcttagtagaagataattggattatcatatctgtttctgtgtttaatctgtcctcatgaattgttttggttgaaataaagaaaatccagtatcacatagatacataattgggaaaaaaaaggaggaatattttaatagccatttaagatcattgtgggtattctcctctcatatgacaccaaaactcagagtggtggtttcctaaagtttagttgcaatgaaatatcagtaaactttttatactcttttacgttaaaatttatatctgtcttgcacttgagtgcattctttgccttacatgattttgcaacgttatgcattggtcatttgaaaaatattcatggatttattttaaaaattccaaatgtttatatatcttgttgtaccatatcaaaatattacatttgctactgtcaccaccaatttcatcattaaaatttttaattattgaagatctttacagttcacagtggcagatacaagttttccaaattctagttttcacttgaaagctgccttatgtctttgacaacaaatactgtcagttttctttacagtgacagagagacttcgtttattctcaaaaaaaaaaaatgttttccacatatacaaatctgaatgaccacagttcgttagtcattctttcaagaattaacaaaaaggtacctcatgaaaaatgtggctagtttagcattcagttcaagcaatcacagaaatattcttttctggccgggcgcagtggctcacacctgtaatcccagcactttgggaagcccaggtgggagaatcaccaggtcaggaaattgagaccatcctggctaacacggtaaaaccctgtctctactaaaaatacaaaaaaattagccaggcgtggtggtgggcacctgtagtctcagctactcgggaggctgaggcaggagaatggcgtgaacccaggaggcagagcttgcagtgagccgagattacgccactgcactccagcctgggtgacagagtgagactccatctcaaaaacaagaaaaaaaatgtttttttcttgaagaaatcatagtacctgaacaagcaggagacatgatttgtgtatactgcccattgtatcacatgaatgtgaaaaagacatggactcaagggttgagatttaataaaattaatgctttttactgcttcatcgaggaccttcttaagtgaaactggcatttttgcttttatagcaagtatgaggtggtgaagaatataatgacaagtacagttgggtaccactgccttgagttctcctgaggcaccagcagtattgcctacctttccagggtcaatattaacaaagtggaaaaaggcaaatgaagtcttagtattactattacaattatgtcagtgttacagaatcattgaatgggtctgaagaactcccaaaggacatctctggaatttggtatatataagaatatcacggtgaacctgttcaaaatttgcattcccaagcctcacactcagaggtctatcatgggaatccagaattcacaggcaattctgttgttggatggatgagaacctccaattctctgtgcatacacgattttcacctcattgcacttctgcaatcctcaacagtaggttacgtcttcccataagaagaatatttcaactggtgttataatttttctcttgcatttrtttgccctatctggcaaataagtatgcctgctattacgattaatttaatgcttaattagtaattattccatttacatttttagagcttagaagggctttttgaagataattgatttcagatggtattatatttaaaaaaaaaaaactgttcagagagatttcacctgatactttcctttccttaagcaaatgtctttgttgcaaggggagacatccaggcgccctactgattactcttttaaaaacaataacatcttcctctgtaaaagcattgctgtgggttctaatcgccaagttaggagctgaatccccatggaagctagtcttgtttaacttgattttttttatttgctcctctcaccatgtaaggtaactttagaaaacgacatttcaactgagaacttgacaggagtataaagggggttgcttcccaggatgtctgaggtttgagaggcccggggtaaagaaaacagcctggctctccactagggtacagaaaatgattcagaatgtatattagaaaacaaaacaaaacaaaaaccagcaagctttccagtcccctaatgtgttctgtttcacattactgcttttcaaaatttaatgtgcaaatgaaataagttgggacctcttaaagtacacattctaatttaatagagctgaggtggggcctgggactctgcatttccaacacatttctttttaggtgatgaagatgctactggtctgtgactacacaggagcagggcccctgcagcattctgcttgttcttgcttctgttggttagcactgtttgctttgaatgctctatttgttaagtataacaataayaaaaaacaagtttattatttgtagagatggggtctcactatgttgcccaggctggagagcagtggcgtgatcatagctcactgcagcatcaaacttgatccttccaaagcagtgggatcacaggcatgagacactgtgcctggcctacatagactacatagacttgcttaaagttattgtttaattgagttattaacataagctaatagagctgttggctagtggatattttaattattttttatttattttatttttttgagatggagtctcattctgtcacccaggctggagtgcagtggcgtgatcctggctcactgtaacctctgcctcccatgttcaattgattatcctgcctcascctcccaagcagctgggactgcagacatgtgcccctaccacgcccagctaatttttttgtatttttaatggagatggagtttcacgatgttggcgaggctagtgttgaactcccgatctcaggtgatccgcccacctcagcctcccaaagtgctgggattacaggcatgagccaccgctcccagccagttattttaagctgagtcaaatatcttttatacattactggattcttgactgattgaaattatacttttcaacatgtacttagaaaatagcacttctggagtcaagtagggatgggatctatttcgtaaacattgaatagtcaacaatgcccagctgggtagagagtattaggcatagattatgccatgtcgttcatgtggataaatccatccatcaattaaaaatatgatactacagctrttttgtaacatattaaattaaaaaaatattttcaaagtattttcatattcctatctttgatccttatcacaatactaaggtaattcatacaatgttwtcattttattttaaatgatgtttaagttagagtcaccacaaaataatgcatgcttatatagaaatgataggaaaatttttaaaatactgacatttgggaaattttccctatttttagtcaccaaattaaaaaaaataggctttatgtaaggttgatcctccctgataatgttgcatccttcttttgccacatatcatgatagctattaccattttaatgatgtttggggagtatttattcttttgtttctccaagtagttgacagatttcctccacaccgtttattgaatactccttccagtcttactgaacggtgatgttgcctgtgtgtgtgtgtgtgtgtgtgtgtrtgtgtgtgtgtgtgtgtgtgtgtgtgccactatattcttggtttatactgttccattagatctgcctctctgttggtcactgtgtctgtatcacccattttaatatagctttacaaaacattttaatatctagtcttcctatttcttgttgttcaaaatgttcttggctatttttacccacttatgtttccctatgaatttttaaatccctttatcatattctctaaacaatccccaatggaattggtctaaattatattaagactattgcttaatctaaaatgactatatgtattaacgtgagcttttccacactgaaagagggcaagcctatctattcatctgagtcttgactatttctcaggacgtaggcattgactctcatgtagactccatccatagctaccttgttaaaattgttttactaacattaagcttgtggtgtcttctgctatctgtcccctattgtgtttgctaactggtttttgctggtatttagggaaactgtgtgagagagtgtgtgtgtggtgtgtgtgttttcttcatctcattcactgaaacctcttgtgagtttctttaattaagttttattatcttggtttaccagctaataatcacaccatctatgaatamtgataattttatgtcctcctattacagttgcaatagctcttgttttggttttatgttttgttgctttgggtagagctttccgggcaacgttgccaaataatattaatagctgaactttttgtctaaattccaacctcaaacactagacctccagcaaatttctcttacgtataatgttagttgtagatttgaaataggtattttgaaatctgaaaaggaaaactatttatattctatagtttatctttatgactcttttaaaatgagtgattttatcaagtgcctttttggtatctacttatatgatcgtacttttcttttttctacttggatttatttatgtgatattttcctagattttctattactaaatctgtcttgtgtacctgcagtaaatgatccacttatggagcaccaatttaatagtatgttagaggaatagtttgtaacaatttgagatgcttttcctctttttctgtctgatgtaattgtttctatgacatgggaattatccattcctggaagattgaaagaactcattggaaaagccatctggctctagtgttgtttattctaattttctctttatggaatgcttaattaatttattgtcattcttttttgtttagtaacaaaggcttttcagatgctgaaaacaggtttggtcctgtcccataagcattaaacattattgttctcacagtaatagtttctaaagagcaggaaattgtggctttgattttctatttgatatgagaattacttataaggcatcatataaggtaagttcctattttccccagttggaggttttcatttgtgcagaattttgatttagcaatttctggttctatcccattatatatacagaatatagactatacctttattcagataatttattgatttttatgtgtgtcctttgtcatttttatccgctgtacctgatatgatttttaaaatattaaaatattgcttccttctctgtcatattttctgggaatagcttttctaattggttgttttattttttattctgttttcagacatttcagatttacatatagacaaatctgtcatttttcttttgwcttttgtaaattgttctattattaagcttaaacaattcttttccactcaagattatctttttctttgatttcaaacctacaggatattgcaagaatgagacaataaccatccacatatccttcccatagatttgccagtcataagcattttgccatatttagtttctctctctttctcttgtctctcaaatggttattcaaccatttgagggttacttgtagtgaccatgacgcttcaaaacctttagtttgtatctcctatggaaaggtcagtctgttacatagccacaaaacaatcatcacgctcaggaaatttcaaagtgacataatgctggtatctaatatataggtcacattcaaatttccccaattctcccaattaattgtcctttaaagctttttaaaattcaatccaggatccaatcaaggatcacacattgtatttggttggcaagggcatactaaaatttttcagtaaataaattaattctgaactattggaatataatgtggtttttcataygtagcgaggtcttaaatttgatgatttcatctcataattatggaatttctgaaacactaagtgataaaattttctttttcattaatttatgttgcgtgtaattttatacrtaaaattatatgtttctctctctctgtcatacacacacacacacacacacacacacacacacccctacctagtccatttttatttaactcatactctagtacccatggtttaatcattgtaacttcataatataacttaatatccagtagtggtttttcagcctcattcctttgttgtttttttttttttaagttcttaaccatatttcccatttgaacaaaacaaatcttactggaattgtcaaattatggccatccacatctttagggctcacaaatatcacctaactggctcatattttatacaatttgctttttctcaaagaaaacaatacatcaatttggcaagaattgacatttttacaatatatgatgctttcctccaggatttcagcctttctgtccatttattcatcttcagttcagcacaattatttaacacccactctaccaagccgtgtgctaggggctggagatagtcttttaaatcattcagtagagttttattttccttccaatgtcagtcctatacgtttcttatttgtgttttccttagctatttttaaaggactctattctaaaaggctttttcattacatcttctagcttgttttccatggtgtacagtgtatttatttccatcttctacaaaactactttactgaattcttttattaattttaacagtctttcagttgatttgcttcaatatattaggtctagtcatgttatctgcaaatgacgatgaattgctttcctttctaaaatgtgtatctcttctgttttgtgtcttattgcattggtcacaattattccattttagaggcaagttctagaggtaaagtgactttctcagcatggcagacagagcagcgagtgtgaagccagtactaaaacctccaccttgctttagcaaaggtccccatatcaaggttatctacccaaatattgcctaactggccccatattgatccagccgctttttcccaaaggaaggttgacatttgcagtgcttacagttctctcttaaaaggacctaatctgttaggtgtggtaggtaaaaattaagagggaaagtgtaattggctatattgtggatttcggttgctattttaaataaagtggtcaggacagacttccctggcagaggtgaaaaagtaagccttccttaggttgcctatctccaagggaagaccattcaaggaaggggatagcgagagcaagggccttgaaatgggagcgtgtgtggggtgttcagggaacagcaaagaggccagtgtaactggagaagaattagaagagtaagatcagagagttcttaagagtgagtcttgtagacattgtaaagatgttgcattttactctaagtaaggtcagagccataagggggctttgagcagaggggagtcttgagctgagtcatgtttttaaggagtcattctagccactgttttgagaataaattttgggggcaaaagtgaaagcagggagaccagttgggaggctattacaataatccagttaagagatgatggaagcttagttcagagctgtaactatgaagatgctgagaagcagtcagattctcaatatacagtatattgaaactgaagccatgggaattgcttatggactgaatctatggtattttgaaagagagaagagccatgattgagggaaaacttatttggatgcttcaactggattttcatgattcctttacccaacatattttcttcctctaaatttctacacaaaattcactttcattaaatgtatcaaatgcaattcaatcataggagaagggcccaaataagaaacaaagccactctttggtgtctaattcagtaatattgtaataataatgcatgcagcaattgtgaaggctccagccaactttcatagagcactttctagaatgcacttcctagacatgtaatttcagtctttgcactgccctgtaggttcctyccttcccagaatccttccctggcagagttcttgctgccctcacttcattggattatagtgaacagttcattatttctccactctgagctctaagcacccagtacccagtggccaggttgcattcaaatttgaacctgctatgtttactttattgagctatcatcacccaataaatgtctgatgaataaatgtataaaagacagacagataggacaataggtcgccgaactagtcagaggcaaagcaaagatgcacgtgcactaattctgacactaatctgccraatgtacacctcctcccattttcttgtctcctctgcgagctattttgactaggcaaatagtgagtaaaaacaggaattcccagagtcttggaagaaaggttggctaactaagacatatcattgtaaatttcagctccatagttctgagtgacctttaagcagggaatgtaattgcaaagctagattctgttgggcattacaaagctcacacttgtttcttagcccatcttatcctataaaaccaatggtttatcatagcattttgtattaaaatttgtgcatacttaaatgccaaagcatagacttttgaagtgtgaaaggacattgaagattattcagtctgtttctcttaacagctttattgaggtataatttacataccataaatttacctatgttaagtgtacaattctttagtaaatgtataggatcgtgcaactatcaccacagtcccattttagaatattttcatcacaccataaaatcccctatgcccatgtacaattgattcctatttccacttccagtcccaggcaattgctaatctgatttctgtctctatggccttgccttttctccataacttaataaatacgaatrgaatcatacaatatgtagtcttctacgtcttatttctctcatttagcataatgttttggagcttcatgctgcagattgtagcagtagtttatttcttttgttactgaataatattctattgcatagatataccacatattgtttacccattcaccaattggttgataaacatttggatggtttttatgttttggcgattataaataatgcttctatgaacagtttaattcaagtttttgtgtggaaatgtcttatttcttttggatagataggtagaaatggaataactagatgaatggtacttttatgtttacctttttaaggaactaccagactgtgtctcagagtgactgtaccattttacctttccaacagcaatgtatgatggttccagtttttccacattctttcaaacactggttgtctgtcttttgtctgatggccgttataatgggtgtgtgtgatagtttctcattgttgctgtaatttatattttcttttttttatttttattttattttattattattacactttaagttttagggtacatgtacacaatgtgcaggttagttacatatgtatacatgtgccatgctggtgtgctgtacccattaactcgtcatttagcattaggtgtatctcctaatgctatccctcccctctccccctaccccacaacagtccccagagtgtgatgttccccttcctgtgtccatgtattctcattggttcaattcccacctatgggtgagaacatgcggtgtttggttttttgtccttgcgatagtttgctgagaatgatggtttccagcttcatccatgtccctacaaaggacatgaactcatccattttttatggctgcatagtattccatggtgtatatgtgccacattttcttaatccagtctatcattgttggacatttgggttggttccgagtctttgctattgtgaatagtgccgcaataaacatatgtgtgcatgtgtctttatagcagcatgatttataatcctttgggtatatacccagtaatgggatggctgggtcaaatggtatttctagttctagatccctgaggaatcgccacagtgacttctacaatggttgaactggattacagtcccaccaacagtgtaaaagtgttcctatttctccacatcctctccagcacctgttgtttcctgactttttaatgactgccattttaactggtgtgagatggtatctcattgtggttttgatttgcatttctctgatggccagtgatggtgagcattttttcatgtgttttttggctgcataaatgtcttcttttgagaagtgtctgttcatgtccttcgcccactttttgatggggttgttagtttttttcttgtaaatttgtttgagttcattgtagattctggatattagccctttgtcagatgagtaggctgcmaaaattttctcccattttgtaggttgcctgttcactgtgatggtagtttcttttgctgtgcagaagctctttagtttaattagatcccatttgccaattttggcttttgttgccattgctttggtgttttagacatgaagtccttgcccatgcctatgtcctgaatggtaatgcctaggttttcttctaggttttttatggttttaggtctaacatttaagtctttaatccatcttgaactgatttttgtataaggtgtaaggaagggatccagtttcagctttctacatatggctagccagtttacccagcaccatttattagagagggaatcctttccccattgcttgtttttctcaggtttgtcaaagatcagacagttgtagatatgcggcgttatttctgagggctctgttctgttccattgatctatatctctgttttggtaccagtaccatgctgttttggttactgtagccttgtagtatagtttgaagtcaggtagggtgatgcctccagctttgttcttttggcttaggattgacttggtgatgcgggctcttttttggttccatatgaactttaaagtagttttttccaattctgtgaagaaagtcattggtaacttgatggggatggcattgaatctataaattaccttgggcagtatggccattttcacgatattgattcttcctacccatgagcatggaatgttcttccatttgtttgtatcggagtcttaacatttgttgaaatgttcttccatttatttgagacagagtcttgctctgttacccaggctggagtgcagtggcgtgatctcggctaactgcagctctgccttccgggttcacggcattctcctgcctccgcctcctaagaagctgggactacaggcgcccaccactgcgcctggctaattttttttgtatttttagtagagacggggtttcaccgtggtctcgatctcctgacctcatgatccacccgccttggcctcccaaagtgctgggattacaggcgtgagccaccgcgctcgaccttaaattcttttttttaagaaatacctattgaaaaaccattatgtgtctagtatggtattagaagcaatgaattagatgacaagatctcagacctcatgaagttggcagcctatttgggggcaagcagtaaagccagtaaacaaataattaaataagacatgtttcaattatgataaaagctgtggaagaaataaatcaggagatgtggtgtacaacgactcagaatactggtaattatgtattaatgctttggtgaaattggaatgactcaaatcagtgtgtcttccaagggagtgagaatactggaggggaatgcccctgttggctatacaggtataaatatcagaataaacataagggcaagcgtataaacatcagaatcacctaggtttatgattttgtagctgcacatttaactatctagagagcttttctaaaaagtactgatgctagggtcctacccctagagattctgattcagctgatctgtagtagagccaaggaataagcattctgaaagccctctgggtaattataatatgcagccacaagttgagaactattgatcttgagcaaccctccattgagattctgagatgactgttcactrccctcacttgaagaatcagtgatggagaagccactatgattggtgagagattaccgtatctctcagatgaggagtgctggaaacaaagtttgaaaattaccttgataaaataggtctctgatcctttcacaagtctcatatggtcattgtccaaagctgccctgtcagagccactcttgctggcctcccagacactgtcacctccccttttctgctgtgtgtccgtctcccagcttccatgtgctttgatgtaaatggcttccaggtgtgacctgctgtgggatgttgccattaagatgccagagccgccttgtctgaccctcacacaaagttaggagtgccttagagtttatgtctctctggtgcagacatagccaataactgaccagcactggaggttcaaaagcctttggtttgagatgagacaaatgctgggggtataatttatgctccagagckccctatgagatcaggctaagactgggactttgcctgatatcacacccttgctccacttcctcccattttctctcactcctttactagtttcttctgggactacttcctcaatacatcatttgcagtgaaactttggctcagggtctgtttctggaagaacctgaactcagacatgcctccttctgggagaacgtggactaaaatatgcatctttctgaagttgggcaatctgtacctgtgagctaaagcatacactccatctgtcacctgacttcaactttctgaaaggatacacctcctagctagaaacttttctagatatagaaagagggccacaggaactgttactgatggaaggaggctctgataggtccctggtccccctcagtggaatctggtccgagaatctcaagccaccatttaaaccattagcttagggtccagagggaggaagatggtcaagcagcaggcttttccaaagcctatggagaggttctgagggtttttgccttggatggacagcaggagatactgaaagtaagagtacaaactctccttgaccttacagaagtcaccttagagtgaatgaaattagttgggggcacagtataactcttagatccttgcaataagagatccttggcataagtaatgaaaaaacaggtcataaatgcccatcttctcattggaagaaacagagagggtgtcacaagaggagaaaatgtatgagtaaatgctatgtgctgtgtggtgagtgtcttaggttattcttctctcatgttattgggatttttcctactaaaaaaatcctttctctttaaaaatgattctgaatagattattgcaaccactgtttttgagctggagatatgaccccaaaagggaggtcattcacatttggatatgattttatcattaccagcaagctgaaaagaacatgctcttagataaatgtattctcaagagaatgagaatgaagctattgcaagaaatacaaataatacccaatttcttgtttctttcccccaccctttcctaaaaagtgtcaggaaaggaaagttatacaacttgtgagtgctgtttcttctctccacctcttcaatcagagttctgtggtctttgagagaggctgaatccactggcaaacagatttatctaacaaaatgatttaaatttttctggctgcattgcaggtttgcttttgaatggacaggctgtgaatgcatgggcctgaaggagttgctgggtatattttggcacaataatcacaatcgtatgtgaaccatatgttgactgcacagtttaaaccaaaaaaaaataccctttgctattctttgtaatttcatatggagttggttgggatagagctaagcagtttaggatgccaagttaaaaaaaaatgcttggaagcccctttatacgttttattggtttgtaggaagagaagaaaatagaaaaaaaaaaaaaaaggaaggatactgagctatgaatgaaaagtctgggtttctacttttgctgcagtttgaccctcatgaatcacttgacctctcggcctcagcctcctcatgtgtaatctggcttttgagcttggttgaattgacaagtggatcttcagtaatcagattggtggggagaaagagctgatggggatatacaggctgaccctcacagagatattatggctgtgtctaatagtccttggcagcatttgaatgttcagagcccagtgagaacccatcttcttgcttggccacaactatggaatcttatgctagttgtggacagtaaatgaggacagccatgtggttcctcttgatccatcccatcacgggagggccagagacagtaggaactgattcttggagggggattcagtcccagggaagctcccaaggcttcgggggtctcaatttagaggggaaagatgacagaaggatttaaggtagaatgggaagtctgtctgagaaagcaagacaaaggccttgttatgtagatgtgatcaattcaagcggtgattagggataggctggccctcagaagaaagcagggactcccagctctttccaactcctggtcctggggatgaggctattggttccttctaatctgctgaagaggatatgaggactgctttggttgcatgctcccaaatccaatgcagtgttcttaggtctgttgttagcttcagcaggagagcccaagaggttgtctgcttcatgaagctcttttgtgtttgccctttccctcacagatcagagtcccacaagtaatggaccctcaactggtcgagctactattagcattcaagccagattcaaagatttacctgaatatattgttatttataaagcagtgcaggtcctgaaaactctgttacaaacacccctccacttctgccctgcaacctctaggtttgggtattaggtccttgtgctatttttcagtgactgctttgagcttagctgtcctgataaacataggaattgtacagttgagaaggaccccagagttgaggaggaagtgattattgaaatcataatttaatttaaacgtttattgacttcaacaggcattatgaacatgcatagatggtgcacacccacacacaaactttggattgttaacaccttctcagatgttacacacacttatttagaagtctaaacactcaggttagccacgttcatctgaatgttatatttactcatttggagttagatgcccaggtaatacagatcctcacttggaaatggtacaccctcagatgtagtgtgcatttcttgagagattgtccacatccactcgcatgtcactcacatgcactctgaactgtcaggttcttactcagatgtgtatgtacaacaggcatggtcattgagctgctgtttacctgcactcatctaagtgtggcatatactcatatgcccagcgcttccttttcgcatgcctgaaaattcctatgctcaagaaaattcaggggaaaacttgccatattgagtgtgtcacattttcttagggcagttctccatagccttttttccttaatgaaatagtcctgtgtctctgtcatctcccaagttgtactccttaatcaagtgtctttagatggatagtctgattgaaggatggtagcctgcaacacgtttcatttttgataaaccacatgctggttcactatgccctgtttaaatgattggtttggggtcccctactgcaaccacctcattaattcacagaagtctccagtgggtactctttgggcaatcgatcttctgttttagatcatgagtcccagagatctgtgcaataaagctcttctaaaagaagagcatttattccagagaactataaactgtggggcattcaaagagattgaaaaatgttctccaacttacaaaccttaaaagaacttttacaaagagagtctaacattgggtatcagttgatattcaataaaggatcagtcatctctattcacacactagcatcttcttacatccttctaacttgaagggaacaatatgagatcactagacaggaactcaaggcaatcgctgtttatccgattagggtttctgcatccaggcagatttggtttcatgtttgctttcaattttaattcaatccaatttaattcatttgaacaagcattcattgatcacttgttgggtgacaggcatcctgctgggcagtatggggtgggggtggagaatgaggcagagataagtaagcracaatgcctactttgtaaaaggtcacaatctagccagtgaaagagtagtcccatctcatgatattggaaaacaaagcagatggagattagatgagctctaggggaactaaagagggaggtaattcatccagactggacatatctggacaggcttcatagaggaagtgaaagacatgctcagcctttggaggaaaccagaggtggccaggatgcagggcattgcaggtagaggaagcataagtcagtaatgcatgaggtgagatccaaaagatgtctgtgcaatagcatggggtctggagtagctggaagatgggaacaccatgagaagaccttctaaatggaagacagaaggcaggcacagaggacttcaaatgccaagattaggagttcagattgtataatttggacaatggaaggcctatgaaagtgtttgaagagctatatgattaggaagccatatgattaggatgagtgattaataaatcaagtgccttagaggcaaagagactagttgaatctgggtaagtgggaaagtgtccaaccaaggcattatcagtggaaggagaaaagagaggtggggcagatgcaaacctgcagaagccaaatcaacagacttctgtaaggctgttgattaggatgaggagtgagaacgaaggagttaagaactgaggatgagccctagattcagattctggccacttgtcagatgctgcwaccatttactaagaaaggaaatgtagaaggaggagcagacaggtttgtaggggttggggctaagttgagttttagatgtgtctagtgtgagctggctctgagacagctaagtrgaggtaaagttctacaacgtggtaggtttgaaaatctgatgctcaggactggagttttgttgtagaccgaaccaatgcttccacataggagaagttgggttgacaccattagagctaacaagctcattcttccagaaagttgctcaaccatctrtgtctcctctttcctgtccagtgtttatcagctggttgtcaaggaggagcgacttcagaagtcacggagggcagctgacattattgagtgcttttcggtgcccgtgagctatcggaatgcctccagcctcgattctctacactactttgctgctgagttgaagcctgccaacctgcctgtcacccagccatttacagtgggtgacaataagacatacaatggctactggaaccctcctctctctcccctgaaaagctacagcatctacttccaggcactcagcaaagccaatggagtaagtatggccacatggaggccattccttgccttgtttgcattttttcattctcaaatgataagtcagcagggctctagagcagaggatgaaaaactaaggcccgtggggcaaatcctacctcatgcctttaaattaaaaaaataatagtacagctatgcctgttcatttacatactgtctatggctgttttgatgcttaacagtaaagttgaacagttgtaacagagactatatgctccacaaagcctaagatatttattatatggctttttacataaaacctttgcacactcctgtattaaagtaaagagatggtgctttacttgaggaaattacatgacctctctgatccttaagttcttcatatataataataatatctatcaatttgctatctaggaatgcactaatcatggtttagttgattagtgattaatacgccctttttcattgccattggtcacattagaaaatagtgtttctccaaaaacaaggtaaccatttttttttttttttttttttttttttttgagacggagcctcgctctgtcgcccaggccggactgcggactgcagtggcgcaatctcggctcactgcaagctccgcttcccgggttcacgcaaggtaaccatttttgtgtcaaatatttctttggtcraggattggcaccagtcataatattagaaaatcacagggctggaaagcatatcaaaggtcattcaacaatctcaaacacacacaaaacaatggttctatccatactacaacaccaattaactggcattagtgcttattcttgaatacctccaatgacagagaactcatttatctctgaggtagctttactgttttctggagtagggagtgggctgtgtctctaaggaggctttttaatgtacttactgaaatatttcctattgaagtttctatccattgttcttgattcacactcttagcatcctacaaaaccaatgcaaccaccttcttggtttatagtctttcagttacataagatcttttctaacacccttttcttctctatataaatgtgcccataagattgtcttttctgcaagctaaatatctttagcctgttttattacacaagtttgtattttccatcaaggtggtcatattttcatatttcttttcttttcttttcttttctttctttttttttttttttttttgacacagtctcactctgttgcccaggctggagtgcagtggtgcgatcttggctcactgcaagctccacctcccaggttcacgctcttctcctgcctcagcctcccgagtagctgggactacaggtgcccaccaccacacccagctaatttttttgtatttttggtagagacggggttttaccgtgttagccaggatggtctcggtctcctgacctcgtgatctgcccacctcagcctcccaaagtgctgggattacaggcgtgagccaccgtgcccagccccaaagtggtcatatttcttttaacaaacaccaacaaatgctaagcccwacagttcatattaagtttatgtagtatgtaccctccaagagcttatagaaatgtaagggagtctgtcatgtgccttgttatgcagtgtataacatggagaactgagaagcttgctggagaagggaagcctgagacagaagcaagatttggtgaagtgtgtggggaacagcctgggcaggctctgggtggccaagattgagagtttaatctgtcaatggcagtcagtgcttggtgagaaacccggattgaggaactaattaacatttagaatgtccacatacccatttaaattccactgtggtatttcagttctgcatttattactggttcaagcaacactcctcacagagagcataagactacaaagagaagctgccagactgccttccacctgtccatctggtcttcccgctgcatgaagcactctgatgtattgagcaggaagacataaaaattggcagaagcatctgggactcatcttgttctcggttctcggcatcccacactggccagtttatcagttcagcacaaccctctaagaaggtgtggctttccctgctcttggcacatatcaaaagttgtggttgggtttccatgatgagatgggaaagaagtagctttactttattcttcccactaagatactcagaaaacctagaaatagagcatggctatagaaccygggaaaccaacaaatgcacatcagaaggaatgtcctcaccataagagtggttggccctgagccaaccacagaggttttgttacaggaaaggggtcctgatccagactccaagagagggttcttggatctcgtgtgagaaagaattcagggtaagtccgtatagtgaagtgaaagcaagtttattaagaaggtaaatgaacaaaagaatggctacttcatagacagagcatccctgagggctgctgtttgtccatttttatggctattccttgatatgctaaacaagggtggattattcatgcctcccctttttagaccatatagggtaacttcctgacattgccatggcatttgtaaactgtcctgatgatggtgggagtgtagcagtgaggtctaccagaggtcactctcatggccatcttagttttggtggattttagccagcttctttactgtaagctgtttttatagcaaggtctttgtggcctgtatcttgtaccgacttcctatctcatcctgtgagttagaatgccttaaccatctgggaatgcatctcagtaggtctcagcctcattttacccaggtcctatttaagatggagttgctcaggttcaaatgcctccgacagtttgctccccaaacatcatatcagagacctccctcttcaagactcagggatttgccatagaggaaaaaaaaaaaaaaaaaaaaggatctcactctgaaactgcctcatctcagaagcagttttgacactgcttcagaaatgaacaaggccatttaattacctgtgccttctattccacaccatgcatatgtactcttgctttgtaactaagattcccagtaacgaaacacaggcaggaatggaattggatgagtgcttatgccacrtgtcttgcgggtgcacttgacctcacaggaacagacaggggaaaagcaatgggagctgggcrctcagaaggctgtacttttctggcaaaggaaaaactacacactgtttcaaatgactgtctttagtattaaattttactgagaagagttgggtgaaagggtcattgaagcagaacagccattctcagtctaacaaatctctgcctggtccctctcaaatttttccatatcataaagggcagcagacaatgatgttaagcctggaggatttttgaggagaaagtgttataatccacaaattctttatcagccaagttgttgttcgtgtgcaaatacatcagaaagccattctcggtatccaggggctcccacgttccctgcttctaataaatcattcacagagcaattgactgagcaattaatcaaaataaagaaatcaagaattgagaaatgtggaatacgaagacctacagtgagcataaaactaattaaacatagcattaatgctcaataatggctctaagtgtgttacaaaatggaaggttaatgtaaaatgtaactacttaaggcaaagatgcataatgtaaaaacttaacagttctaatctggatctataattcactattttatcaacaaaaactaagacaaagttggaagatggatgaatgtaaataaaaatctgctcattttctcatgttagacaagagggaatacataattactgttttatttctgatactgagaatactaaaaagtatagttcttttaaacaaagtcagctctccaatctatacttaaaaagctgagaaacaacagtcaacgaagaaaaatgaagaaaataaagaaaactataagtaaacatgaaaatcaaaactataaaaaaagccagaagatgaaagcactagatttgatatggggtggcgggggggtaaaaaagtgttgttttgctccattgtgaaagagaaagaaaacagcttaggtcaaagaaaaatcagaattacccatatttctgtcactaaaagattaaagacaaaggatgagatagagttatattaacctcaagtgaaaggaaagcagaaatgggcatttgttgcaggatggttgtgagccaggtggaataatttactatcagcaaatttcattgctccctactctacctgcaagttttagtcaaggaagggtaggagaattctgaggtctggacatctttgttctacggatgttaaggatggtttgtcaggttaacagagtggctatgaattcaacctttactatcagactgcctaggtacaaaaccctagtagctgtgtgactttcagtaaactactaaaataattagatatgatggattaattaaggaaacatctgtcaagcacatgcaatatgtcaaaaaaggcatttttctgagtgctgagaatgcagcagtgagtcaagcaaagatccctgatctcatcgtgttttcattctagtgggggagagaacaaaaataaataagtgaaataatgtatcgaataatgaatccttaggtttcacattaggaatgtggaagtcagtcattaaatgtttactattatcagcatgaggataaagacattttatagactctttgttgatctgtgaatatgaagtattttaatccagccatgtgaacaccatgcagagttcaagtgtggcatgcactataagatatgttgctcagggttcttgcaggcattttcatgacacaagagttgttcacaggcacttgtgttgggaattttgttccaattagtaatctcacatttatccattgatgccttcttacagataaaaatgtagtcccatttgtcctggcacactgtctttggtgcctaattcacaacacctgtctcttatgaattagaccatgttgtaaccatttgttttggatatagcaatattatagaactatagcatcatagagtaggaaggactttgaagtgtcatctagtctagacgagaagccaaaaaaaaaatctccaataaagcattcttagcaacacattgtattgcttcagcttgatcaatgcaaattgctggagtgaaagggagttgattcctttgtggagcaggtaaaattgttaaagcttttttcccatatagagctaaattctgtctccttgactctccccttgtagccacttgtattggtttgaacaaatcaaaacgttctttcctttgttagcctttcagagaaaataagacagtaccaactaccctcctctggccactcaagttatttctcattgataattaacatgctattacttcttttatttttcacatggcataatttctgggtatccttcatcctacttacccttttctctgataggctcattttccccatcatgttctcctcaaaaagagttgcccagaacctatcactgttcttcagatatggttcagacatgcctgctagattttaactaagcctcgtgtcttgaacctttcctaagacattatttctcaaacattccaacatgtttttcactttggggtcttaattcagggtgcattttacctacatctgtcttttcttcactgtttgcagagctagtaccttctcatttttcaggcctgagtttcaatctcacatctccagagaagagtccaaccatattacctaagaaccacccaccagcactcactcatatgttaacccactatctttctatattacactagatatatatgtattttatttgcacatgttgttgggtactgcatgcctcccacagcatgctgagagctccaagagtgatgaattgtggttggtgtgtttgggttttttgtttttttagctgctatatcctccatgctgagtgtactatttaacacataatagacacctaataatcatttgatggattaatgaaagaatgagactatgaactgtttcttgttgtctatgaatctgtttcctcacttataaattgaaatagtaatatatacttcacacagtctgtttgaggattaaataagaaaaagatattgaataatgaaaagcaccaagtaggtgtcagtacagtctgaatttccattcagcgtagaatgagagatgttgtttgagccattttcaccatagataaaagagtcctaaaggaccttttttctccatcatagtagtaagatttttttccccagatgtctcatttcccaagctccaggctcctgggcagccttgatttcctccaaatcctccaaatggtacccagggtagctgtctcagttstaaacagcgggtgggtgcagtttcgcattgtttgtttcacactcttcccagaatgaggtctgctgaatctactgttctctgcatcctcaccaccattagccgtaattgtgaagttgaaaggaccataattaacggttggatgcaaaacaagtgtggcaaactcatgcaaatatccatcagaagccaccttttgttgggcaatgctgttatgcatgttctatttatgcagaggataaaagtcttttcttgtcatatcctttccatcatgtaggggtacatttaacctggatgatgcctctgccaaatgctaagctaaataagagaagtgggaagtagcagggtgattgttctctctctcctacttcctcctccagttcttgaactcaattgcctcttgagagcacttggaaaccagatgctgtgttgaattggtcatgatgcttgcagtataatcacgttataatagtggggattatctaggtagagctaggttagggaaaattctgtgtctctgaatgaattgggagaaattatattcacttgtgtccaaccactgttaaagaaatggttgcacatggatgggttttctgtggcatgatagagtggaaagaactgagagttgagcatcagacagacttggctttgaattttggctgctctcagctatgtgaacttgaacagtttacttaacatctcaagatggaaaatatgattaatgatctgcctcaaaaaaatcgggagagagtaaattagacaatgtatattaaagtatcttatcgcattacagttggactatttgttcttttttcttttggstgctttccagaggctcctcttctgagggggaagagggttggagcatccttacctggcatataccgatttgtccagtaaactccacatagaagcacacaccttcctaactttggaggactttaggacttgtgtctgtgtcccagctgwtgaccgccttgactcacccatgactcaccccaggctgtattcctcttagtttaacttctcatacatggttttgtcactggaaaggggtccggatccagaccccaagagaggattcttggttcttgtggaagaaagaattctaggcaagtccacgcaagtttattaggaaagttaaggaataaaataatggctgctccatagacagagcagcagtatgagctgctggttggccatttttgtggttatttcttaatgatatgctaaaaaaaaaggggtggattattcatgagttttctgggaaaggggtgggcaattcccggaactgrgggttcctcccactttcagaacatataggctaacttcttgatgttgtcatagcacttataaactgtcatggtgccggtagaagtggcttttagcatgctgatgcattataattcgcatataatgagcaggagaatgaccagccgtcacttttgtcaccatcttgcttttggtgggatttggccggcttctttactgcaacctgtttcatcaacaacatcttcatgacctgtatctcatgccaacctcctgtttcttcctgtgacttagaatgcctaacctcctgagaatacagcccagtaggtctcagccttattttacccagcccctattcaagatggagttgctctggttcaaaggtctctgacagtttcaagcctgatatctgttcctgttgagtcttttggcacaattgatcttatcttttggttatgatattgccctttctaccccatttcttatttctcrtgttagttcagtgactgttcgcatgtccttatgaaaacctcagatagacatggaatgagaagctgtagatataagctctagagggttcgagttaagatcatcaggagatcacatggcagtttgggtcttggataccccatcaggaagtttatttgaaaactcctatattggttaagataagctaaattattctgtagtaacaacaacaaaatctcactggatcacttctgctatatatttgaaatgggtcagcagagggtctctgcttgttgcaggcagagactcaggccaacagaatgtccatcttgacaccaccaccaagtctgagaaagaaaaatgtggcaaatagagcattcgttctacaagtttccatacaaagtggtgcatagcattttcacattccactggccaaggctaaccacatggccacacttaatttcagaaagaataaggcagtgccttctatatgcctaggagaactggaatatttgagaacttccccaatgactaccacaattttccatgatgactaagcctccccttcatattcttataatacccagacttgctcctgaagcacctgggcagttcataccacaaatcctgaggaatttcaattgcttgagcatctgctgtgtctcagatattaagcaaggtgctttcacctatgctgcttccttgattggtctcacaaagtgactacattttttcagtagatggacgaacacctagaggcycctggaatcccatggggtctcagttacttcacactgaaggagggattttagtaacagcttttcccctttacctccatggaggaatggtaaagaaatgcctgaaactcaatgtgctsctgttccaccctgaaaagcaacggtcttccaatgcttctataactcagcagaccttagacctstaccacccatcggtagctgagccaaggcaacagagagctgtgacccagaggcccccacgtaaccgtttgctgacttgtcactatagtctatgtaaggaatcgattcctggattttattagctctgcagagccctgttgaagtggagaggaagactgaactagacactttgattccaggattatcatcacaacctttccattactccttaggaaaatctcaatcgggtaaacatccactcacagctcttgtctgtcaccagagcctaggttccatgccccatttatctgcctagaactctttcccagtcctcagtggactccatctcctggggcttacccactcacttgggcatccctgcttccaggcctccattccattgtttgagccttaaaactctaaacccctgctggagctctgttggggcccagacttctctccttaggtaagatagaaattccccaagtgtcaccttgtacagataccaagatgagctctcccaggttgctaatttattttttcatccacttacagtttctacagattttattatcatggtatgagacctgagggagsargaacattttccttcccatgcaaatatactttaaattcatttggaaagggagatgaaggttacccaaatgttgacagctgataatcttgtcagcctgggccttcagggataaatgctccagactccagtcccaacaaagttcatggaaatagcagcctcagtttctatatagcagcatctctgcctccatcaggcccctacaatgtaaggaacctcgtgaagcttggactgattgccctcagatggtgaaaaagtagagaaacttctgaatttggaaatggtatccatgggttttagaactggcttttccgtttcttagctccatagacagaatacttgcctgccaaacctcagtttcccctctgtcaaacagggatgagatgtgtccttcaagctcactaggacctttgtaacaagtaaatggtaggcgtgataactctttgcaaaggacctttcaggtaaaggtatacttgctaaaacacacacacacacatacacgcacacacacacgtgcacacacatgttaaaactgatactcaattcagttattggaaaactttgaagtatctttggtggaaacacttgggtatgtgaatctaaatttttaactgtaaattttatgaaatttatatacagaacaagaattcagcatatgtgcatatacacataaatattttagcatgcatatatatagatgtatgtgtatatatgagtatgtatgtatacatgttcaattaaaattttttttttttacttttattttattttttgagacagagtcacactctgttgcccaggctagattgcagtggcatgatctcagctcactacaacctctgcctcccaggttcgagtgattctcctgcctcagcctcccaagtagctgggactacaggcatgcatcaacatgcctggctaatttttgtatttttagcagagatgggttttcaccatgttgaccaagctggtctcgaactgctgacctcaagcaatcctcctgcctcagcctcccaaagtgctgggattacaagcaggagccactgcaccaggccctaaaataaaaagtttaaattagtctaagaatcttatagtggaataaagagtaatcattgcaccagaggcctagtataggtggttagcgcagggtacactatctgtatctcctgagcttcctcgaagccaaggaaaaaaagagcaggtggcaggtttgcatagcttctcttacttgaaggaagcatacatatttttcatgaaagacactaagagggtgatttatcacatatatccttgtataagaagccctgagttgatgctggtcaatgtcatcagaacatttttgctcaaacactcaattagtccctcttatatcaatcctatgaaatctgaggttaaaatataaaaagttaatggagacatttgcactcacggattctatttcttgcactataaaatggcattaatgctattaaataagattagtgaatttccaagtttgtttcacctcagcatttttgattaatatgtctagcatggggtctttcctgttgcatagattgtcactgaccagctacatgaccttaggcaagtgacttaggctctctgagtctcttcttcttttggaaaacattaacacccatagtatcaactttataagaatgtttctaaatattaaataataagatgaataaaacacttatcacggkgcttggcatgcaataaacatccaattaatgtcagatattgctattacatatcacaggtgggatagagcatagaggtacactcaggaaagaacaagcagaatccacaggggcagagtttttaaacccatggatcaaatttgaatagagtatgaacatgacgtgggatcagggaattcaggaggaggaaaaaaattagtgaagtccagggtttccagagacggcagctgacacactggctgcctgaaagaaagagagggattgagatgtcaaaggaagtttgggaatgtcgtacttacggagaggcaagtggagaagtgggacaattcttctgcagtccctttcctcctagaggctgaattttcatcaagtgtcatcttttacatcatggtcctcaagtttgcaaacccataaatgcaatttattgggctacacagttgaagagattgacatgaaccatatgtacaagacactgatgaaaatagtaggcaatgattcattcatctccttcaaagttattcctgcatctttcctatcagcaaagtctgggtttcctgctatacatcaccttctatattcagccatcaccaagttctctttgttctacactctgaagctctctctaatccatgcacttttctcatctccagtgccaccatcgtagttctggatagtaacatcttctgcctggacaacctcaacagtctcctaacgcttcttcccacatccacgattgcttgtctcaaacagattctcgaatcacagcaagtgtaaattggcactatatgtattctcatttaacacacaagcaagccaaggctgtgagaggctatgatttgctgaagcatactccagaaacaagagaacgagctggggttgaatctgtgcatgtgaaaaatgcagttaaaagtcctatgcatttactgctccgtttcatgccgagccctagtcccacaagatagcttcatagaggaatatgggtgcactagaaccaggagggtcccaaatcccttatgcactcatatttttcttttcctcccgccaaacatggccagcctaagtccctcagtcaatcttgaaacacctgctggccctgccattaacatcaacaaatagtgaggagctgtactaataacaattatcataataaattggcctttgattacatctgtcacctgagaatttcaaagactttacaaacatcarttagtaattacagctcaatggatctcttacagagcaggaatcattaaggtcagataagagctgcgcagggaagcatgaaggactgctctggtttgggttggtttaaaccagggggttgccagctcctaatagaaagtctaagtccctcttcatgaggtgcagagaaactacatttccaacttctcaattaggggatagtttgtacacagcctcaaagtcctattgttgaggaatgggaagtataaaatgcagtattggaagggagcttattgattgtccagttctcttctttcagcagataaaaggaaactgaagtccagtatggggaagttatttgctcaagatcagagccatggcttaaacccagtctcccacaccccatttgcatttgtttactctgcagaattgtgccttcattggtcatgagctcctctgtaaggagatatgaatgatgatgataaaaccccaaaaacccaccaattatttattatgggcttgttgtgagtcagttgggaatacagataaatargttacagttcctgccctcagcgaacccacaatccagtggagaagacagccatgaagacaaatgtgggcaataaattatcagcaatcccagtggcagaatacctggtgtgttcagctataaacctggaggtagaggggatgaggaggtgcctaggaaaatcttgtagaagaagtgacatttgacttggctattagaaggtaagtggatattttccaggtagacagtggggcagaggaaagtgtatgttttgcaaaggaagcacctgagcagaagccccaaaattggggattccctgatacatttgggaagacaatcccggtgttggttccgggatatggaatgaagcccagagagaggcagatatcaaataatgctgggctttgtatgccatgctaaaatacttggcatttattctgttgaaaacagggaaaagaaaaaaaaattgtcttgcctataatctcaatatcaatttattagaatcataaagtcatgcatatatatttgcatccttaaggcacttgtgctcacaaaattttgtttaccctagagagttgtacagagggtattgctcccattctacagatgagaacactgtaagtcaaaaaaaataaggaatgtacccaatgtcactcatgttgggaaaaacaaaatttgaatgtctcaattttttattgatgacatactccatatgtattgttctcacctttaaaacacacgttgttagctaagaaacgtttcacacatacaaaagtcaagatgataacagactgatctgtatgtgcccgtcactcagcttcaacaatgatcatcaacccatcgtcaaatttgtttttgttccaacttactttctcttccaccaatatgtctaactcctttttttcaaggtagtttcaaatgcacagagatgtttcaagaatagtgtaaagaatgttaataagctctctatacagattccctaattgctaacagtttaccacaatagatttaccatcccattttctctctctccctctcctgttctttctcttcttcccctatttgtctgtttgtctatctatctgtctataaatcacccctttactcctaaatgctttaatgcgcaatttccaacataactacaatacaattaccaggaaattaatgtccacataatactactagcctcagttttgccaattgtctcagtcatatactttttagtaaatttaaacaataacaaaaaaaaacctggtccagggtcacatgttgcctttagttgtcaggtccctttagagttctcatatctgtcttgccttgacttttatgcccttgactcttaaaaattacagaccagttattttttagaatgtccctcaagttgggtttgtctgaggttttctcaagattagattcaagttatgcatttttgtcaggaataccacaaaagtgatgttgcttccttctcaatgtgtcatamtaggtggcacatgatatcagtttgttccattactggtgacattaactttgattacttaaactgttgtccattaaggttttctccactataaagctactatttctttgtaatatataagtgttttgtacacacatatttctagactatgtaaaatcttcttcaaaytttcatcttttagcatttgctgatattttttgttgaaatcaactattacaaagatgtttgccattaggtatatctcccaatgctatccctcccccttccccccacccmacaacagaccccagagtgtgatgttccccttcctgtgtccatgtgttctcattgttcaattcccacctataagtgagaatatgcggtgtttggttttttgttcttgcgatattttactgagaatgatgatttccaatttcatccatgtaccctaaaacttaaagtataataataataaataataataataataataataatacaaataaaaagatgtttgccaaatgacaattttctaattccatcatttgttccacatttattagtggacatctattccgaggatgagttctcctttctcccctattttcaatgtattaatttatttatattgataaaaatttatagattcttcttttattcagttggttatacttcagtactatcatcatttacttttatgctcaaattgtcccagaattagctagtgtgagccccttcaagatggttcttttgtcattctgaaatgtctccagcagttcttgaaaacttattttctttctgacagaatcttgtgcttcctttgccccagctctggttcctttaaatggggaatggtacttattatagaaactcagacctgggaacgagtgggaatcattgttagtgagtaycactgattctaggctctttgtctatgtatccctctacctgtctatccatctatctttctgtctatttttttttttttttttttttttgagacggagttttgctcttttgcccaggccggagtacaatggcgtgatcttggctcactacaacctctgcctcccaggttcaagtgattctcctgcctcagcctcctgagtagctgggattacaggcaccggccatcatgcccagctaatttttttatttttagtagagacggggtttcaccatgttggccaggctggtctcaaacacctgacctcaggtgatccacctgcctcagcctcccaaagtgttgggattacaggcatgagccgccacacccagcctttagctatctatcataaaaggcaaaagtggccgggtgcggtggctcacgcctgtaatcccagcactttgggagactgaggcaaatggatcatgaggtcaagagatcgagaccattttggccaacatggtgaaaccccatctctactaaaaatacaaaaaattagctgggcgtggtggtgcatgcctgtagtcccagctactcgggaggctgaggcaggagaatcgcttgaaaccagaaggcggaggctgcagtgagatgagatagcgccactgcactccagcctgggcaacgagagtgaaactgtgtctcaaaaaaaaaaaaaaaaaaaaaaaggcaaaagttcatgatacctccattctagtccaacatcaaggagtttattccagccttcactcttcccatttctgtaattcccttctctgacagtgagaagcttaacttcattattattcatatatttacttattgttcaacatagaatactcaagaagtatttccagaaatattaatcttagcaaaacaaacctactaactagggttcaatatatattttctgttctctcttcagtctaaatatatgcaaaccgttgtgttgaaaattatttggtttattttttttctttcactagaatatggttatgtatttattggaaattaagttaggtttgtttatgactctttgtttttaattttagtttcattttgcccatccctgttgatttcttaatatgtaaaacattataacgtggttctaaaaacattataacgtggttctaaaagcctagctgtacaaacaagtgcatacagaaaagcacatatcacttcttttacatcacctctaccatcccctgttggaaaccaatgtcattaatttcttggcggtttttttttgtgaaaattttgaagtcaatgtatgttatatttccccttcttatagaaaagctaacatactatagatacttgggtatcactttatattatttcataaatgtcttccttattttttttttacagctgcacagtactctttgttttgttttgttttgtttttttgagacagagtcttgctgtgtcaccaggctagagtgcagtggcatgatcttggctcaactgcaacctccccctcctgggttccagccattctsctggctcagcctctcaagtggctgggattaaaggcacccaccaccatgcccagctaatttttgtatttttagtagagacagggtttaaccatgttggccaggatggtctctatctcctgacctcatgatcagcccgcctcagcctcccaaagtgctgggattacaggcgtgagccaccgcgcccggcacagtactctattatgtgattatagctgtttatttggccactctcatgtgtggctatattgttttcaatatctttcagttgcaaatgttgctgcatcaaggaacttgtgcacatatatttttgtattgttgaaggtgcgtcttcagagtgaattcctagaagaggaattgtaggattaaagggtggactaatacacagttttgctagatgtcactaaatttccttccttaagggtaaaaccaacttgcatttgtcccagcaatgtatgactgtttcctcacagccttgtaaacagtttgtgtggtctaactttcatttttgtcacacttacatgtaagaaattatatctcaatatagctttaatttcctttttcttataagtgaaattgctatattctcctatacttaatagccatttttatgtaatttttgaattacctgtttatgtcttttgctcaattttcagtttgttttttactttttctatcaatttttaaagttatttatatatcagagatatcagtactttatctgtgatatatgttgcagttttttccagtttgtgatttatctgttgactttgcttatatttttgccacagcaaataaaatgttgtcagatgaatcattttttttcttttattacatttaaactttgaatcacagttaaaaagttttttcttacactcaggctataaaggaatttacccatgtttgcttctaagtcttatgtattttagtatttttatatttagttttctgatgtttggtctttgtttttgtgtgtgatgtaaattatggatctaatttttatctgttttcccaaatgtctgtctagttgtcttagcaacatgtatttaaaagtccatttttgtcccgataatttgagatgctgcttttctcatattttaaattttcatatgttcttgggtgtttttctggatgtcgtattctatcccaccagtctatgtggctatttacgcagcagccccacactgttataattatgggatctaaactttaatgtctgcgagggaaagttccccatcgagatttcctttttcagtgagtttctagctcttcttgcatgttccctataaattttagtgtccacttgtccagattcataaaaagtctattagtaattctgggattgcrttaaatttatacattaattagagtgaaatgacatctttaagatgttgaattatcttacctgagataagggatgtctttctatttgttcgagtctacattatctttcatgggtgctgtaaagttttctttatacaggttttgtgtgttcttgctattagcaagtatttcatctttgttgccattgtaatggggttttgctacccttatgtcctctgagtattggttttatatatgactactattgactttgtaaatacattatgtttttgggggcatagatgtttatacctattatattctttgttagctgtggattttagcaataaaaagtatcctttgccatgtgtaatacttttttagttgaattcttgttttatatcaggatcactactatatctttattattttttcatttactgtttatagcttatttcattccttcctttttacttttctgaagaaaattattttgttcacctttttttgaaattttttaaatttgtatttttgagggtacatagtaggatatatttatatatttctttgtttatggggtaaatgagacattttgatacaggcatgtgatatgaaataagtacatcattgagaatggggtatccatcccctcaagcatttatcctttgagttacaaacaatccagttacactctgttattttaaaatgtacaaataaattattattgactatgtttgttgtagcactgtttacaataacaatgttttagatgtgacttttatacatagaaggtagttgggtcttgtcttgtaatccaaatgaatatcttctacatttcagtacttgagttaaatcattaacatttggtgatatgactgagatatctcaactctgccatatatttttatgtcataatttactatattaattttataatactttctggtgtgctttctttactcttttattttaaaatttcatttggtatttaggaagtcttgtatttctgttctagtagttacctttgttcttttatattatttaacactttttttttttttttgagacagagtctcgctgtgttacccaggctggagtgcagtggtgtgatctcagctcactgcaaaccgtgcctcccaggttcaagcaattctcctgccttagcttcctgagtagctgggattacaggcacgtgccaccacacccagcttatatttgtatttttagtaaagacggggtttcactgtgttggtcgggctggtctcgaactcctgacctcatgatttgcttgcctcagcctcccaaagtgctgggattacaggcgtaagccagggcacctggcctatttagcactcttaatcccatcttttcttgtttaatcttttgctatctggtttgtcagatttttctggtatccattaactttcacatattgcctatattagttcgttctcacactgctataaagatattacctgagactgggtaatttataaagaaaagatatttgtttgactcacagttccacatggctggggaggcctcaggaaacttacagtcatggcggaaggagaagcaaacatgtccttcacaaggtggcagaagagagacgtgcgaagcaaaggaactagagccccttataaaaccatctgatctcatgaaaactcactatgacaagaatagcatgtgggaaccacccctatgatccaatcacctcccacaaggtccctcccccaacacatggggattacaattcaagatgagatttgggtggagacacaaagccagaccatagcactgcctgtacaacaataaatgacctaatactactcttctctttccctatttcttcctctttctctctctctctctctcaatttttagttgtattatttctgcaatgacagaaaacataacatttatatatcctactttcatccaacccctaccttatttcagtcttagatttacagttaaacatattaaacttttacccatcagtccttttgctgaagtttcctcagtcgtattttttggatgaacttatcttctgtagatccttcaagaaagacaagtacagcatgccctggctttttgaatgttgaaagctacttttccatagctttgctatatgaaaaacacatggctagctatgaartccttggttaatattaatactttctctgagcttttggaaaatgctgccacattgttttcttgctttgcatgctgtttttgagaagtatcatgatagtctaattctcttgcatgtgtacattattcaatctctttggctttgagagtatttattctaagtttaatagtttactaggctgtgtcttggagttgatcttttcaggtgcattttccccagggtactgtgcactctttcagtatagaggcttgggacttcttttacttccaataatttttcttgggttattgtcataaaatatttacctacctattttgtctctctgctcagaaatttcactatatatatgttggattttctttgccttacttttaaaccactttttcaccaatccttgttaattttttctatatctcatttctgttgtctttgttgggtttctgtctttctttagtgccccttattaaattgctgtttttgacatctggtaatttaatcttcatttctgaggtgatcttttaaaaatttctctcctgagttaaatcaactttctttttattttttcctgatcttttgtatattttggtttttcacttgtgcttctgtaagtcaaagttgtttgaggatatttaattcagtttgtaatattacttctagactgttttcttgttaggggtagattttcatcatttgtggtgttttgacattttctgttttcttcatctagtagctttattaggctctttcaaattttaaaaaattttttagatttaaagtggcttatacgattctcagttcagaaacagtttgttctgactggatagtaaagtacaggtatttttttcagtcgatgattttgtgtgtatgtcatagggaatgggtgtaggttctgactttttgtttttattctagcttttgtgattctaaaaattcccactttgcttccttttttccttcaatctccaatcttccaagagtacttctcccttctttttatctcattttcacccattgaacctatttcacctgttgaacactaccaccttgagtcacatgttctttcaagtccttttcctgtactcttagttttgatctaccaggaattgttttagcactttcatgtgtagtgtggtctttgtctttctggaaagtattttagatcagccatgtactctctgctagcttacctcttttctcttccaaattgtttttacatagctcttgttctccacataggatgacaagggtgattgtgttgaaagctttagagatatttcatttatatctggttcttctttttgtaccaaacaggcctatgacattttaagacttctctatacattaattatgctgaaattgtggattttgtacaattttatttttttcttcttttcctgtgttgtttttgaatcatatgtgggaaaatttggtgttaaatagttaccaatttcttcaactacccagatccaacatgaattaatggttgattgactgtgggaagtcacatatctagaaaaatcaataatgactcctaggttgtttgcttaatcaactaagtagatgatggtgacatttatttaaacatggaaaattagtggtgagtaaggcttggagtgaaaataaaagagaaaacaattcttttagatgattgtatatttgattgtgagtatttcaggtagacagatggatagatgagcctggatctcaggaatatcaatgctagaaaaagtactttgggagtcatgagaacataatattcaaatccttgcaatttattataatctcctaaaaaagttaggatacaaatgatgaaagaggatataaaaccaagctccaggtcactccagtgtgttgaagtcaagtaaaggataaatacataggcaaagaaagggataaagaacaggtagtgaagtaggagaaaagtctggaaggtagaatgacttaaagccaagataattaaacaggtcaaggagggaatggtcagttgcagctaatgttgatgagagattaaggaagatggagttgtagcagtgactatgagtgctgaccatataaaagtcttagtggacttagtgtagtctcactgaagggagttccagagacttggagagttgaggcaatggagtcagcaagtagagataaaacttacaagaagattttcagaggttgggtttgattttaaattttccgaatggcttgcatgctacttgggggcttcctttcttagagtatggctcatggccttggctattgcctcaagtggagcctaatgccttccaggaagatctcataaagttgatagtgaacatttgtccagttagaagtgtctgtaaccaatagccacctatcctgcaacctgaggctgcaccttgccactcactgttggtkactgagggtctgcagaatccagcatacgtgctttctagtgagctagcactcaagtgccccactgcttctgttacccctttaaaggcattcctcatgcattatcctttgaggaggaggctaccacattacgtagtcctaatggttctgagttactcaaggattccagatcttatctgattgttcaaggtcctgcgtcaagtcaaacagaattttgtaatatcacaaaccacttagcctgttttccaaagaaagctgtgccccattgtctttgtgtgcctgcctgcaacccaagaaagcatagcatctgacctcaatgacaaaggggtatttgccttacagacacctcagaaaagaaggccacttgcttgaagtttactttgtattttagcctggcttattatacgtgtaaccttgaaaaatgttatttaatcttgtgagaaaaaaatggacattgtcrtatccacctcacagtcttgttataaggattaaaagacataaactatgctaagtaggtatgagacaagagaatcactggaacccaagaggcagaggttgcaatgagccaagattgagccattgcactccagcctgggcaaaaagagcaaaactctgtttcaaaaagaaaaaagaaaagaggacatcttttaaaaaaaaaaaaaaattcttagtgcttctttcaggtaacaaacatgttaagtgagtgagtcccattggggctaaacaatagcttaagggtcagtgcaatggaagaaagtcaaggagagtcagtttgtgggaaggctagactaaggacccaacgctgtcaataccataagcccaggctgatccgtatgcgtgaggtggggtgggatggtgggagggagctctagagtcaaacagagcaaaaatatgctttccaaaggtagggaaaggttgaggtaggatcactgcagccactcttctggtctaaggcaccaccatctcatcattcgactataccaccaccttcttctcaccaacttgtttctcttgcaccgtaagtctattctctatgtaacagcctctacctttaaaaattttaaacctgaaatttcaattcttcctgcctaaatagctctttaatgacttcctgttgttcttaaaatatagaccaaaactctatagtcccaaaaggtctcctggtcttatgtcgctagcttcgttttacatcatgcctcaggtaattcattatgatgatagccatgccagaattttgtatgtcttcaacwgcaccatgcattttcccactttcaggcctttgcatgtctgtgtctgagtctgggatgaccttcctgatgcttcctgtgtctaacttctaaggttaaatggtctttctaaaagcagcagaccatctcccttcccacccacaccccatgccatctcccttacacatgcacagcacctggcacttctcacttactttagtgtactaaacttttaaacacaacctcatttagtttactgtactaaacttaaatatagattgacaaatttttcaccaagtaaatacatacctatgtgtgtttattgcatatctcccagtgtttattgcaacttttaattagatacttgtttgtgagaatggttgtctaatgtttgtctctccccaggtctgcatgctctatgaggacagggaccatgtctactttggttgtatttgtagctccagtacctagcccaatgtgtggcacatagtaatcattcaataaatatctgttgagcagttgaccaaatgagtacatgaacaaaaattaggtagactttcaggatctcagcacagtcttagaggagaattaaggcctgagtcaaagttactggggaaactatggaaagacgctgaggtcaggtctaaattccatcatatcaactgggaagctcagtcttagacaaaataaagacacaagttgkgataatgtgaaaactatttgaaaactatgggatcagggttaaatctacatcctattaaatgaggagtctaatagagcagtaaagtaagaattgtatgtattagccaggtacctagggcttcttgatcaggttagcagcctaacccaagtctttctggatgataaacagcagctatgagacatttgatgacctaaacagttccactgtgaactcctcaattgaagaggcatcctaaaatttcagtaaataattgaaggatggatggatggatggttagatgagtcagacttgacctagtgttaaaatggaggctataagtagatacagatatgaggcattttgagtaataaggtaggtaacagcctaccaaaataaataaataaataaataaataaaattatttgcatgaaatgaggtattaggaagtagtatcaagaagactgagtactgaaagtaaaggagtactgccagtagctaaaaccagacgcagcattgaggactggaagcaaccttggtagagtggcctgcctattctaccaaagtggccttttctaccccattctccatcatttgattgatggggaaattgagccacagaaagggacagagagttacccaatattgctgcactggccgagccttgagtagaagcatttctcaacagagcacaacagtaaggacacggtgttctaccccagggtgatttatacctgcatgcagattttaatctggagtgggaagtggagcatgggtgagattaaaatgataaggaaatgaaattatattgtactgtcccagaatatattacaaacctggaattagggtatagtagagatcaaatagaaaatacagcttttttttccattccccagagacttatataatccgagaacaaagaaagtgctcatttctttttgttgaaaagactgggcactttggacataggcacactggccacacctctcctctgataaatatcagagtatccagaatatacctgatttgcttgctgacaatctagtcactcagaaggtcaagagagtgacttagggctttgttattctgtacctaattctgaccaacagagacaaattggttatggaattaaagttgttaggaacttaggagaaaacaaacgttttggcatcacgtttgtcagtcaggaagacttaagcataatcgtatatacactctagatcatagaaaacagactttaaaacgtgtggtgctgaaggggtgattttaggaaatggctcattttcctgcacgaaactgtggaagggaagattaaggaaagttaaaaacttctcacaaatgacacaatgtacaagagaagatagaataaaccactgcactaatttacaatatcatcaacagagtattcccctttctctgcaaccttgccaacatctgttatttttttgactttttaataatagccattctgactggtatgagacagtatcttgttttgatttgcatttctccgatgattaacaatgctgagcattttttcatgtttgttggccacttatacgtcttcttttgagaaatgtctgtttrtgtcctttgcccactttttaatggggctatttgtttttttttcttgctgatttgttaaagtttcttacagattctggatactagtccactgtcagatgcatagtttacaaatattttctcctattctgtaggtttactctgttgatagttttgtttttgtttttcttttgctgtgcagaagctcttcagttaattaggttccaatagtcaattttcgtttgtgttgcatttgcttttgaggtctcagtcataaattatttgcttaggccaatgcccaggagagtatttcgtaggttttcttctaggatttttatagtttgaggtcttacatttaagtctttaatccattttgaattaatttttatatggtgagaggtagtgatccagtttcattcttctgcatatggttacctggttttcccagcatcgttttttgaatcgggtgtcctttctccattgtttatttttttcatctttgttgaagatcagttggttgtaggtgtgtggctttacttctgtccctgtggaaagcagtttggagacttcttaaagaactaaaaacataaccaccatttgacccagaaatcccattactgggtacatacccaaaagaaaagtaaccattctaacaaaaggagacatgcacttgtatgtctatcacagaactattcacaatagcaaagacatggaatcaacctaggtgcccgttagtggtgggttggataaagaaaacatggttcatatactccatggaatactatgcagccataaaaaagaataaaaccatgtcctctgcagcaacatggatgtacctggaagccattatcctaagaaaattagtgcagaaagagaaaatcaaatgccacatgttctgtcttgtaagtgagagctaaacattgggtacacatggacataaagatggaaacaatagacattggggactccacaagtggggaaagagggagagaggcaagggctgaaaaactacatattgggtactatgttcatttgttcactctttgggtgatgggttcaatagaagccctaacctcagcattccataatatattcatgtaacaaacctgcacaccaaccctctgaatcttmaaacaaaacaaaacaaaacaaaaaaactctgcagaattccctttattgtgaccacattttaagagaatattcccacagaaagcaaattaatgttcacatttgcagagaagaagtgaccagaagaagcatgagggaaacttctgaggtgctggcaatgttgagtgttttgatctgggtgctggtcataggtgtgtgtttacttggtgaaaaatttgtcaaactgtatttaagtttagtatactcatctgcatgtatattgcacttcaaattaattgtgcaagaattattaagatttagtctgtttccttcaggatgtattttttaaatgcttaaatttgcatgttgtaacaaaaaaatgtactttgctttatttatttaatattctcttatgtgtatcatcccatgttattacatggccctcacaatcatttttgttaacagctccataatattctactatgtagatagaccccagttttccttttggaattttttctttttatgtttttaacgtatactaattgtaaatatttatgggatacatagtgatgttttgagacatataatgaatagtgatcagatcaaggtaattagcatattcatcaytttgaatatttaccatttctttgtgttgggaacattcagtatcctctgtctagctatttgaaactatatattttgcttaactatagtcatcctacagggctacagaacactagaacttattccttctatctaggtataatcttgtatccttcaacaaatctttccctttctctctctccacttcctaacctctagtatctgcttcctgctttttacctctatgagatcaacttattttagtttctgcatatgagtgagaacatgaagtatttaactttctgtttactgcttattttccttaatgtaatgtcctctagttccatttatgttgccacaaatgactggattttattctttttatggctgaatagtactccttgttgtatatataccacattttctttattcatctggttttggacacctagtttgattgcctgtcatggctattgtgaatagtgttgcaataagcatgatgcagatgtctcctcaatatattgatttatcttcctttggataaatgcccagtagtaagattgctggatcatataatagttctatttrtagtttttttgaggaacctctgtactgttctccatagtggctgaactagtttacattcccatcaacaatgtataagagttcccttttctgcacatcctcagcagcatttgttattttttttgtaatagccatcttaacaagggtgagatgatacctcattgtagttttaattggcatgtccctgatgattagtgatattgagcattttttatatatttgttggccatttgtatatctccttttgagaaatgcctgttaagatcatttgcccatttttttagttggatttttatttgctgttgaattgtttgagttcctagtatgttgtgaatattaattccctgagggatgaatagtttgcagatactttccttccattttgtaggttgcctttgtactctgtttattgtttacttttctgtacataattttttagttttatataatcccacttgtttatttttgctttctttgcctatatgtttaaggtcttattcataaaatattttcctagatcagtgtcatatgtttggtttcagaccatttcccttatgttttcttctagtagttttatagtttcaagttttacatttatgtctcttatccattttgagttgatttttgtatagggtgagaggtggcggtctagtttcgttcttctgaatatggatgatccattttcttagcaccacttattgaagacactgtcctttccccagtgagtgttcttggtgactttatcaaaaatcagttgactgtagatatgtgcattaattttggcgtttttaaaaatattatttcattggtttatgtgtctgtttttatgccagtaccatgctgtttttgttattacagctttgtagtatattttaaagtctgttagtgtgaaacctctagctttgttctttttgctcaggactgttttggctatttgcggtcttttgagttttcatacaaattttaggacttctttctatttctataatgaatgccattggtattttgatagagattacattcaatctatagattgctttggagagtctgattattttaccaatattaattcttccaatccatgaccatgagatatctttctatttgtttcccttcaatttctttcaacagtatttttggtttttcttgtagaggtcttttacctccttggttaaattgatttctaggtattttattacttttggtagttattataaatgagattgccttattgatttcttttttaggtagtttattgttcatgtatagaaacagtactgatttttgtattttttaggtagtttattcatgtatagaaacattactgatttttgtatgttgattttgtattctgcaactttactgaatttgcttagcagttctaggagtgtttttttggtaaagtttttggtttttcgtatacataagatcatgtcatgtgcagacagagacagtttgacttttttttttccaatttggatgcccttaaatttttctcttgcccagttgctctggctaggacttgcagtgctgtgttgaataagagagaccacagctttctttgccatgcctgtgtggttagacagatatatcgctcatgattttcacttttataaagaacactggaaccaacatcattgaatayaaagcttcatttatatttaaagttattccctgagaaaagattcttagatgtctggacagataagactgaatttctttaaagtgaagatacatatttagaaattactctcagcagtattagcctcatcaaacctttgccctctgctctattcaaaaatcatgcacagaactggcaagttttctaatatattactttcaaaatctttttttgttgttgttgcattaccatgaagtggaagatcattctaaccatctatagtctcctggcacctctcccagtctacacaatttctcaatgatagtcattgtgacactgtacaatcatttgcatgtcttcttcagtgttctgggtttcatgctttatttaaccgtctcaagctctttaaaccaaaacacagggtatggtgctattggaatggaagccaacagaagctgaaaacctttgtccaaacatgaaaacagaaatgagtttgctcactttaattgtcatatgcaagatttaacttgtaacttaagctttttgtacatcacatttagagcaatgtcctttactgttactttttttctcagccattttcctttttttttttttcatcttttgggtatgttctctgaaaaaactttgttattgaaatgtaacatgcttcaaattttgtgtgaagattttatatgaatgattcatatacttgaaccatgacttgtcatttttttaacatttccaaattatctactttataaaatgaaataattgtttgttttaaagagagacacttatagtttttatgaagaagaaaacacttgttccgaagaacaagtcatgtcaacccaaccttctttctttaagacagtctttgcactgattggagaaatgcaatagacagagtatcagtgtctaaaaggaatttgaacctattctcaagctcaattcataagcagtttaggatattagcaattagttctgattctgattaacagatgaatatcaacgtggaagaaggaatctagtacatgtcataaggttctaccattggcattatccagattgttacttatattaatgatctggatgaaattaaagaaaaaaatgatttctaaaaattttcagcttgtggagactgtgatgatggcctgtagtacttggatcagttgaagaagatggaaattgtagtggtaaatatgactctgtacttgggtttcaaaaatatagccacacttgtacatgtagaagcaggcttctaaccaatacttttatttttggttgggggagacggataaacaccaggatgttagctatgttaatagaagcccaatataagtaaggataatagtgatagtctagataatcatatatcaatataatcatgtatcaataagagcatgtatagactgctgttttgtgttctagtcaccccacattaataggataaagtggagtttgtcctagaatgagcagctaggatagctcaaaagacttgaactcttataatatgaggaattgataaagaagaatgtttatgagcccgagaaccatctttcattatccagacctcttttttacacaagcaaaagcagactttctgtgcattttgaggaaaagaatcaagactattggcgataactatgagattaattatggggagtcatacttggacgtaatagaagtgatcatttccagcattcagaggtgtacctagatggaatagaatctgccgtagacattgtcatgtcttctctacttctggatacatgggaggattccatttccccatctcactaaaattaggcatggccatgtgtctggttctagccaataaagcacgcatagaagtgaaagtgtcgcttctgattcaaagcatttgattgatactgctttaccctttagcactctctccccttgggttaaaatggacataccagctatgatctctgagtggttacaatggtcagagtgtctcccaatcacccccaatctcaccccttagacccagccacacacctacattggacaggtagtttgaatggaaaataaacctttgctgtttttagccactgaagttcaggggttttattatggcctcctaacctttcctatcctgattgccaccaatcccttcaagatgcaatggttctttgtgaatgagctgcagcaagacaagaattggatgattgacagatttttggttcagcaactcacatacttgcattctttgcattttactttccttgctacactgaattcagactgttgttgggggtataatttagtcaactggaattttcagctggttccaggacctcctgggagatgaatcccagtaaagcgggcagagaattctcttcctaagcacactcttcattaactccactgtgtgcccagcaacatcacacatttatgaatcctttttactttggcaacagctaacaacaactagatagttcacctagcaaagattctattgccacacacattatttatgaaggttgcgaggcccacacaagagctcaggggaaaagtaacttttgaacatgaactttgcagtttgagtttgacatgtttcatatagactggactattgccaagtatctcttcccgtctatgcatgtagatgcattattgctagtaacaaagtttcccaaggatgccctccttccatctgctcactcatgcaactgaacaaagcacattgcataccccaagtacccactacgtgttattgttaaagatgatgagtgctgggaattatctgatatgtttataaagtggttmtgtctgggaatgaggtttatgagatggtaggagtcaggaagtgaactgaataacatatrtacctagcctgagaaaaaaattaaaaaatggaattaaaaggtcatccgatggggaaaaaaatggaaagggcaaatttaaaattataattaaaaatacatatgcatgaatatatatgcaaatatatatgtatttttgtctttatataacaattttatataactcacagctaattaattggcatctcatttttgttgttcacaggagaccaaaatcaactgtgttcgtctggctacaaaaggtatgttggcatctgcttgtctgtcttcacctgttcttcagccatttaagtatttctttctagccacacagagaaagattaggcaacagtaactcaaaacaagaaagaattgttattttcaccggagtcatttgcatctagaacatacattctagggtgtatattagtagcacagtgcgtaaaatagagtaaaagtttaaaacatatttactgaatggatggatgggtggatgaatggtgtaaaaggatggactggtactttgatcagtggagtgatggatataaatttactcaaatattcttttgatatatgtttttcttatatttgggtctatgtttatgtgggtattttttaagcatgtctattagacccatctactgagttctgtacttcgttctgttggtacacagctttcaaaaatgaggtgattagtactggggcctttagtaatgagaagacaaacgctgcattattacgtggttggcattttcaacacttatccccaaaactaaggcagcattgttcaggctcatcacttttgttttcctaattrtaattgaattgcctggctctttcagttggtacatgtttctgtttattactctttttaaaaaacaaaatcaatgaatggtttgctatcgtttaacctattacagggttgaatagttagaaatcagatgtatctttttgttacagagttgatatttttaacagcaaaccctccccatacacacacaacagaactgggcaattctactctgttccctgaatttactggcagcatccatagtttcatagactgcttccaaggagataaaagtggtaaacgtaagtaggcatataaccgtagatttaaagtacagagaaaagcgatgacccaagtatgtatgtgtatgtgtgtaaatatatagacacatgcacaacgacaaaaccacacagaggaacataaacacacacacgggcagagtggggagaaaaagagagaaaaaaatctacagctacttgacgaaatgtgcaccaagacccatcacacatgacttttataactttgaagaaaatcagcccaatatgtaggcacaaaagagaagatgcaggaggaagaagaaaacggaagcactagggctccctgtgataagaagtcaccatgatttcacatgagtcacagagggtgacatgtccctaacttgttccctctcaggaactcaggctcctggatggaaagagataaaatactctctgtgaggcaaggagaattgatggcctgcaaacaaaagtgacacaaatcacagatattggcagacttttccactgaagaaaacagataatgtagaaggaagaacaccatcaattgggtagcactagggctctagacagcaatcgggagagctaggtgtctgcagcctgcttaaataagcagctggagagggaaggaaactcacagagaaagctccttcactatggtatgctctatggctcctcggtggctttcgatttctagaccaggagagatggatgcaatggatttgcactccatggggtaggtgggattctaaggacaccctctgggatgtaagctctattagagggtagctggctgggtcataatttctgaactgagaattggaaacatgagacctgacaagcaataggaacatatggggacagtggaagaatctctaaaactatactctcctgaaaacttcaggactgcagtcctcagagacatagaagcccaccctgctgggcttctctagagttgctttgctgatgtgcaagagaattgcagtgacatttaaagaaccagacagaagagttctctacctctccttagcataagggcttcccctcttgcttgagctttaggttaccatctttccttaagtgaatggagtgtgtatgcaggtaaagtaagcgtgtgtgaaaggataggaatgcatgaatgagtgtgaatgcccagctgtccaagcccaggcaggcttctgagaggtcagggtattgggaaatcagagcatccgcattctggttttccaatttggtgagatccaacacttaaacccaaagaaatgaggctccagtagcacttgggaatggggtagagaactagatagtgcagaatgtcagtcggacacagttcagttatcccctctcaccacatcagataagaaggatgcttggggagcataggacaaagggaagcagacctgtgtttgatgagtgtctacttggtgcctggtactatgcttagagtacctagggttgattaaaggcaaaccctatctattataaatccgtccactgcccgtgaggagtttgtatcaagaacctaaagctgggaatcaatattctgtttatcccatcccttcctgaccacccggatcaaatttcctctaggcagccttcctgaaaacagtattctttttaacacaggaagatactgagaatcccacggactttggaagcatatgaagtcccagagatgggtcaccagtctctcccaaggctcttccctctctctgtcatcacggcagctgcttcatgggtctgatggagggcatccagaccctgaagtccatatgtcagactcaaggccagtactctggtgatgaagcaacttgccgctgtctggtccctgaccctggagagtccagccactgtctatgaccagctacatgaatcccacagaaccagatggttgccagttgtaacagccctaagcactcattcaggatcattctaacttgaccccaagcctagtaccccttacacaagaatattagacacacacctggctccagcatgtgtctccaaccctttcctttgtgtaatgttgctactagtaactctggatctaatttagtaccacccagcttggacggttgcaaagtaatggacctctattagtttcctgtggctgctgtaacaaagtcctacaaattggttggcttaaataacacaaatttattgtctcacagttctggaggtccaaagtctgaaatcaaggtgtctgcagaccttgttccttctgagtgttgtgaggaagaatcttttctaygtgtgtctcttagcttctggtggtttgctggcaaatctttggcatttcttggcttttggaagcgccaccctgatcactgccttaccatcacatgacattctccttgtctgcttgactgtgttcaaaattcccctttttatgaggatactaccacctaatccaataaggatgtttgattagggtagcaaaaagcaagggaatttccttgaatataaaagctaaaagacattttgagcactttgcttgacacactctagacctgggaatcaatctgatcagagccatagagagaaaactgcagccagtgggtaaacaggcattaagtgatggtttggatttaaaactattattcagactctgaaaggaagacaatagaaagccacagagcaaaaaagagcaatttaaaaatcaggttttgttcttatcattaaaataggaaatgttagaaagggcaagtgagcaggggaatcatttagaaccatacctttggaagatgagggatgggctcaacataggtagcaggttgaagatgtcagccacaggtgcttaaggtgatcctttagaaaatggagcatgtggaagcttggggtagggacttagacttcagaggtgctaatgctcaagtagagagaaaatgacccttcccatgagaggtacattatcccatctggtagaagatgccccaggttgcagctgctaaaggaggtacccaggtatctcaattcatgtcctctggctgagacagagcaggccaagggaaaattgtttctgacctagttgttcaattctagaactatattgttcagtccccctttgagaaactgatgcccagytccatccaagttctcttacccactgatgtcctgtctttctaattcttccgtgactcctttcttgtactcatctgttcattttgctacttttccttacccacaggccttgccccaccagtcttgcctgcgtgatctgatcccttcctccctccagcctcctctaagcttctatccttttattctcttattacactctggcacactggtcttctttcagtttttcaggcacatcaaactcctcccaagcttggggccttcgctcatcttgccctctctctgaaatgctttggctactatatatgtctccttaatagataaatatcttaacagagaagtatctttaagatggcctcttaaaccttatgtcctcagaagaccatcctgacctctgttttaatgtatatccctaattttccactctcactaaaccctgtacttttccttcatagcactcatcacaacttgcaaatatatatatatatatatatatatatatatatatatatatatatatatatatatatatatagtctacttacatgtttaatgtctatctccctgctagactctaagtgacgtaagtgcaaagactgtgcttattttgagcactgttttattattcccagatctcagcatatactggtactcaatgaaatgcattggatgaacaaatggatggatggatggatggatggatggatggatggatggatggatggatgagtggatgactaacaggtcattattcytccatggcttcatttttttcaaatgcaagttacatgtcaggattgttctcttaaatggtaggagtaaaagtgacagaggtaaagtgtccactatgggatctgcagtccccactaacaagaaggccagccagcctctgtttctgttcctgctgtgatagagatctctctacccaccatggacttgcttcacactttggacacttccgtttgagagggcttctacattatgagtccaaactggctccctattatttttctgcccatcagtccttgaagtcaaatagattctgtctaccatttctcctttcagaaaatgaaatttgcttcctctgacctgctcctccagccttggttagggtcaggaaggtgcatgcttgcttctttccattgggtggaaccactctggctgccagcaggcagcagcactcccatcttgtctccagcgccagccgtcaagggaacacagctggctctgcagactcccgctgggtgcgcccgagtggcagttagaaaaatcagctttgatttgatttgcaaactgagccgagtcattgagacaaaataaacccagaaacccataaagccatttgcagagttgctttgcagaagacagccacagttttaatctagtaaacactctctaacgatcccattaaaacaacccccttggagtgggtgctgaaagctgaactccagaataatgaagcataggatgaggggccagtgtcaccagtagttttgttctgcttggtggcagcgatggactaacgccattgttccaatagtgacagcaagaggtttgggcgctggcttttgtaaatatgccttcttttcataagagctaagcctgagataaagcatttcatctggcattttcctctccttttcccataatggattctcactcctgcagggaccagcagggacactaaatagccatttttcagtgagatgctctcatttaacagatgctaagactggggcccagaggaggagtgatgtgtccatgccttgtttatccacagaatcacagccacaggtggtgtgataatcctctgctatcaataggcaatgcctactcccattgatacaagcctatgtggaagattctgttttatataggaagcttccttgagaggttgcatggaataattggaaattagaaacacctggattcaaatcctgtcccccaaaatttagctgttagaccttggacaagtcagttaaaatctacgaatctgtcccttcactttgaagcctgagatcggtagccctttctaccaagtattcaagaacattatatatatatatatatatatatatatatatatatatatatatatatatatatatatatatatttccttctttctctcttcctttctgagtctttaatgtgggacttggagacccagacctactaagcacagatcctctctctcagttctctaaggaaaaagccacagcccagactctagtcactgcttgtacagttctacaaatcagccgtttgtcaaatggatacaggttagatccaaagtgaagaaacccagaggggacaggagtgatgttggcctcacttttcagtacttgaccttcccattgataggttgttgtctctagatgagatcctgcagagcaatagtattcttttatggacatgtataggattgtggtcatcccttttctagccttgactatgacactgtcctttcttcatcaccagaccagcaatttcaggagggacccaggagcatagcatgtccaaatctagctagagcaaccagggtaggggccataatggggaatcacttgtgagaggaaagactctagtgagatagtctattggaaagctcttgattgttgttcagtctttataaatcttgtcaaacttttggaggtgaaagctcagactgtgtggctggagggtttgggcaggacaatgctattcttccttagctgagtcccatgagatacattttccaggactgggatcctcagagttacatgagtgtaacaaattctccttgacttgtggccccctttgctctcactgactgtcttctaggtcctaaaatgtcaatggaaaaatacagattttcctaaaggttttgcaagaagttggaggaagagaactatatcataagtacacataagatagcctaaatatgacctttaaatatcccaactctttctttaatatttttcttgctacaacagctggcacatctctctagcctctctagttgtgctcaaacttcccccgccacacacaccccttccataccccacttccataccccactcaggaagacaaaagctggtttgatagagttcagaaaaacaagtgaggattaactcttgccattcaagcatgtaccttgggagttccaatccatctttctcaactagaaataagaattatctactcaagatctgagagacacctgagtcgacttgatcgcaagtctgttattgcaaagcagttgcatcttctaaaggaaaaggggggccttttaaaattgggagtccgggaaggaacacatttggggtagrctagagacaagggttataaataaagagaataaagctctattggatattttaaaccccattgatgggatctcaatgtgatgtttgaggagggattaaaagggatttgcaaaaattaaccacctattgtgtgccagtcacagggctttgtgtgctgacacaaggtttcagtgtgatgacagaagtaaagcctgacacttagcacacactaaataaatagtggtcatcgttattacttaatgatgggccaaatgggctcaaggggttaaataaggagctcaagtttcctcagaattggaaatcagatctgattccattgtgttaatactatagacagatgagattcattgaccactgacaggatgctctgtctcctacctatttgttaacctcttcccatgcctcttttctagtaataattgataatagaatatttagcatgtgatggtctttggcctgtctccaggagtattcaagctaagtcctggagcagaaggtgaggtggctcaagaaatcctcaactttcttcacttccacaacatattgaagctaataaaccaaaaaattagttagtcttcagggttgtctgctccagggccatctgtagcccagcagcatctctctgcactcaacactgattgctttagaagggacaagagtcagaagggaagtctgagacattcagcattctgagctccttctttgcaggctaacacacacacacacacacacacacacacacacacacacacacacacacacacactgtacagggcctggaaacagtaaagagagaagggtaatgaatcctcaaaacgtgatgtggtcaggggaccaggtgatgcaggagaaagcaagagacctctacctcagcaactggattagttaggctaggctaggctttgctaacataacaagctaatacccaactcccagtagcttaataccacaaaggcatatttgttgctgtgccatctagaatatatgtggtctcagagaacccctgagcaggggaagagaaagcatggaagtggcaacttggatcttaaatatgtcactcggaaatgactcatgccacttccacttacatggccttgatgagagctagtcacatgacaacagcccaactgcaagttgactggaactctttcctatgcccaaggatagatggaacagacactggtaaacatgagacatctctagaaccatatatgtaaacaggacctttttctgtttctgcctccttttgtgttttgctgagatccatgatccatcccactatattctgcccaccaactagaaaaatctctccccattcctgcatttatccagctgtccctctgttcctaccccagatagctgagcattactgctaagcacagcatgggttgcagacctagaggatggagtggggaggtacctcctctaggcccaccaacccaactaaggctttaactcttttccatttgatcctcaagatgacttcatgagataattattacctccactttataagtggagaaattaaaatttagaaatgtatgtaattttccaaatgacacagctagtgagtgaaaaatactgaatcagactttcatgtattcatttacttttcagtaagcatttattgagtacaacttagtattgatatgtaatcccacattccctagtggttaaaaacatcatctttagatttggatggtctttgattctaggtaggaaaaggtactaaactattctgtgtctctgtttccccatctataaaccaatgacaataacaccacttatggctgggtgcggtggctcamgcctataattccagcactttgggaggctgaggcgggtggatcacctgaggacaggagttcgagaatagcctggccaacaagmagaaaccccatctccactaaaaatacaaaattagcttggcatggtggtgcatgcctgtaatcccagttactcaggaggttgaggcaggagaatcgcttgaacccrggaggtggaggttgcagtgagccgagatcatgccattgcactccagcctgggcaacaagagtgaaactccatctcaaaaataaataaataagtactaccacttactgcacagggctaatgtaagaatttcatgagaaaatgtatcgaaagtacttaatataatacctggcttgtaagaaacactcagcaaatagtagttcatgggagaggcaatgaataaatataagtccaataagggctgtcgtcaaggcaaaatcaggatgtcactggtgggcaagaagggagacataaatcaacttagggtatgctatttcagaatgtgtgatcactgagataaggtttgaaagaagagtaacaattatcatgtcgaacaaggttgcaaagtaagtcaagaaagccttcaagccaagggagtaggtatgcaaatcactgaaggcaagagagcatgccactgaatttaaatgggacaaggcaaaggaatgatggctagtaggccagtgtgaccagatgaggttaggagtgatcaggggccacccaggactctgtgtagccccactgtatgtgtgtgtgtgtgtgtgtgtgtgtgcgcgcacgtgtgtgtgcacgcatgcgcgcacatataaaagcattgtccttagatagtggagcccctggaggtacttaagcagactgcctttttggggaaggacaccctagttatagtttagaaaatgaatcagagaaggaagactaaggcagggagaaggctacagaatgggagagcagttaagaggctgctgaagggggccaagtgggaacatgtaagtcatctcttctctgaagctttgcatttcttttactgacatgtgagggcgacagtctttgtcttgcctatctgagagcattggggttaaaaaaaaaaccctaaaaaatagccacttagaacaggagttagcaaactcctctgtaaaaggacagatagtaaatattttcagctttgcaggccttatggtctctgtcacaaatactaaagtttgtcattgtagctccaaagcaaccatacatataagaatatgtataagaatgagtgcagctgtgttccaataaaactttgtttatggacactgaaatttgcattttatataatttccatgtgtcacaaaatattactcctctttcatttttttccccaccattagaaaaatgtaaaaagcatttatagctcatggctgcacagaaaacagggagtggggggccagatttggcctacaagtcatagtttgctgacccctgacttagattgtgcttttaaaacagcaaaacttttcatatttttaagggagaagtattatgattactatttactggtggttaaattttatagtatttcatggctgttgatcaagtttgccatctgtattatttttgaaattatgtattttttgtttatcagttggtctggaatactctrtcttctcaattttgcataagaacttcctgcagttttgttgatggatcactggagaaagctgcagtccctggacaagcctaaaacacctttcaaccttttgtatgtttttctttagagaggtgaggggtggatttgaaaggacaggaacattaaagccagacaaaccagggtttgaatacaacctttaccagtttgtgaccttgaacaagttttacaaattctatgattcaacatttcttcattcattcttcatttattcaacaaatattcactgagtacctactatgtgtcaggcacaatgcaaggccacatgagtacactagtaaatgggacaccgtgtctgctttcaaggagactacagatttaagagaaggcatccatttctaatacagtgatatattgcaataagaagggaagatgagggtgttatgggaagacaagaaggggcatctgtcccagattcactgacgtactaaagactccctagaggtaacaggttataaactgacacctgacggatgaacagttatcagccaggtgaaggagcaggagggagtatatcccatgcaaagtgactcacctaaggaaggcttacatacaagaaggtggggggctgttgataatggaaagctgttgtcatgcttgggacagggtgggcagtggtagtgaagagagacaagaccagaggggtgggcaggagattcatcatggagggcctgtgagctgagtgaggtggtttgaagtttaccttggggacaacgaggcagcactgttgtatttcaactgaaggatggagagtaagactgaaggggaacaagactggaggcagagagaccagacgacaggctgcttaaataatccatgtgaaacacaaggttggcttgaacaaagtgagaatgaaattaaagagaaggaagcagcttcaagagcttttctggggtagaattaataaagcatggtgattgattataagagggacatcagaaaaaaggagggctcccatgtgtctagactgagaagctacatggatggtggcaccatttatgcagaaagggaagtctaacagagaagtagtttcggtggaaaaatgacagatttatttatagtcatactgacctttctgggttattctaaatcttasaaacattatatgtgaggcacccagaaaagtacctggcatgtcgtgggtgcttgataagtggtgcctcttactcttgtttcattttttttaaatctatttcaggccctgttttgttaaatcatgatgttcttttgctatttagtgtgagctcttcagagccacaagaattgcagttttgttcaccgtgctgcacgttttcatgtgtgtttctttctctccttctcttctgcatgctgcctggggactggcttccttgtggtcagcaccaatgggcagcgcccaggtgaccccggggactccactctgcctcctcaccacaggtgatcaccagagccctgggcgggtgggaggggagagttgcccacactcagtgggtcctccaggccaggtgcaccagagaggaatcagcagtctttccaccccacccacccacccacccccccacccattcacccatcaacccacacattcattcatccacccatccctccatccctctatgcatacactcatctatccactcacctattcattccttctactaatgcttactaagtacctactgggtgccaggcactgttctaggcatggagatgtacaatgatgagcaaaagaagatatgttccagtgcctttccaggagaagaaacagccactggtccaaaaactacacaaataaatttgccacttcaagtggtgttacaaaggaaaggtacatggtattcaaaataaacaaacccatgtgcagccaaaggagtgcttcacaggggaagcgacagctgagctgtgatctaagtttgggaaaaaagttgacataacaattctgtgcttaggaaatgagaagctctcactatgatcaggtctaccatttgtcctgacaatttacccataccatgatcagcctgacttttcctacctgttaaataggaataatcccacctaccccttatggggcaccatttacgttgtagaccgtacacatgcagaggcctctgagactaaacaagataatagacatcgaaggagctgccatgggtacgcccagtccagagtctgtatttgtttgaagtgaataccagcccctttcctcaagtgtaccataggtggagttcatttcacataaatgtatgccattcttcaaaggacacagagcccactcatgtcagaggttgatgtccatcgtggggctcaaaagataatctgctgacctagagacctctttattacagggtccctttttagtcaatgggaagtttcttggagatttcaaacctttaactgtcacctctctcaaagtccttgcccagacaatggcctccggtctactaatccctgaacggtcagtttatcatggtggagaaggaggtgcagcaggctgtgatgacatgagtctgggcatccagtaccttcacagttcactcctgccaccctgtttcccaaactcagagacatcactgctggtgaatgtcttaggttgagttccctggacactgagactgagatggagattcttgtgcaaattattcattgcagagtgttctcagaagaaagggaggaagatgagatatggcagagaacaaagctaaggggggatgtggagatctgcatctacctgagccctgggtaaaggggaggtctggagtaggaaatgtactaaagagttgggcccaccttgaggcaagggggccaatatttgtaccatggtgttggtcagccactggctgtgggctgccatgggaatgcatgacctcctggggaagtggttcccttatgcctgatggtacttctctaggaagggaggtatttgtgagccatttgcgccagcacccacagcagctggagagtagtcacacccgcccagtaaaggagattggggctgagcctaaacagcatccactatgggcaagttttatctctgcctttgtactgccatggacacctgtactccagtgtgtcactgccaacaccacaggaatttcatctcagccactccctgttagattaccttaagcaagttgcatagccttatttcacgtgcaaaactaattatcatatgtgcttcatgcagtcatattaaaaattccattagaaaatgctaggaatgttgtgtgcagttgcagcacatagtaggtctttactgaaatcagtccccagccctaccttatcagaggcccttcccaaagggaggtgggagttgcagatggacagtgggagaaaagtgactctcgtcactgtgcacaccaccaatttacagagaaacaatacttctccagagtgtgtgcgagctgttccgtttctgctgggccattgttctctaggctctattccagtcgagcagtcagataatattttctttaaacagagccagtcccatatcaggtgcttttgttcttacctcttgtcttctaaggcgtctgaatgttcctcctctgacaggtttatttcattgtgatccatttatttccacacgtttctcaacctcatttgatgggtgaggtgcctgtgagtgccatccctttcaaagggtgtttttgttaatgttcgtcccctggtagcaataatggctgatgtaaataataactgcctgggtctgagtgatggggatattagactttaagcacaggagcctcttttcatatcagcaccaactcagagagctgcaggaccacattatgtagcagggacaggctggcattcggagtgagtggaggctgagttcagctctcagcaatgccaccttctgggctggtgatcctggataatttatttttcttttccagacttcattatttttatttggagaaattgaaatatgaatagccacagtcataggtaatcatgagaactaagtgcaataaaagctttaacttctttgcccatctaggtccaattagttcttcaggtcttcctaatttattggctaatccttcaaggaattcattctctatggcaagattgctcaaccccagcaccatggatgtctggggccagatagttctttgttgggggccggtggcagggggctgtcctgtgcactgtaggatgcttagcaacawccctgcctctccccactggatgccagcagcacgtcaaccccaattgtaacaaccaagtacatctccagacattcccaaatgtgccatggagacaaaaatcatcctctgttataaacctccagagccatactgtttaatagaaatagaatttgaatattgtatgtaattttaaatttcttagagtcacgtgagaaaagtaaaaagaaacaggtgaagctaattttaataatataatgtatctaactcaatacggatccttctcaacttatgatggggttatgtcccaataaatgtaccataagttgaaaatgttgtaagttgaaaatgcacttaatacaattaacctacggaacatcatagcttaacctagcctactttaaatgtgccatgctcaaaacacttacattagcctgaagttgggcaaaatcatttaacacaaagcctattttatattaaagtgttgagtatctcatgtaatttatggaatactgtactgaaagtgaaaagcagaatgtttgcactggtacttaaagtgtagtctctgctgaacaggtattactttctcagcagcattgtaaagtcaaagaatcttaagcccacctatcttaggttcacaatcatctggtatatccaaaatattattattattatatgcagcaaaattaaagaaaacaacagatgaaagatattttacattctttttttgtactaagtctttggtgtgtattttacacatagaacacttcaataaaataaatttttaaattcagttcctcagttacaccagccacctttcaagtgctctaagtacgtgacttggtgactaccattgtgggcagtgcagatcaagaggtaacacatctagggtcatctttgtccctagttggtgaatagaaatgtatgtgtagagaagaggctcagtaaatattcagttccttttattccttgttgctctctaggactaggggacgtttggcaaaatctggagatgtatttggttgtcacagctgggtgcgaggggctatagtcacctagtgggtagaggtcaggaatgtttatattgagaaaaataaggtaaaatcctcttctggccaggattgggcacttttctgcagtgagctgactggaggctgcagtagagaagtgaccagttaattaacattaagagaactcagtcttccccaggcccaccagtgcagaaagaaggcctcttttcacatccctcctgcagttcagccaggcctcaagggggtggcctggacttctgagcccaagaggagactgacagtgtccagtctggaggccagagtagctgtgctaaaggtcatccccagkggcagatctgacttcattgtcttggccatgccccatgcccattgtcaattttctacagaaaaaagagctgtgggacaagccctcatctggagcccaaactccattccttaaaactggggaccttgagccaattactcagcctttcgcctttctgagcctcaccttcttcatttgtgaaatagtacagttgagtccctgtacagccaggcctaatcatggtgagggtcaacagaagaaatggatgcactctcaacccagctccaggtttgagaagatattggatacagcttcccttattattcctttatttcctgtgtacctcatgttaaaactctctcttattatttcgctggaaattctttaaatcacggccttggcacagtgacaggattcaggtcatcatacactctctgggagttcttagcaactgtccttaaagcaactttcccaggggcagctttactcagacccaggcagaaggagtttgagcctttgggagaaagctatgtgggccaagagaagatgatgaagcaaggcagcagtctccctagggtcatgccctgggccctgtgagcttggacaccctgaggcttcagtgaccctccaagggagcatgtgcccagtggaaggggttgacagatggtgtgagaacaggaaccagaggcaggagaaccgggtgaagctccaacctgaacagccaccatgaggggaaaatgcttcatggagagaggcgaagacaggcagcagaggcaggggcacagcctgtcaggagagagggggcagctctgggggacaaagcattgggaatgtccaataagacgatgaaaagaaaaatataacagcaagtatgttacatacttcctacatgctatggaatgtgctgagtttcacatcattaactcatttaaacttcccagcaactctgccaaatagagtactgttagtagtcacagtttacagatgaggaaactgagggtcagatgattaaaaatcactcaactctgaaatgatgaaactagaattcaaacccaggtctctcaagacagtctgtaatcatactctccatgctctgtgcccatagacattagagaacacccattctgagccagcattgggaaataccatggcaggatggttcaggacagtctcagaagccacataatttactatctgagaggctttgagccccaaagtttccccattttctyatctgcaaaatggaaatactaaaaatgaccagttattgagaagaatcatgagataaaaaacttcattatcttagacttgtgccatcattataatgatcttaacccatcttacagatgaggaaattgaggtccagagagtgagcagcaggcaagctgaccattggtaagattcaggcagactgaatctgggccagactgtgactggtgactgggccagaactgtggtttctgagaaacgtgagtggtggaggaaataggtaagagcccatcagggcctcaggcctggggcacctaaagtgccaaatagaagtcatgaatcagggctcatcaaagctttaggatataaggtggatggctgggcacagcagcacagcaaccccagctcctgcagtgacccaaggcaagagcaagactgagagctgagataggtgaaaggatgtggacatccctgagcctttgacctgggcatcctctagttccccttgaccagtgctttggttggttctggagtgcacaaaggtcatggctgtgccagaagactaggggaagagctacagctggaggccacgagggcaggtgacatccaggagccaggctgatcattgcagaggaccctcctcagctgttctgggcaactactcatatggctgtaaggctgacactacagaatgggggaggagacgagccttggatcaagtgcattaggatactgtccttaacaacagtcttagaacagatgctcaaagcttgacagacacaaggctattggtacatcatttgagctgccattttctgttgcccgtctccccactgaatcaaaagacttaatgcagaagagggttgtcacatccctgtagggtgttctgtgggagatgattgttaatgtttgtgcttcttcaaaacaaatgtctaatcagggagcatatatgactgaggctctcactgcacctttttctctcctgggatattctccttaaagcaaggagaaatcagtctccagtcttccattcaaactgccattaaactcagattcagaagccaagcatcatccttgccttctctttttcctcatcttcagtatccaatttatcactaaatctgatagatacggcctctgaaatctctcctgaatctctgtctccttcttgctcactgctacaactcatgtctgggactcataaggttagtgtcacagattccaaattggggtccccatgtctttacatcaatccccttccaatatttattccccactgaagccagagtgatcatctaaaaataagagtatgattcaggccaggtatggtggctccacacccataatcccagcactttgggaggctgagtcagtgaattgtttgagcccaggagttcgagatcagcctaggcaatatagtgagaccatgtctctacgaaagtaaagttaaaaaaaaaaaaaaaggcccggcgcagtggctcatgtctataatcccagccctttgggaggccaaggtgggcggatcatgaggtcaggagttctagaccagcctgaccaacatggtgaaaccccgtctctactaaaaatacaaaaattagccaggtgtggtggcacgcacctgtaattccatgtactcaggaggctgaggcaggagaatcacttgaagccgggaggtggaggttgcagcgagccgagatcatgccactgcactgcaccctgggtgacagagcaagactccgtctcaaaaaaaaaaaaaaaaaaaaaaaaaagccaggcatggcagcgcatgcctgtggccctaactgaggtgggaagatcgcttgagcccaggaggttgaggctaaagtgagccatgttcatgccactgcactccagtctgggtgacaaagcaagacccagtctcaaaaaaaagaaaagaaaagaaaaaagagagagagtctaatcctgattaaaatgctcccagggctccccttgtgctttgggataactagcctgaatcaaaggccatttaccacctagtgcctatcccttttttatctctccaattttatttcctcctcagcatcctgtaacccgttcaaactgatcatgtgagtggtacttgccttctcacactctcctctctctgctgagatgttctccctctatggtttgccttactcatcctctaggatcaagttcagacagtttgatctctgcaaaacctttactggcccccattatctccagattgcatgcagagatagtcaactgggtgggccacttggcacaaagaactgcaaccccctcccccgccctaagcaaagttttctattgaacatggcatatgtacaaggtataagcatgttttgttggagctgtttggtttctatcaactctttccctgtgcctagcacacattgtagtgctcattcatttgaccccatgcatgaatgatttaataaataagcagatgactgacattgatggagcatgtgccaggcatggtatactcacccccatccccacttctgcctccagcctgtgatggttcaagcacctcactctactcaccatctaccattttgttgggctaattgtgagtcactagttttcaatccagtatttgaactccatgcagactcacctgccaagcttcctagagactgagtcttcagagcccttgtttggagctcccccaaatctgctggagctggtcttgctgagcccagtgtctcgcctgggatctcatggtgttggcccaaaagaggttgggctgggggcaggaatcgtgggcagtcatagggaagaccctgtcttaggactctgtgccagtgtggcaagtggcatctgctacaaccacactggccacttcttctaccctcctcacctcccactaagagcagagctgcttttccatccatcctttggggaggggaamagatcagcttttaatacagaacacagtgattcagtgtttctgctttcaaaagcaaaggggcaaaggctagaagaaagaaaacatgttcatggtggatttggctggaatctcaacaatcaattccgtgcttgctgctgctcattttattaccgttgcacgggttagttgcactaatctgaaattctgtgctgcgtgtttactggctcctctgtctgatcctgcttatgcttccactaatccttcctatagattgcctgcttcctcccgtgccccttctctcctttccaggcactctgatgctagctgcaagcggcatgttgcagatgcrtaatctggacaaagctgccccagatgggcagatctttgcttctcctcccctttcttgcccctctaagtcaggtaatacagtcaccccttaggggatcaatttggccagagttggttggaaagaattgaattatgtttctgagtatgagcctaggggagcctcggcctctggtgcaccctgctatgcagttcagacaaaggaagctgagacatattatccttccagaagccttgtgttctgctcagtccacaaccaagcaggagcccccattcctcttcccacatgctgcctgtccatttggctgtgaacccttttagagtttgcatttcatttagtgaaatgctgagctcccgctcctgcttgtagcccatccccaggctgtgtgggtcatgactcagcttcacctggtcttagaagttgaattgtgttccccaaaaggatatgttgaagtaataaccccagtacctgtgagtggaaccttatttaaaaacagtatctttgcaaatgtaattagtttagataaagtcagaagggtggacactaatccaatatgcccggtgtccttacaagaagagaaaaacatcatgtaaagacagactcatagggagaaagtcattgacaacaggggcagtgattggagtgatgcatctataagccaaggaatgccaagcattgccaaccactagcagaagctaggaagaagcaaagaagagttctgccacagtctcagaaggaccatggccatgctgtcaccttgatttgggactgctggattccagaattgtgagggaataaatttctgtccttaaacctcttgggttgtggttatttgtaataacagccctggaaaatgaatgtacttagaaatgcagtgatcctgagcactggccagtgggcagtggttgagctttaagggctgtgcctttaaagtgggcagacctcaagaaaaccttggccaagagctgccatccagagaatccctttggctcaccccatctccccagtgaggtccccttgttgactgtattctacatttggcccagacaggtctccactctgtggctctaaaccttcctttcttggtttggtttctgcttctccctttgaatagtctcagcatctgcttgctggtcatgccctggcctgggctttgcttcacaagccaggctgtggtaacctgttctcagtgtcccrgaattacatgacctgcagactgtccctgattggcttttgtacttggctctatactggctgctcctgagaagcctctccttggcccattgctgccctgggactgctctgagcttcacaggaagaattacagtcagttcagtgtgaccacagctctctcatactggctgcctgaagaactctaaagggactatcactttgctgcagggcatcctaaagagtttatgttcttcttcttacatctgttcttcagactaaacccttaatccccagtgcaggccgtgggtgctcctgcctgcagcagmtaagcggctttgagcctcctgagctccaggctcaaagcacagattctataagcaaggagccagtactgtcagcactgagatgactcagcctcttcatccgcatcagcaggacagtctggaccacagggagtcaaggtggggagggaaaagagaaggccactgagtggtcacaggaatgccctgatgtgtcccacaccatggatgacgtggaaatcaagtttgtagtctagttttgtttaagcagagctgggcatgccctttcctgtgcacacttctgtgttggtgcccatcactcaactctgatttttagtttgcactttcctctccccctaagtagtgagttccaagacagtagtgttgtctaattaccttccatgctcagcaccttgctatagccactgtcatcattataatcctagcaccactcaggttaggcaatgtccaggactattcctatgaagccaagggttgaactgatgctaatgagaccaaggtaatggatatagtccatgtggaggtcactgggctttgtccagttattttcatggccatgggctamattttatttctgaataaagtctaagccacacttgtgggcaagtttgaccccaccatggatgcagactgactgccataacacttctaaacccgagccgtaagttgactcctgatctctgctttagctttgacccctacctcagccacatcctggtcattaaccttgactgcggtctgaaacctaacccagtctacaaagtatgccctatacttggtttcttagacaaccttatacctgactctagtcatagcttaaggtcttagtcttaccacagactgaatcctctctctaccccagctgggtcttggcagccctcataggttaggcctccttggcacaacagaaagtagttgaggtcattgggaggtataaatggatttccagctcaccaacggtgaaacctttaaaaggatatgccatagaaggggtgtgtcaataatgactgtgtctggcatcagttgggcatgactgctcataaataagtctgttttcctctatttccatggataaaaaaaagacactttcttaatagaataaaggagttttcttacatccagaagacgttctctatcagagtctcatttagccgtctttcctggtgtgtgtaacatgactgaactagaatttgacctacacagagcatttacagtgtaaaacaaggtctatctggaarcatagattcaggagaccaagcaaaatcagcacttgaggaacaatttatttgagtggcctgagtgctttcaaacaatcaattaaagctattcctgtctcacagggtgctaacctccattcgaggccgaaaacgagggcaacttctgtcagcaatatttagcagttttagttgtataggctgtgatgaagtcaattctaacttcttaggactgactgggtagtattgaggagtctggggtattagaaatgtgtatcttctttgcatttaacagtacttattaagtggttttccacagcaagggtagagctatctttgaaaaccctgcatctctgtggtattttccagctacttaacattgactctgagttaaatcgtgactaaaagcaattactgtcatatgatgaattgaggcaatttatttattacttgagaaacatcctaggtgatgtcacttagaagaatgatgaaataatccttctcaagtgctctattatcaaccagatctggtgaaggaggcattgctttgaggcatggggaggtagtcagcaatttaaaaaaattagtcacagcaagatcaaagaaagaatattggagacaaagcagaaaaaaatcacctaaatttgaacaagacttgtctccctatggaattatatgggatggtttgtttgctaaatatcaataaaggtattatatagaaagcccagcgattataataaaactaactgcaacatatgaaaggcttggaggtggtggttgatatacaagaaaagtgaaaaggatgagggaacttaagttaaaaaggtcaagtttaaatatcatttgagcaaagtctgtataatttggctcatgtaacaaggttcacatgacatgttcatcaatcccttagatattagaataggatacgtgggtgcgagggcatgagaggagataatcttcaagaaagatgcatgaaatagaactgcatgatagagtgggtggcaaacccggcagagacaggcatcaatacaaagatattttaatctggctggtcaatggaagattctagatctaaatacgtgtctgcttctttcttccagatatttgagaaaagacaaacacatttctctgctgaacggtctctccccctatttattagagaggtgacagagtagtacgataggttaaagagaataatctctgtgctagactgccagggcctatgtcccagctctcctgcttgctaccattacttagtctctcagaggctgttcccacatctcagaaataggtataatgatggaacctgcttcataggtgtattagttcattcccacattgctataaatacccaggactgggtaatttataaagaaaagaggcttcattggctcatggttctgtaggctgtagaggacgcatagcagcttctgcttctggggaggcctcaggaagcttccaatcatgacagaaggcaaaggggcagcaggcatcttacatggcaggatcaggatcaagagagagtagtgggcgggggggggggtggggggaggtgctacacacttttaaatgaccagatctcacgagaactcactcactgtcatgaggacagtaccaaaggggatggtgctaaaccgttcatgagggatccaaccacctcctaccaggccccacctccaacactggaggttacattttgacatgaggtttgggtgcagacacagatccaaaccatagtgatagggcagtgaagattaaaagagagaatatatgtgaagggtttaaaacggcagcctggattgtagtaaaagccctagatgtgttacctctttattgttcattgttagcactttgcatgtggtcagatatcttgacccttctgtttccatcttctggaagaactcagtttcacacccggctgtcctgaaagtcagccacagtttctccatgttggccttgacttggctaaaatcaagctgcagttctggacattctccctgacttacaagcccacacacccctcgaaagtggcaaagagaggtgaggctagcatcacttgtttataagaagcccatgcttgtccttggcccatttggtgtcacaaccatcctttactgttgccctatgctcctgggcatgtaggtgacccctgcatgggacccgcatgcctactggcttctggatttggctaatgggagactttaataagagatggtaaagctggaggaagggaggagccttctttctcttgggctcaggccccttctttggcggtgactccatggcttcaggtctccagatgggtctaccagagttccacttctgttgggtgatccttacttctgggctttgagaactccaccatctctttttgtttctccagtctgggctgggtagtggcttcctgatactaccaccctctgagtttccccagcattgtctcctaatccctgtgtactaattttctagtaaatttgctctgttttaaaagttaggagtggtttccttttccctggttgaatgctgtctgatgtgaggctgtgctggtttctggtgattatttcttccttttttaagtggtaagggtgggggtggggggaacctgatttaatcatctagtctatttttttttcctgtatcaacatcacactagcgtaaagtatctgaaatacattttttttttcatttttaaaaaaagtcagcaacagcatttgtttctccccaggcttctcgcacccctcctgtttgctacaatttcagtcctcaaagactgccaaagtagttcatgatcacaattacaaatattctcaatgccttgggatgcaatttgtaaagtctagaggcttgaatctaatgaagtatccagatgctctcctgccaacttcttttctgtcttggactttaattccatcttaaaaataatctgctattctgagaatttgtttccagcaaaatcaagaaggtttatggtgcttacctgacttgagaagagccagaaagttgcccagcatcttcatcttttccctattatctcctcttggcaaaacccccataatcagagatgcctgtaatgcttaaaaccttccctgacgtagaagtaccagcttagagtcagggtttcaaaggttttccctactgggtgccagatacrtacaaagccagagaaactcttcaacaaaagaagccattcagtagacwggggtaaactgccagcaaagtaagatttgcctctgataagccacactggggataatatgcccttggatagctgagaaacaactgtatgttttaaagagtgcagtttttaggaatagtgtccctgagagccgggttgctttctttatcgtcagcaatgatcaccagcatgggttatgcatccattgggatttacttggttttatcaattgcaattaaatgttctttatctgtgactcctatttttgctccatatctttacaaggaaaattctctgaagtaaagctctagaattgggcctgtcaccagtgagagcacttcagaatgaatcattaatcattaattgccagtcccttgttgccaaattatgttattgctgccattaagtcatccagatgcaagcctgatatgggccttgcctatatgaggaaagttaagtgaatcactctaggggctctgcctttatcctgaggatcggatgaacttargtagcaggttacaaggaggcattgcctcagcctctatgacctacagttcatagacacaaaaaaccctagtgctaccctggatccagtgctaaggtcacatcatcactgtgccccatatgtgaacagttcctcaagagtttatcaagcatttttccctccattattacatttgattcttagaaaatcccagtgtgaacttggcattttctaattatttcataaatgagaatatcaaatcacattgcggttaacaggtttgatcaaggtcacacaacccattagtgatggcatctagacgcaagcttgcatatttccaatgtgaaacccaatgcttttgactagactcataaaaccatagcatctcgacatcaaaaggggcataagaagtcttgtcgtcccttctgctttgtggggagcacaggatgttccagccagctcttgtccttgttgatgacacattcccctgcctttgtgggtaacatggggagggtcagggtgagggggtgggaatggactgcatgggagtctcatggctctaaagataatagggataatttctctcaccaagagtatgagtattactggaattaaggggaaccaagttgaggtaaaagatgacgtcagagaaaaaggtcagcatcctgtagacatgaggtcctcagggcttagttgtgcatccaggaagccaaggagatgagaacagagacagagtaagcaggtaaaatgaagggctgactctgatgcaggactttggaaccataatgacctcatcctctctctaacatgatgccgcattgaaagggtctgggctttagccttagctgattagctcttccacattcaaacgtttcctgtgttgattcctaatctaccccctgtcacttctacccagtgatacagctctgagctttgaaattaaagggaccaaatctactccaccttccacaatggccctttatctatctaaaggcaaaaaataggtctcatctgaatcttcccttccctaagatgaaaaatcctgattcagagtgatgtaccttcaaagtcaataatctctggaacattgtgcatctcaatcaatgtgtacctcaatcatgtagagaccttgttacaatgcagctgctgagttagtaggtctggggtagggctcaagatactgcattttttatagactcccaagtttcgccaatattctggtcgatggaccactttttgagtagcaaggctcatggcctgtcttcactctggaggtccctgttgagaggttgggttcacagctggacaggactcaccagagcattctgaccagtgcagagtagagcagggcagcactgcccttgttaggtctcagtaatccttggggaaaatcagctgggagggttgctgggtagcatgggaggaggcagcagagagagaaaacatggcaactagaccctatgtrtggagctaatattgagggagggaagtagagcttaataaaccaagggccatgccttgtgyaccaggtttccatatgtaagagtagacaggtagcacatataaaagccagattaagactctgggctggagctaggaggagactggatccttagccatcatggcatttggggaaagaatagacagcaggatgcagcagcagctgctttgagaactggttcagcctttgggagtgctcagagctcagaggacacagttggctgtgccgtcaggtcaggcttgtgaggcttgcagcatgatgttggagagggagtctcctgtcagtacaagctgagttcacaagattatttttggttatcacatcacacaggagactcaagtagagcctcaaagcttccccaattggagaaatttatcatctggtgcctgcctagatgccaattctgatttgcttggcctattctcagattgggtcctctggagggtaaagatgaggaagatgcacccaaatccctcctccttctcccagttcccaaatccccaggccctgcttaataaaacaaagtcacccagagtcggagacagccttttagggactaaggctgatactaagcctgactctcatggaaaggrtatgcttggggtaaaagtaacgcaggtgttatcccactgaagggcttccagtgggatagccctctgaaaagtccctttcgattttggggccactgagtcagacagatagccttctatatggacctactgctggcatctgtggaaagcgcaccacattgccaatggccccatcagtagccaaccctgatgtgcttttttatgactcccatcacaggtcacattctgctccactgagcatttaagatgtaatccctgtggccacacctgactctgccacaaaagcgggaccctcccatcctctgtccatccctcagatatgggagtcacacgtggatgctgtcttgcctttagtccatttcctctatccctgtatcacctttgaaccctgtcaacacacttccactatgaacagaggcacaaatatccagagtctagggcaagttcccctaaagagtgccaaaggcaaagctggattttccctgtcccagggaatgttcacgttcctgtatctgatgtctagttagaccaaccaagcatggatttttctaaaaacctcctgtgtaaagtctgtgatttcagctctgctgcctgttggctgaactcattgaattcgtctaaacctctaggctctggactttcagacagcctctccgaatcccctgaatgttcttctgtggccctcaagtatgttcttttgtaggtttatggtcgttgctgaagctgcttctatttaggaatgtcttggaattcttttgggaaaatttttctaatactcatccaagatcttcactttcctttgtgtgtggacttgattctaccctgggaacagcctttggcatagttgatcatgccctcctttttgaaacattctcttctcttggctctaggatactacactctcccgggtttacttcctacctgtctggtcactcctgttccccattcaggcttatctccctctactcactaratactgcagaccctcaagtctctattctaggtctgtttctccttccactctttattctttcccagggtgatttcaccaacaggcccccacgcttcaaataccatctgtgtacatatgactcacacatttttgcctccaactctgacctttaatttagagctccagatcgcatttttgactacatactttgctggagtatatctcaagctccagttgccctagatatattttccccctaaagctattctttttccattgtgtctggaacccgtaaacattaccaccatccaccctatcgtgcaaagatttgtggtcatccttgacagttctttctcctttattccccatatccaatccatcaacagattttatctataactatttcargtaattgtctcttttatcacatctgcctatcttcactgtcatcacctgagcctaagcaactatcaactcccatctgaatgcccgcagtagtctcaaaactcatttcaccaatccactttggttccacactaaagctggaatgatctattggaaatacaaatctgaccatatcattgctccttgaataacacttaaatggtgccctgtcttcctttggttaaagaacaacagccctcattgtggccagtaatatcctgtgtggactcattcatgatgccctcttcagcttctttttcatctttccctccttgctttcttgccctggttatactacatttcttttcttttttttkttttttaagtacaacagggtgcttgccccattaggcaaggctatttctcctgctgctcccatatgctgctttcatggtccctttgcctggttacagcctgtcttcctttggaactcacccctattaggggtgaattgctccaagaagcaatgcattttttttaattatgcaagtatctatttacaagtgccatgtgcttctctgttcaaaccttaacagggttcaagtttgctattactgattcttgatttattaattatattcccctacccccaaccaccactaattgtagactctttgagagcaggaactgttcctgttttgctcaccactgtatcaccaaatgcctggcacatagagggtatttatgatcacttactgaaggaatgaagtatgagtctcattagaccaagctaatagcattgttcctagagtaataggatcctctctaggggctctttgccattgcactcctagtctctagaacaggacctggtagcaggcacactaagtaaaattkggctgtgccagtgagtgaatgccccagagacaacccttcctccaaatctaaataaaaagactctatcaatattgaggaaatttggatctgagattctccccttcctttatgcttgctacattgtggattagccacatctcagaaatcatgtctccagcctgggaaatgggggctgcatgggagctcctcagaaccagccctcgtccccccatccctraatgtcagaccagccctgctgaagagatggtggccaactctttyaggaattctctgggctgtagatgagaagagtctactcagtcagccctggaatttgatgagttggttttgccattagcttgtgaaaggaatgaataaaattcctcatccagaagtccttctaggaacagaatctctgactctacagacagcatagtttagcacacagcacatggccactcaatggcaaaataatgaatgattgaatggataaataaagtccacaactgtggttcactcaccctcatattatgttataatttatctgttaagcagcaatgatgaggagggaggcctgtgctagacactggcattagagagatgaatagggtgacttaccattctcactagagagacttggccaagtaaacccaacatgtctaagttacaacagcttggggaaagtgctctgagagaggaaacacttaatgctcttaagcaaaaaaaaagggggygcatcaatgtgctggagggcttaaacatcagtgcattttgggaatcaggaccatagcttttgggtagtagcattccttcaactcaagactctgctgagttctatgaataaatgactttaaaaaggagaaaactcaatttgcttccatgagaacaaatgtgtgtgggcagagacgtcatccttttagctaaacactaaacaaccacaaacatttagggagccctattaccagtcagaatctgtgctaacatgggaaaactaagataaacgaggcgtaatcttgcccctgaggagtttgcagaccactggaggagacagatgtgaaaacaaataactaataatattggtgcattgtagtaaaagatattgtgaggcatgtgcaaagtgttataaagtgttaatagaatttagagaagagggagaaactctcccaggggcacaggctcagagaaagcgtattggctgatgaagagtgagctgatgtagatgtggaagaaaagaaggaatgagttaggaagaggatggtttggactttaagctgcttcccacttaaaggctggcgccaataggaatataaatagaagcaggaggaaattcacttcgggtgctgataacccctggactactctctagaatgtctgaaataagatgttgcctctgatccctagtacgtagcatgaagatactggttcttggcattctttgcctgcttactttgttatggcataagcagaatggttgttttagggagaagggattgaggaactagatgacttgaagggattcagggtttctgaccactgaggtctaaaattggaatcaggaaacctgtggaattctggccctgacctttatcagccatgtgacttttagcaacttcccttggttttctcatctataaaatgggaaaatcagtatctcgtctacctttgggaatgtttgtgaggactgaccaggccagatccatgaagttacccaggatagggctaaggatgtatagtaagtggccagtgacctgcctcctctactgaggattgtgtcagcaagttaacacctggtagagcatgttgcattagtattaaatgctaaaaatggaattgatcagatttaagtgtttttttgaacccaaggtgtactcaagttcccttgaatatacaaactttttgccctaccatttgttccctataaagaacaaaacaaaaacctctttttatctttaaaaatctagttatttaaattgtgttgccccaaaataaagctgttatttccaccatttacctgaaagaataatgtagggttaggtataattcccagtgttccatggtttgatcctagagacaaagcaatatgagagaaaaaaaaatcttaacttgatttgccttaaggaaaagaatgcttcaacacagttgcccaagtgagaacctaaggcaactcacttaatttctctgcatgtcagtttcttcatctcaaaagaatctaatgataatcccaacctcacaaggaattggtcctcagaagttattaaatgggacaatgtaygtgatgcccttagcacagtgcctggcacatagttagcactcaactaaaggaagctgttgtcattatgatgattgtctrgtcgcatgtttgggtgctttcaacattgctatccttccctttccyttcctaggtgcctccacccagaattctaacactgtggagccagagaagcaggtggacaacaccgtgaagatggctggcgtgatcgctggcctcctcatgttcatcatcattctcctgggcgtgatgctcaccatcaaaaggaggtgagtctctgctgctgcctgcaagactctgctgacccraggtgacctcaacactgctgtgtggccaggtttttgctctgttgatcattgtccagcagggatcttctgttataaccattgaggtccggaaatacatgggccggctgtggttcattgtgttgctgtttgaagggtgcatgctgcctgtttggcaggtggtcctgaggtggccattttcttatgggccagtgatccctatgactgggccaccgcgatgtgccatgggattccacgtatcatgaattgagtcttataggagttaactgctgtgttgttatcaatcatgtcatcaagatagctcgggagccccaggaacatggatcagtccagaaacgcagttgcaggaaagtaatgttttaccattctcacctccgtttgcccctgatttccactggtcaaataatagcatcccaggctgccctctccatgagagatagagtctacagtggtgtgagagttcccaattacaagtcctattacaggctctgtactatgtcctgtcccacagaaccttcccagctgggttgctgttgtttgtcacctctcaaaagcatgtctccctggactcctttggccagctactagtttgctcatactgtgtgttttctccagttgcatttctcacgaaagcatgcacacagattcctcccttatttccaagatgtactacaccagcatcctctgtttaagaggcattcacaaggcttgaggataacacaaggaaattacagagggaagaaaatacaaagggtgaatatcagctatccctgtccacagggtgcactggttattcctctaaacagagagtcttactcgcccctctccttagcccctgcctgccaccatgttaacacatctacttcccacctccacgtcttctcagtttcaatgccagggccccaaccttagtctctaccttcccactcctcagtctatcatagcaaacaaaacatttatccacattataatactaggtggtgtattgtgccctgctcccaggcaaaagagccttctacattattaaccaaaccaacacctcagcctgaagctctgggtttgcttatgcacagagttcagggcaaccccaagaacaagggctgggaacttgcttccatctataggatgaaaaatgctcatcaaatgtgtttcctaccagaacaaaggaacagaatacccctaacaactaattccagctcctaccttaggaaccacatgaatataaaatgaagaattttttaaaagcaatatccccatttccagcaatcagtgatttagaaatactagggtccccactacacatgcagtcaaccctctcttggctatgcaagccccaggatgtccctctctctctttctcctggttctgctttggatcaaccatactagcctctggccagggcattaaactgtgaggacatttcttcttgacatttttctgtctaataggatcatgtcttgcctcaagctcccagcacaatggcttaagagctaaggttctcctccatctactgattttctggttggagaaactaggggtaacagaaggtattatgttaatattgggggtgaatagccctcaaagggttaaggtcaacactacattgtcatatcaccatcatcactgataacacatggccacattatatgtcccagtgactagtctgctgctattacatagggtagtatatgacttttgatttctctgggagcagtaagcacattgtacatgtaagatcactgaaatgtttcttagagttacagatgtattagaggcagaggtgaaatgtttcttagagttacagatatattagaggcagaggtgagtttgggattgtccacccaaattaatggaactgaatacctctttgatagacctgaaattttattattctttgccactgatttgtaaatcagatatgctcttccaattttgctctttctaaagcctggcttaacccacgtcaccatcatctgtgagattgtgaagaaatttcacttccttctcacagctatttctgaaatgtgtgagtgtgactttttgggagggaggaaaaggctttatgtttccagggtaggagcaactataaaataagtcctttgtggtagttttaacctcctctgagtatcttcatcaactctcatgtctatcaaaactgtccatcagacccaatcaacaggcatcacatgatcaccatttctccccaggaggcaaaacctgggcattgcatgttgtggggtgctaatcagtgtttacatatatggcatcttttgaagaaaataagacattttgttggcctagttgattggaacagtttacagatgggaggggagggtaggaggagaagaggagaaaatggggaggaagagagaaattgaacataggcctgcactctttccactaacctacaatgtcttcctgtgtctagagatgccccaaaggaaagcgaaattctgtgtacctcttctgtccccagctaccccccagctgcatatatatatcaatatatactacactgatcaattgagtctgctaccaacttactgttggccagaatactgtctacatctacctcaaaggaagatgtattcaagtcaaagaaacttccaagtagcaggctcatcaccatagctcaggatactagtgttaacatctcctcagtgtcctatcatcacctacagtgcttggactcagaagttcacagaggccaacactgctacaacccctccactggcttaagcttgcctgggtcttctccctgccttccctggtcatggacatggttactttccggggttttttttctgctcctaatagattcarctgactcaaagcccccctaaagctataaccacagatgtttccagaaacataagatgtccccagcttctccctctgaaggtttgtgatcactgactttagagcttccttgccactgtccaaagagagtctttctcttcctgttaggggtttccttttatgacacagaactagaagacagacagagaatgggcttgagatccatggatgaagggaagggtttaatgaaaaaagctaaattaatttatatttagacacctgaatacaaaatagaggagggaaaagagagaatatcaacaaaacttgagaggtgttttgttgttgttgcctggttttgttttgtaacggggggagggagatcttgagaaacgaaaaggagaaagggatatgagatgttggtgggtgatttaaatgggattctcttatagtttgaaagagaagcaagttaaagtttagaattctttttgcattacctttggctgtttgaactgggctgtattgaatgtggaaccatatggaattaggattgcatggacataaacaggatgatatgagcattataagaagggatcctggagcccctcactgacagagttaactaccagtgtggttttagccacaccaactacacaatatccatccttctgctgtcactagatagtggctccatctttttcctctggatctgtcgatcacatctagagttctgaatgttctgtaatgggtaccccatgtcattatgtagtaaaatgtacctccttttcatgagtaccatgttaagtcctgacataagagaaagaccttcatcactgactcagcactgcagtcctgatcatcttcgtcccttgcctcctccccttagaactgttagacatcctccccactcctccaaaaccagcaatcaagaggttgcatgaccaactctatgttttcttaacttaataccatggggcactgtgtgcctttaatgcaaattaagatgaaaagatcaagtattattgccttaaccagcatgtctcaatagttgaaagtgttcattagccactcacatatgagaaggtctacaattcaatgtttgtttgtggagcgtgaaattatatgtatgcgcacacaagtttcatatagctcgattttatcccttgggacacacttcctggagtctgaacatggtcccttaaagctcaaagcatggccatgcacttatgcatagggaaacaccaaagccaagttatgcaggacttttcacaagatccgcacccctggacttgcctggatcctacactaacccgtccatcacattttaattttcaaatgagaactaggaaattttagggaggtatattcaaagttggtaccatccatggttctagccagaccctgtctcctcccctgctcccctgcccagctcgtcctagtccagccttaaccttttgccaaactttccttgtctgtccaaatggaaacttctgttccaagagtgtatttggagtgtcttgagtataaatatgaatgtctattctgatattttatatgcatctctggttatacatcaattctctgtgacttgtacctgccctccagtagctctcagtctaatgggacagagaatcagaaaaactggccccaaatttttagtcctgtttatttgctgtcaaccttgcagaagcaacttaacaaatcttagcctttgctttcccttctatgaaaggtagccagttttatggggctattctaaagatcaaatgagctaattattgaaataggctttgttccctgaacctgcttaaggaattacaatgcacaatatctacagaaacattcatctccacatgaccatcaactgtaccaggccagctccaaacccgttactaatatgctaatggcagggttgcaatcaatgctcacacactgacataatttgcatcatttttcatttaaactgcagctatactctgattttaatattcctaataatcatagtaggttaggtctgttgcttgtttgaaaagaagaaactgaagttcgaaaagatcacgtgagttggtgaacgttttgggcagagttgatgtggaaacccagtctcagtgtctctagagctcatgctgctaccttctactctgtcagtccatggagactgacaggaaataagcaaatcctggactaagaaacatgtgactcagattcggtaccactttcctctctggggcttgtttttcccaatttcgctattttcttcttttgagcatgctgtttccctgaatgaaatgtcctgagatttctcttaacctacaaagttcctatcacactctgactctcagcctcttgttcttcctagtaggactcccaaatgttaccatctcagcaaagcctttccaccagcctcctgccccaggaagatccagtgatgttcctctgcagccactgtgccatacatgctagtcttcatttgtgtatttatcacactacccggtggttgtagttttgctggcctgaagatcagtcttctcttgttagagctccattatccatatcatctgcccctggacatctaccttgaaaatccctcaggtatttcgtagtcaaagtcaaaatcattacctactccccaacctgtttcccatctcattcacaggcactacctcctatcccatcaacaaacagatgggattccaacacccaggattctctacattctcttggtctcattctctctctctctgtctctctgtctctgtctctctgtctctctctctttctccccctccctccctccctccctcccttcctttctgcctctgcctctgcctcctcttcctccattgtcttttccctgggtcagacctctatagccctattgcatgagtttcctcactgaccttcctaactgtgccccacccctctaacctatcctccatactgtagtcagcattgtgttaaaaaataaagctcgtactctcaaacctgtcatctgaaacccttcaatggcttcttctccatagccatggttcatgaggtggaagtgagggaagaagtacatgtctaagtcacctggggaactttgtcaagtgatactgtctccctgcccatatggaaacaagtttcttagttcttcttagctttttagtttttctatttttttcttagtttttctgacaagtctcctaaagtctcacctctgctccataagttttgcttacgaactttcttcttcttcaatgcctgtgtttctcagctccatgtgaccagctattacccatgtttaaggactaattcagtaggcactttctcctataaacccttcctgacctttgatctggacagaatctcttcaccatctagatcccctctgtgaggacccatgttattttctgccttatacttttcctttgtatttgcatcccatttcctcactagaccatcagctgtctattctgattcatcttcatctccagtgtgccttgcaaatactgagaatttcctaaaaacatgttgaatgggagagcccagtggaattagaacagatcaactctctatggattatacaagagagcttcactcagagaacagacctaaatgtcaacattaagcattaatggttcgtgcaccaagtcctgtggtaggagggtggcaaggcaaggctggaggcagtatgtggaagacatgccatggtctgagccttcagagagcacattgccacaaaattttgttttgttttgttttgtttctgggtagacaatcagaaaagctaactcaggccaagctaaaagagcagtgcactttattaagggtactacagatcagaaaactgaaatggaaatagagtttaaggaaattacctggaatcacatacctaataaatggcagagttgggtctcaaacttggacaatctgataatggagtccacactctgaaacatcatctaatctggattaaatataaaacaggacctgctgagatgccaaattctgtggcataattttgagtgatttatcgaggtgggaaaaaagcccaaacgcccaaacaaaatgtgtcatcttctgttcatcctgttctaaactgctccttcctctacacctgaaaattgaatcctgctccttctgcttgcactcacgtggacagccacttaagctgagaacttggaagtcttcttcaatacattcacatttaatcaccttttgattttgtgtcttaaacaccttgcacactgctgacctttcttccccatcccatggccactgcaaaggaagcccctggtatttcttgtgttggccagtcagtgatggtgtaaccacattcactctgcctttgactttctcctcaccctcctgctaaaaataattcacctacaagaaatatttggccacatgacttcctgggttttccctgtgacctatgggactgagaccaagctgcttaaactctttgggaactagcccttccaacatcttgccattcccactttgttaacccacctgcccaaaccacaaacacagttccatctacctaaaaattcccttcccctctcctccatctgacttctcttttactttaccactcaggcatcccagattttgggccatcttgcctgctttccctcctcactcctatccccaggtatggactgacagctccatgtgttgccttatcatacaatttatcatgacagaagataatacaatgtaatagctattaatacaggctctttaaatcagactccctggattcaaatccctgccatgccacttaacaactatataaatgtgagaaagttccttaacctctctgagcctcactttactcatctgtaaacagggataataatgcctcataaggttattgtgaagattaaataaaatagttcatgcaatatacttaaaacagtacctgacacatgattgatctcccagtatttaagtgacagctattatcatctgctttataatttgctagtctggctctctcatcagacatatggactagattaggatctcatatgtctttctatctgtacttgacagagataaggatatagtaggcctttgagaagtttctgctgaattaatgatggaaagatggataaatggatgatgggtgggtggatggatggatggaatggatggatgcatgcatgcatgcatgcatgaatgcatggataggttcatggatggatggatggatagatggctgaacaggtgggtttgtgatctagatggatgggtaggtggttaaatgggtsgttagatagacaactttgtcctgtttaaattgtatggaacaaaagaaaactgtgcctgaagtcaatcttgtgagctagctgaaaaaaggttctgcagtatgtgatttattaagtttggggttattgttttgttttgttttgttttttctaagcacagctgtcttcctgctcaggatttttggtttcaggcaatctgttacttgcaatatcactgtatccttgtaaatttagaccttcagtaaatcttcttcaaggcttagagaaaaacacacatgtaaactgttttggtcacagaataaagacctgtgatacttgacctagaagactttgcagtttaattgggaaaagagattcaattaatagaagtttgtcagttaccattatcctggagttgccttgctgctgggtcagagatagcacgagaaggcttttggtgacacccaggataactcagaaaagcaacttggaaaaggtggtctgtggtttgaaggtgaagaaggaagcatgttttcttggctcaggctgaggtgaatcctgaaggttgacagcagaaaaactagaaggtccagaatgctcagtgtagctgaggaggaggtggctgctgacagtgagagcatccagctcaggatggaggccttgcaactggtccaaagatacacaaagcctttgacctagtgaggcatggacttataatcttagattcctcagctaaccgtgagagtaattatatctgctcctcagggttgtggggaggattgaaagagataacgttttgacatcccagtgcctgactccccagatttctcaagatatatccattttcttctgtccttgaaagcagcacaggcttgaggtcaagaacatgagctatgggctgggcacggyggttcatgcctgtaatcccagcactttgggaggctgaggcagatggatcacgaggtcaggagatcgagaccatcctggctaacacagtgaaaccccgtctctactaaaaatacaaaaaattagccaggcgtggtggtgggcacctgtagtcccagctactcaggaggctgaggcaggagaatggcgtggacccgggaggtggagcttgcagtgagccgagatcacgcgccactgcactccagcctgggcgacagagtgagactctgtctcaaaaaaaaaaaaaaaaaaaaaaaaagaaagaaaatgagctacaagctttatagccatgttgctatcaaatccagttactagctgtgtgatctgaagttacttcttgtttgcctcagtgtctccatcagaatagtgggaatggcactaattcctatcttttagagcaactgtgaggaatacatgagttaatgtgtgctaaagctgagaacaatacctggcacacagtaagtgctgaataagtatttgttcatattttattattcctaaagaggkgaacactttgttcctggtgaccagaataagaagcagtaaaccttatctctgtggatgaggtgcagacataarccaccctttactgagccctaatacattccagatgtttagattaatataatctaatatcaatttagattaatggaatttacatagaatactttatatattacatatcatatctaatgtgagtataatttagattaatataatgctaatgcctatggtgattcttgggaatacataattattgtccccaagcttgagatagagaaactgggactcagggctgtttagtgacttgttcaaggtcatgcagttagttaagtgatggtgctgagatgctaaggcttattgtatttccactcctgaaagctgtttgagctgtcggtcatctatgccatccaccttggtgcatggatcaggaaatagaggtccaaagggaagaagaagaacttacttgcccaagatgtcacaatgagcaattgaaagatctgagattataatgctggcctcttgattctcagctcagtgttcttgacaatacagagaacacaggtgtcctataagtcttcatcaaatggaccctgagttttgtgtcccaggggaatcaccttccaggcactggacctgccagcagtgaggtaaagaaattatctccttacagtgctaacgtgtatggctggtgaaggggatttgatgactttctgtaggagcttccaattcccactcattgcagtccccagtccttcaccttctcatcatctagggtcactgttctttcagtccaggatattgaacagttttctatgtggccagatcttgctgcactgtggctcattttccctagctcagccccctaaggaggtatggggctttccttcttctgtggcttcttaacttttagactcactttcyttctgggtgtgtagggttgggctttgctttaggagtgatgcagctctgggctcatgtcccgcctctatcatgcactggttatagagcctcgggcaaattttctaaactttttgattctcttttctcttaattataaaacgagggtaatggtgcctgactcacagagttgctgtgaagaggagatgagatgatgaaagaaagactagagatagccccatcttgggagttttggatatttcctacttgagatgggaaaatttggggctgtgaagacgtatcccccactctgcagttataacgactgtattttcctgtaccaagcaaatgggataatggttgcaagtaatcaaatagttcaagaaaaaaggaaaccattcttgtctactcagatggatatttggagacctgaattatctagccatttttctcaatctataaatgtatcatttattgtcagtatagctgaatctgatgtgaaataagaacactcctatttattttcttacaacataagaaaagttataacaaagggaatatcatgcttttatttgagttttgtgattgcttagaagccaggagccagtaggaacattggaaagagattgaagccagtgatttttgaagctttcttttggagaatggaattctcagccatatgatatcttaaatgaaacttcaaagtataaaatagataaaacttcaatatataaaataggtgctttggtggatggtggggggcagcagcctcacttgctcagtaccctccttcttcattacacagtggctgctatagaacccccagacttctgtgaacacagttggaaaattactgatctagtttaatggacctaagggacagatgcagaaatgaaggaacagagagtttattcaaggtagagtctgttcagactgaaggttggaactcctctctctcagtacagtgctcttccaagataaggttggactttgcgccggtcatctactgccatgtaacaaactacccccaaaatctaatggcttaaagagcaacagttatttatttttctcatgtgtcttcactttgggcagagcttgaagggaatgacttatttctgttccgcaatgtcaatggtctcagctgagataacttggttggctgaaagtaaaatggctgggggctggtgggacatttctttctttttatgtagtctcagaggctctcctgtgatctctccagcatggtagcctcagggaaactgggcttcttctatggagactgagggttctaagagagagttatggacagagctgagaggcttcttttttttccccagcttggaaagtcccagaacataattcctaccacattctattcacacagggtcagtcctgactctgtgggagggcagtccacaagggcctgaatactaggaagtgcagatcactggggagccatcttgggtactggctatatgatttccttgctttgggtatgaccttactaaatagactctgatgtgactttatctgaaatagaggagacagaagaagtttggtgttgcttagatcacaggacattatcatagggaagagtggtagactagtcccaggaagccacagagagctgatccaataccctcacctgcaccccgccgaccaaaaaaaaaaaaaaaaatcataattacaaggaatctagttttggttgaccataaggaagaactttgaaccaactacaacagccaacatgaaacatggcttactctatgtgagaccatgggtttccctattatagaagaggtctctcttgtttcttctaccactggaaatatctgattctcagtgaagatgattagtagaggaacttgcatctccttgagcttagggatgctgaaataatatgtgcatttctaagaatcaagatttcattaaaaatctaattcttgtttgtttgtcttttctttttcccccattttggacatttccttcatctgactgcccatcaatatatagaagaaatgcttattcctactcctattacttgtaagtatcgagctggtgttaactttgcttcgtgccctgtaagggaacctgtagcatgcatttcctgcaccaaccaagtgtctgttagtttctcattttcacttctgtctaagttgtctgtagccttaaagtttttattttgcataaatgtgttacatttgaaagtgcactgtcattgttcaagttcgttatgtttccaccatcttggatttttttcctcttatttttagagatgtgaagggctgtttctcctttgtgagtgtaattttctagttaggaatccctgaattccatcaagcaggggaccaaatcctgctgtaggacttgcacacatgagacagaatcacagtcttagcaacttctaaatccatgtgtttttacttggagaatgggtagccctgggggctcaaagtttagaaaggtattcattggctgtttatgctatttcagaaagtctgcagggattcattactttatctagaaccggcctcacaggtgaaagaaacatccagtgtctttgctttgggttgggattatgtgtttggtgtttagcattatttatctcatattatcagtgcattttgttgggagttatagatgggtgcttgcttatccatttttttgcacttgctaaaaaaaagtgattatttttcttattaataaaacagagggccaggtgcggtggctcacgcctataatcccagcactttggaggccgagagggcagatcacctgaggtcaggagttcaagaccagcctggccaacatggtgaaaccccatctctactaaaaatacaaaaatgagctgggcgtgatggcaggcgtctgtagtccaagctacttaggaggctgaggcaggagaattgcttgaacccagggcggaggttgtagtgagccaaaatcgtaccattgcgctccagcctgggcaacaagagcaaaactccrtctcaaaawaataataataataataataataaataacaacaacaacagagatgctcaaaacatgatagtaaaggagaacaactctgtacagtagatccttggtgataaaaagttagaaagcccctgaactagtccacattcctaatatgcactttctatttttggaaattgagaggttgtagggaccttagaaagagattgaaggatgtgaattcattgaacatccagctagcaaaagagtgggattaaaacagagaatgcctggcttccggtaaaatgtattgcttagcgctccatgtcttccctcacctctggcaaactcagctttatgagagaggctgtgcctaatagcattacctgctgaaggcttcatagataaagatggagccagcaaaaggcctccccatcccctctgctcagtgtggggtccacaggtctttaggacgggtactaccaccctcatgttatatgggaacaaatgggcccccatcaccaatactggaagtaccagatcacttattcattcatcccacaaacatgctttgaacatgcacattatgtttcatatggtgtggatgaagaaatggctagaacccagaggttcagcctcacagtatgcaagcctatctgagagactagcataacgtcacctattagaaacgttagctgagagatgcctctacatactgtagtacaggaacacttagttgagtgatgaattttttgtgtggcaggggatagktatcagtgtattcagagatggctttacccattactgaaaaaattaaaattctgattagaggaaactgcatctgcaaagacacggaggtacgaaacaatatggtgtgtcattgctatggtggaaagagaatgagcttcaggagtgacgcagctctgggctcatgtcccgcctctatcgtgcactggttatagagccttgggcaaattttctaaactttttgattctcttttctcttaattataaaatgagggtaatggtgcctgactcacagagttgctgtgaagaggagatgagatgattttgtaaagtgcctggcacaaagttgacactcatgaaatattagttttctttatttcccctttcagaaaccacagggttcatggcaggaatagtagtccctgggagcccctctcttcttccagggcctcttagggtatgcatgtttcacagcagatgtgggcatacagggacccatcaccacctctggcatctaacccccatccctctatcagccagtttgcctatcagggtctttgaatgcccactttatacagtgctgtgtgctgggtgctggggtggaatccaagataagcagtgtgaaaggacagaggatggatctgcacatacttgcagttgaaggtgcaatgataaacacaggcctttcaattggtgcagacatgaagttctgtgccacaggtcccagagcaggaagctcataccagcagtgggatgcagaagcatctggataggacacagggtttccataattatattcattttatattcaccaaccccaaggcccccatgacggtcatatattgtatgccactgcaaatagcctgccttctatacagaaaccttaggtggttacatttcctcttaagcaccatcttcccatcccaactaccaccaagcacttgtgatagatgaaccagttgctagacttaaagggatcgaacaggtaaggtatatttaatcatttatacaggaggggagaataggaaaccaccaccacatgccaagtagtctgtacatacattagcccactaagtcctccgaatagcctagtctggtaggtaccattatccctatttaatgggaaagaaattgctctgagaagctaagtcattcccccaaagctacccagaagtagatgggagggagaattgattatcctggaaatggagacrtcttggggtgagaaatggtcatgtgagtcatatgcatatgactctggatatattgcagtgagaatgctggtggagctcccaagcaaaagcatcccatgggaacttagaaatgcagaagtggagtctaggtaggacgtggatgtttggaaccttcctctgagaggttgcagatgagagtgccaggtggatgaaagcaggcctggagaaaggggacaagaacagagggctaagggctaggggctgaggcccaggaactgaccatgattaaagaatcagaagaggagaggaactggcaaagcagacagacaggtaggagaaaagcgtaaggcccaagagaaggcttttgcagcaggaggagttggttggccrtagcagatgctgcagaggatggagggggtgggtttgggcacagcctggacatttggccatcagaagtaacttgtacaggttgtagggatgaaggttgaagaggtagccagcctgcctggggaccatgagtaggatcacctttcacctttttttttttttttttttttttgtaaaacagagaagaaacatgatactggctacctgaaagatcagaaagtcctgggcaaagatttagttatagtggaggagcctgggcagaaggaaggggctgaagatactggagttgggggctatggaagtgaaggactggaggcgaggtgtttggggacagggaacagtctgggagtgggggaggagggagaggccttggagatgataggattgagagagagccatggagatgaggaagaggaaacagaaaggaaatgatggccccccatgtgctagtatatgccccgagggggagccttgaagcctcactcttcagtgtgtggaccctggaccagtagcatcagcatcacctgggagcttgtcagagaggtagcatcaagggccccagcccagacccctgaatcagaatctgcattgtaacaaggtcgcaggtgattcatatgcatgttagagaatcactgacttaactggagtctcagttgtcttatctataaaataggaaaagtaataccctcctcataggtatcaggggccacctggtccttttaatgaataaacactgatttcattgaagtgtgytctctcttcaacacactttggctcaccagtctcttcaatgaaatcagtgtttattcattccaccaatatttgtggaatgtcctctgcatgctaggcattggacaaggttctgggtatataggagttagcacaagtaaaaattcctgcacacgtggagcttttttagtagaagaggtagaaagtaaacaacatatataacaaaaataaatagtatgtagtggtaagagctaagaagaagaaataaactagggaaagaggagataaagtatggatgggggaggagcagaggaattctatatttcccccaaaataaagaggccatcaagtgctctccatctttgaaagtatccctacatgagaacagtggtccacaaatattttccataaggagccagacagtaaataattttggctttacaaacccttgtgttctgtgttgcatctactcaactctgatgttgtagcatgaagtcatagctatgtgtttgaatgagtgtggctgtgttccagtagaacttaatttttaaaaaccaagcagtgagccagatttggcccacaggtcacagtttgccaattcttgccctagagttttgagcgtaggaagagtgtgacagtcaagattcatcctgtcttattgagctcctgccatgtactttatcccgtgcctgatgttgcaggcacaaaagtgaataaggcgcaccctataccagactacaaaagggcagaagttgaaaggcattaccagttggtccctactatatatacttacccaatgcttataacaagccctgcaaagtatatgttattttgttgattttatttagatgttaagactgaagtctgaagacttgtctattgctcacagccagaatgcagcagggttaagtttgaactcaggaccacatggcccacaagccctacccattcttcttactaagccctgttctttgggagatgggggcacttctgcctggaccacgtgcttggagcacagcagccaggttgaagaagagccaggtaccaaatgcaagtctgtctgcctgtagggcctcgtttctgtgcatggccatcagtgcccttctaggcataagaagtggtagctattccaggctggtaaggaggccgctggggcagtcctgtctctgctgtcctggggattggccacatgatgtggctggtcttccaagcagtgctgtgcacaggcaacatgttgagaggagtcagagctgagggcactgagctgctgcatcagaggtagccaaagggttagagcaagaggttatgaaaggggtgttaatgaccaggataaataacagcccaataaaaatggagctatggaacagagggatctggggacccagggacacaggatagttaaagataaggcccattattgtctctccagtatacacgcacacgcacacacaaatgtgaatcatgtgggttttggtgtcaggcctatttcacaattctaggtttgcctctcctgtgagattgtttccacctggaacactcatagaaacactctgagcctcagtttcttcatctggaaaatcatgataatagcggtgacttcccagtgttttggtgaagggcaacgagagagtgtatatgtagagtggctggcacacagtaggtattttataaatagcagctactattcctcacattctgagctgacaaaartgcctctctgggatccctttttgcctttctgtagtaaagcagaccccaacaacttcagtygttcagtgtttgcctttttaaaggatattaagagttggcatgtgtccacaggttaatttacctcaaggtgtgtgatrggcacagtaattgttttgaacagaggtattttactgtagtagttcttgagaaagcgcgaaggtgtttaccaattgttctggctgagagagagcacgtaactacttcacttagccttggacaaatgccttgtgcagatgtctccgaggcagaaaaccgtgacctgggctggtttctgtccacagatactccatgggactcctgggcttttctatagccttctgatctcctccatctcaatatattcaaatccgatatcattcttcaaagtccagatcaaacactgccttctacaagaagtctctcatgattctctccacctgtgggaatggcgcctttctctgaactgcagttgctttatgttatgggcaggagcaaatttgtcttaaggatgttgcttgctcattagggtattctccatggaactcctaacacatgcagtgaaccccagtaagtgcctgtgtaatgagtgaaggaacaagatgaatttaaaagacatacggacatacagctaaagtcaacagggtggtactctgttcttgaaaagaaaaaaaaatgacatcattttttagataactctagaccttgtaacttccttgcttctgtgggtttaaggccatttttgcttctatttttgcatctgtgtgacctgaacaagccactcaactttttctgaatctcagttgcctggtatgtaaaacagagacaaaaaatacaaatcttacagaagaagtctcacaaagattcaatggacataatgtaaaatgcctagcacatagtagggcctcaccaaaataagagactgctcctttcttcaaaggcaaatgccttttcacatcatcagctgctgtgaagcagatatcattgcttcaatatatttaaacaggcattttaaaatgattccatcaagagatactcaaaagttatttaatgtaatttatcagccactttgaataaaaatgaagaaaaaataggaatagaagaaaaccatttaaagttgctaaatatcaattactagtaaatatcaaattatcaacagcaaacatgttaataggtgaaaatgtaagacattaccatgcagtcaagactaaagtggttactagcagtgtggctcttcagccaagaggagaaccttggtgggaagtctgattcctgagcctcaccccccagatctgctcagtctccttaaaagcatggcctggggatctgctttttaacaagtatctcagattcttatttttcctgctgactttgagaacaactctcatggcatcctcacatcactctgatttaattgtccctttcataatgtttatccctgcagtgmattcttcctggaattcttcctatcccccttgtgtgcccagaaaactccagtatctttataaagggagtgtcattgttctctactttggaggccccctccaatttccatggaccatatccatagcgctgggctcatatctttgtcgttgcatttatctttcattccttcacccattgacttactaattcatgatcccttcccaggttatcctgcccttggcatctttgcatgtcagtctccatgtagggagaactatgtattactcatcattcatttcccagtgactagatcagtgctcaggacaaatcaggcatcataagattgtgttgattagatgaatgaacaaagatacatgagtggttatatgtgtggagttgatacccttccaattttgttttgtctctcattgagttatattattctattctctagaagttagttaatatccatgttcacttattttggcctacggtgatgatagagctttcagatcacctattttgtagtcttatatgggttttaggtttagaaatgttgcattggtacttgcatgacacaattataaatgtgtaaaattaatgactgctattacaatgagatattaatagatataaatgcactgggctagaccatgtgtactgatagatttggatagggattgcaactgaacggatgctttattgtttactctattgaactggcgtctaaacgcatcagtcacgcatgccaaacagagcaaatctgtaagtcagaggctctgtcactttaatcaggaaaaatacaaattttacctccaaaggtggcaaaaggtgtttatatttcagttataaatttatacctaagtttaagttttattatgttggtgcaaaagtaattgtgttcattactattttaaaaaggtaaaatgtacctttaatggcaaaaaccgcaattacttttaaaccaacctaataataccaaccaggtattagtgatgtcttgaggcttagaaaagactgtctgtgactcttaatgcttctacctcataaacatacttgaactttataaacaaggttaatgagagtatggagattctctgctaacagaaaggagtaccctactgcagtgtggttagaaagaaaattcctgtggaggactctgtgatgtgctgctcagatccaccttcaagaatgagggggctgggcgtggtggctcatgcctgtaatcccagcactttgggaggcccaggcaggtggattacctgaggtcaggagtttgagaccagcctggttaacatggtgaaaccccgtttctactaaaaatacaaaaaattagccaggcatggtggcacgtgcctgtaatcccagctacttgggaggctgaggcaggagaatcgcttgaatacaggaggcggagattgcaatgaactgagatcataccattgcactccagcttgggcaacaagagtgaactccgtctcaaaaaaaaaaaaaaaaaaaaaaaacaatgagggactttccccattcgctacaattgatgctgacagatgcctatgaaagaatgatcacccaaggaaaagctttttagagtttttgtattatcagtgagcaacaaactaatgaccccaatcggtaggcaaagtgttcataggcaatgaagagtgcatttcaggggagggaaacccacttgtttgtgacactaacagccccccttcagaacttgccctttggagccgcctcactcaaagtcatctactcactggttgacacagggtgtaaaagcaaccccagcttcagggcctcccctggggttggctttagccactgctccaactgcatcaccattcaacctttcctctgcccactccctttctttttcccttccctttccttccctccttctttcctcttcccttcctcctcttccccttctctcctcttcccttttatctacaggtgaagcttccccaatacatctcctgcttgtcaatctctctcagagtctgattgattttcagagaacccagcttgggactctcccattggcttttctggagacaagtgggtttcccaccactgaaatgcactcttcattgcttatgaacactctgcataccaactgattggggttattactttgttgcccactgataatacataaactctaaaatgtttttccttgggcgatcattcattcataggcatttgctgttcacctgtgcttgtgctggacytgagagccacagagatcttcacacatagctcctgcttgggggagctgaagatgtatcacagagaagaccgtagcaatacccttttgctgatccagccagaggagagaaccagggtcagaagtgcccagccacagtgcccacttagcaatatgtctccaaggcaggattgggtttacttccgaaagcactaccttcagcaagcatcccccaaatgggaaggactcttacagctagagctgtagcaaagatgggatcctgagatgcacaaactggaaaatgcctttctaagtgtttcaaaatagtgcttttaatggaaggaaatgctttagttaagcccctcaatgttgatgatgatgctaatgattgcattttgtttgtttttagggatttatctcttccaaagtgctttcccacttattacctagttgtctagttaagcttggaggtatttcggaagtcattattagatagatgactgtgccaagcaggaaaaagccctgagcttcctggctccacagttttagataactcacttaattccatctcaacttcagtttctcatctgtaaaatgggagtcataccacttacattttacaatagctctgatgtttaaatgacatattatttcattcataagcatttgctgagcaattcccttgtgctaaggagagaaaattgttgagtctttagtaagaaataccctctcaaggagcttgcagcttaaaaggaacttgaacgtgttaataaaacgttacaaaataatgttacaagtgcatgaaaagaggagcagtgaagacataacaaaggcaaggaagtcactgattctattttgaggaaagataccatgggttaacgggcccagtaaagtttttggtataaagtagatgcmagatgtttccttaaagaaatgacacatttggcctggtgcggtggctcacacctctaatcccagcactttggcaggccagggcaggctgatcacttgaggtcagaaattcaagaccagcctgaccaacatggcgagaccccatctctactaaaaatataaaaattagcctggtggggtggtgcacacctccagtcccagatactcaggaggccgaggcagaggaatcgcttgaagccgggaggcggggtttgtagtgagccaagatcgtgcagctgcgctccagcctgggcgacaaagagtgagattttgtctaaaataaataaataaaaaatgacacattcattcacttttctcctcggcctcataacattgaaacacacacacacagaaacacactttttttcataacttaatttgatagcrtgctaggaaaaaaacttaaaaaggcaaagaagtggaagaaaggaatgctatagagagggaaagaaaggggtagggagaaagtttgaatcctatttatactacttagtagctgtgaatcctaaaccctctgaggttcagttttctcatctgtaaaatgggaatggtagtgttcaattcatgggattatcttaagaaattaatacagtgtacttgccaggggaattattgtcatttatgaaattatagagctaggctagaacaaagcagtggtttgatatattggagggagggagagagagagagaggagagaggagagatcaattgtaactagcagatataggttaagtagaagaagaatttgaaaatagaatgaagtaggaggattttagatggtgttccttaaacttcacagatttttcccctccaagcaattgggtaagacaaccctcctcctggcatccacccgtggtgatatcaacaagaaagaaaagagataactaatgattttggctagaactacaaaggaagacaatgtcatttttatacaagaagactctgtagaccggtgggcagagaaagagctggggttgaatggggtcgggagagtgcactaccatggccatttccaaatataagggctgggggacaggcttgtttattgagatgtggctggcaacaccttcctttaaaaaggcaaggttgtcagaattcgagagaggccaccatattctgaacaatgccattagaaatgttgcctttctgggaacagagcttagaggagttggtgtatttgcrggagggcactcagctagggagaagaccccaagccacagtctataaagagaggttggagaactgacttaactggtcaggggtagtgcctagacattttaaagttccccaggttattctaatctgaaaccgtagttgagaaccacccatctggaagggcttgagaatccagggctatcaaataaaggcatttgaaagagcatcgtgaagcattagcctggccatttggcccagaaccttagttgagaatttggtcccatacaatcatcagataaacatgagtttgagtatgatgatggaacttgagtttggaaagtaaaatctgtagaagtcaagatgctatttggtggcatcatttccttttttaggtattgaggtagacaatccttagactgttcataaacgtacagaggtcatttaataaagggcaaaaatgccctgagcacatacgtttgaaatagtatttagtttcttgcaacaatcactactcatgatggttttggaggcattatgaggagtaaagtcacctccaccatgattatctcctcagaaatgtgtgttcagaagcctctatccctgaagcctcaagggactcaatgcttctgctgatgaaatctctttcttaacagaataaaagaacattggctgagttgctttctggagcagttttttattctaagggctttgaaccacagtgcagaacattctaagagggtgggaattggtgggtatattacaaccacccatgttttttaagtggaagaatggaaagattagtgtggtcaaaaccctgtttttaatgaaagacttgatttttgtaaagattgtaaatatcgttttattaatgttgtagaccaaattgagcctcgagactaaagaaggcttattctgtttgggaaaacagcttagcaacaatggactttttcagaagtggagaaaagctaagtcttcatacttcatttcattcttccttccccataccaattttgatttgggaatctaccagatgagaatttttggtgaaaaatctaagctcatatctggttggtacgggatttcatattattattttttcttatctttgctttatatagcagagctaccatgaaattgtgggatctaaggtttttccagatctgtggctgatttgaagtatacacattgactgttttactgtgatgtgttttccagccatgtaggcaaggggcaatttgctcaaaaattgtacttctgtaatctcatctttcattccttaagggcgttaaacagtgcttttgccttagctctgaatggtgaggaaaacaataagcaacacctggaagcagcattgtagcgaaaagagcatggactgggttggggtttgaatcctggactttgccgcttactaacttaaattctctgagcctctgttctctcatctgtaaattggggacaataacaccaaatgtgggctgttgctgtggggatttaccaggacagcataagataattgaatgcatatacgacatctggtttttatatctggcgcgtagtaggtgctcagtaccttgtagttattattagtatattttatgttttatattactctgtctactgctgttttgcagtttaccaagtactttcacgtaagtgttgtgtcaagaaaaactctctcacactgcattttttctctactctcacactaccacagtcatcaacatggaagagaatttctgtgaccaaatgtatgggatgttttccccacacatcaagcagcggacaccagctgggtgtcctacaattcagttcctacctggagatagtgtcagatcccacaggttaggggctcagtccccatgactgttccccattccccaagacaccagtcacaagcctgggcctctgaaatttctgtccaacaggcttcaagttggggttcccacaaccccttctttgggttcaactaatttgctagagctgctagagcagctcacagaactcggggaaacatgtttaatggtctattataaagcatattacaaataatactgatgaagagacacatagggtggggtttgggggaagaggtatggagcttccataacctccccggggcaccaccatccaggaacctccacgcgttcagctatctggaagctctctctccaaacgcagccctcataggttcttaggggagcttcataaaatcagcattcctccccctgggtatgaggtgggaccctctcagaggaaggtcttaagacccacaatcagaaagacaggggaagatgagagtcctgccttggggcaagtgaaaggaaggaaggagagagggtgtatcacctgaggccttcccctgggccctaacacacccaacattatagcaaaagactgtaacaaggaatatgggmgttataaaccaggcagagtggacaaatccaatctatatattgcatgacaccacaggtatctcatgaaatctttgagtcactccaatgaggaaatattttaaatgtaaggaaatgaagtctcaccacactgagcaggggcacaggtcatatgaaggaagaaacccgtggaacaaagatgtgctaattactagtgctgtgttctcatcatgaattgagggtggctgtggcagggattctgaaagaggctggtaagtattacagcccctgccccagagagaagcactttacaggtctgagtgcaggggaaagatgcaatgaaagggtccaaagctagcccttaccctttgctctaaattacaatagaaaagatgaaaaccaactgatgtggtttggctctgtgtccccacccaaatctcatctcaaattgtaatccccatgtgtcgagggagggaatgggtgggagctgactggatcttgggggtggtttcccyccrtgctattctcatgatagtgagggagttattgtgagatctggtggttctaaaagtcgcagttttggccaggtgtggtggctcacatctgtaatcccagcactttgggaggccagggtgggtggatcacttgaggtcaggaatttgagaaagcctgaccaacatgatgaaaccccatcactactaaaaatacaaaaattagtcaggcatggtggcatgcacctgtggttccagctacttgggaggctgaggcatgaaaatcgcttgaacctgggagttgcagtgagtggagatcatgccgctgcactacagcttgggtaacagagcaagactctgtctcaaaaaaaaaaaaagtggcagtttcccttgcatgctgtctctctcctgccaccatgtaagatatgccttgcttcccctttgctttctgtcatgattgtaagtttcctgaagcctctccagccatgcagaactgtgagtcaattaaacctcttttgtttataaattacccagtctcaggtagtatacttayagcagtatgagaatggactaatataccaaccaaataaaaaattctaccaactagccagatgcagtagctcatgcctgtaatcccagcactttgggaggccaaggcggatggatcacctgargtcaggagttcaagaccaccctggccaacatggcgaaaccccatctctactaaaaatacaaaaatgagctgggtgtgatggtgcatgcctgtaatttcagctactcgggaggctgaggtaggagaattgcttcttgaaccygggaagcggaggttgcagtgagccaagatcgcaccactgtactcatagcctgggagacagagtgagactccatctcaaaaatcaaaaaacagaaaacaaaaaaactctaccaactgtatcatttctttaaatatactcactgtccctaaaacaggagcaagatcattcgttgtttcacaattggtatgaaatttatcatctacattggagaaataggaccaagattaaagagaggatacggttggggtcacgttcattgttttttaaattggcctcttgagtcctgcttaaacttcattgagtaaatttttgtctcttaacgtttttgtttatagtatcctataaaaagggttgtaccttggagagaattttattccaatttagttatagcagacatacataaaaaactttatttaaacaatgtacctaagtgattatgatatttatacataacaatgtttcatgttatattttctggacatgtgcggtttagaggctttttccccattctttctttttattaatgtgttttatttttattattttatttttttgtagagagggtgtcactatgttgcccaggctggtcttgaactcctggcttcaaacagtcctgcctcagcttcccaaagtgctgggattacaggcatgacccatcaygacctgcctccctgttcttttttggaaataaatgtacaatggcattttagcttgttgatatccgcaagcttgttaatatcctgctgagtttcgactgggtttgcattgaatctgtagatcaatttggtgagaaatgacctcttaacaatactgagtcttccagcttaggaacatgtatgtctctttgtttgattcgatcttctttgatttctttcatcaccattttatagtttttgtcatgtaggtcccatgtgtattttggtggatttatatctgaatgtttcttttttgggtgctactgtaaattgtactatttatgaaaattcagattctaattgttcattataaatacacagaagtgaaaccgatttttatatgttgaaaawtatatatatatataacttttttaaaaagataagaaaatagatatctcagatggggaaataatttcgttactcaaaaaaggctactgcatgaacgatgtgttaggctgacccaggccaggtgcttagcagtgcccaatatgtgctacatgtgagttctcatctgtcttgccttgtcatattctgtattgctctaaaagccaggctccatccaattaatggtagttacaggacttagaaccatgtgatagttaagctgtcaagccctggcctcaggcagccccgggtttggatcttggccctaccatatactagctgtgcgatcttcagcatgtctttcacaccctctggtcttctttttcctacactgcaaaatggagataatacatgataacattgtaacttgaccagagcccagtgcctggcacccagcaagcactcagtaagcattagctattctccttcttgtctttgttgttgttaagttataaggaggaagaggctagggaagtctaaggaagaactctctaacaatgcttatctaacactgggtcaggttgaaagggaagtggtgagcctcctatcacagaagaatggacaaccccctatctagaaaggcgcagggggagtcaggcttccctgagagttgctctatgtgttgagattataacacccttcatagcccacatggcgttataagcagaactagtttccaggtctccccagtcctctcagatacttgacccacagacacaaagtgtttgaagcagtaggcagaaatagtatccctgaaaaaacaaacaccgaccagacttatctttccatcagcggcagtttatgattgcacattaaattcaattgcttttctttaggaggctggtgcagggacccgtcatctctaacccagtgccatccattctagctttccccaggagcgcagacagaccagccgccttcctagtgtacactaattaattaatctcatgcttgtgattttatggcgcttaagtgctggagcatttctgtttattcttctccctgcaaagcacctcacgttgcataaagaccatgaatctccattgcaaacgccgtctgtcttgggctggagaacagcccaccggctgtctgttgtcttgctggcactgcctcttacagccaaagtaacacatccattaatttatccttaatgacattttgacatcccgatcagttcatcagatgtttcttttgcaagacttgtcccacacagccgggccagggtgctaggccactcttgatgcataatgcatgagacagtgcaccgctcagtaccctgtgacagacagatgccatctgctactctaagactgtatgttcctaatagccctggctcccagagtgattcacaccaatgccttcagagttgttttcttctatgcttccagctttctgtgcttgggagaagctggtcagtgcaaggagaggggcctggggtcacaaacatacatgcaacagtgctaataggagggaaagtaagggtaaatcaaccccttgctatagtcagagtttagagaagtcttcattctaattcaggtggaagaagggcctagggcaaacctaacatcttgaatcttatcattactctgctactacttagaaattaggatcatgaagacactctgataacaataatggatatcaaagaagaaaggaaaattatccttaatatcctcaatccaacacatgagccatccgcacatagatatacttcttcatcgttgtaatcacaatgtagacacatttttattttctagtttttttaacttaatgtaatccagttagcatttttccatgtcgttacatggttttcatttttaatggccctccatcattttaatggctgcataatattccatccaggggatgcactataatttactgaaccagttccctattgttagacatttacgaggctttaaccgatcatttgctattaaagaaaggcagccaagttgggtgaggaggagagcatgctctcagcaggctgaagagctaggctcaaatcccacctgttccctttacctgttttacgagtttaggattaacctttctgggccctgaattcctcacctataaaacaaaagaaataatcactaccttgttagtgttgtgaaaatcggagctatgtttaaaatactaagcacatggtagtatctgctaaatgttaaactgttacatttacctaactatgccagtagtaggggcaattctgcctacccaaaaagaaaaccattttgcaatgtctagagacatttttattgacatgcctgggagtagggggaactactggcatctagagggtggaaaccaaggaggatgctactaagcatcccgcagtgcactaggtaactccccaacacatacgtagcaaataattatctggcccaaaataccaacagtgctgaggttgagaaatcctggcatagaggaagctgtgtttccagtggtacctacatgatacatgtatattttccttcttattatttccttaggataaaattctagaaaaatgggaattgtggattaaaggatagatggtcttatgcccatctacagttttggggtggagtgggggatggacgtaatgttckgtgtgtgtgtgtgtgtgtgtgtgtgtgtgtgtgtgtgtgtgtgtgtgtatgtttgagagtctcactctatcccccaggctggagtgcattggtgtgatctcggctcactccaacctccccgcctctcaggttcaagtgattctcctgcctcagcctcccsagtagctgggacttcaggcgtgtgtcaccacaccgggctaatttttgtattttagtagagacgggatttcgccatgttggccaggctggtctcgaactcctgtcctcaggtgatccacctgcctcagcctcctaaaatgctgggattacaggcatgagccactgcgcctggcctggatgtaatgtttgaggtgactgatgaagaaaagttggaagataaatggtatgtgatcccctctggggcagaagatggcattccatagaccagtagttctcaaaatatagaacctagcrtctcctaggaactcggaaatgaaaagtttttgcactcacccctgatttaccaaatcagaaactggtgatggagaccaacaatgcctgcttaacaaggtgattctgatgcacactcaagtctgagaatcattgccatgcactacctgcagaagaaagccaacttgtagaatagtaagtaggaccctgcttaaatacagaaatttggtgcagaaattgatgaaaagggtcaagtcgtagacacggggaagctcaaatatgggacgatgcaacaataaaggaatggaaagtgtcactcaatttattcattcattccataaacatgtttaaagcttttacaacattgtgggaagtgctaaactatgtgctaaaggaaatacaaatacaatacgcaaatatgtatattttgtaccttgattataatgaaaagtgatgagagaagataggcaaatgactgggatacaaaacagaagcaaggcctaccctatcacgaagagatcagaaaaggcttcctgaaagaagtgatgatttgaatgggatttgaagkacttgtgatcatctcttaatatgttaattcaacaggtctttacaggatacccgcttgttccaaaatctatgtaaggccctggggaattggtagtgaacaaggccaamaaggttgttgtccttgtggttatagtctagcagggcaatagccctgtaagttagccattcagcaagaaggagatgatgtttctagttggcaactgaaggtctaagatggggtcagggtgagaggaggcagttgtgagctggtgagagggagatcaccctggagtcctggtttgagatctgagaaragrtgtgggcatgtgagtgtggaacggagaaggaggttcactcagctgtagggaaatagccataaagcctcagcaaccaggagacgctgcttggaagcggttgcttgggataaagcttgaagaattcatggtcatcatctatccacatacaggctttgttgggatatagcagacagaccgaggaggagcatctaaagggtgaggccttcaggagacagagttcagctcagcctcagctcagcaaggaatggccctatatagggagctgcagtctgttaaagagctgcccacagaggtgatgagtttgggttgctggaattcagcagtcgggggctggatacccactggctggggatgctgcaaggagtctcctagctagggtgggaaaatgactgggagggcctttccagccagagaatccaagattctacaacttttaatgatgtgaaactgaaggtcaacgcatgaataggggaagagcatctgccccactggctggtttggtttcgggtcgtatgagcaggatatggatagagcaagatgaaactacagggaggaaagattagtcaccttggttccctagagtgctcatcttgggaagcagatcaaacataaaattaaaaatgaaagcaaggaaaaagtcatgcggattgctggggcaaggaaggaggataaaaaagaactagcatttgttgcatatctttatatgccaaagaccatgctagggaactgtcatcatttatcatttctcatcatcacagtaactctgcaaattagggtatattaaattctattctatagacgaggaaattgagtctcacagagtcacagaaatggagacctgatcatgattacaccactgttaggagccaagtcagtccagggccagagcccatggtatttctgcaacaccaagaacagaggggccatctccccaacccaggggttcagagctcagacagcattcattcagggaagctcccattgtctgaaccatgaattctggtcacactctgctttgaagcacttttttctttcttatcacctattatgtaacaaatgcttatgtagagcttatttggtaggtgacagatcccagttaagtactttcataattataagttagtatctacctcaaagcattgctaagagaattcattataattatccctatttgacagaagagaaaactgagttatagggaggtttagcaattgcccaagactatacatctaataaatcatggagccaggatttcagtctaggcagtgtggctccaaagtcagtgctattcctaggctctgctttagggcccaggggccagtatggccatgtacccagagggaggagggcctcacctgtgtttcgggctttctgctgctctgatttcactgctgggtgcagagaatggtccaacagggtctgactattgcctaagtggaaagagtgtgattggtaggagagcccatccaggccagagaggtagtcacaggcagaataaagaagcagagatagacagatagaggcacagatatggacagcaagatagcaaagcaatggaagtagaagaccaagtcctttggcctttcaaattgtcatgacgtctgttgctgctgctgttgctgctgctgttgcttctgtaactttgccatgctgggggattcacaagccctagatgagggtgatggggcaggagggaaaggacccaccagctatgccccagaattggtacccaacagaggcastgagcagacaggatgctcattgcctgcaggacatgagtggttgtgagtgagttttctggccgcagctgtctatgcatgtatktgcatatgtgtgagtgtgtgtttgcctggggagaaagggagacagctgagaaagctttaggacaaggggagatatgtgatggctttttgcctaagcgtgacataacagggaatcttagagaacatttagaagcctgactggagggtttgaatcctagctctgcctctgaaagcctgggtggctttccatgggttacttcaactctctctgcctcaattcttttatctgtaaaatggaactaataatactcctggcctcacggtgttgtagcagaattaaggaacttaataccctgtttataaaggccttgaatagtggctggtattcaataagtactctataatgtttattaaacaaataacatcaatttaggaattatggtcattttattagtttcctcaggctactgtaccaatgtctcacaaactagatgacttaaccaaaatttgtcctctcataattttagaagctataaatccaaaatcaaggtgttggaggggtcaggctccctctgagactctaaatagaatggtgccatgcctcttcctggcagctggtggtgcccaccagtcctccgtgctccttggcttatggctcatcactcccatcgccacctttgttgtcatgtggcattcttccagtgcacttctgtccaaatttccctctccttgtaaggacatcagtcatctgggaatcagagccaccctagtgacctcattttaacttcgttacgtctgcaaagaccctatttccaaataaggtaacattgacaggtactatggattaggacttcaacatatcttttgcggccagagagtgggtgagtggaacacagttcaatccataacaatcattttaaaagcatcagttgttgccatgattcttagatgccaactcccccactatagtgaaatcaatacacagagaggggaaagggagtgttcacggcaactcaatgagatatctggagatctggacccggcacccgggtctcttaccttctagtgttccattttcaagaatgaaactttactaattcagacctgctgaagagtgggcccacctacttcggtggttctcaaactttggcatgcagtagaattgcttggagggcttattgatcacctagagtttctgattcagtaggtcagggcagggccggtgaacttgcgttgctaatacatccccaggtgaagcggatgctgctggtccagggaaaccacacttggagaacagctgttccgcatcggtggtgctcaagcttagtggcacactataatcacctggaaagcttctgaatgcccagatgcccaggctgcaccccagaccaattaaattagaatctcactggtaatttttaaagctccccaaatgatgtgctcagccaaagctgaaaagcatggctctagactgcatcaatggaggtttttaaagaaaagtcattatccagggcatccacttcaaagtattcatatttaataaataatgaggttatttaaactaacatggatttttttgtatttaaaatatgatcataccagagagcatttattgagtgcttactgtgtgcataccctgggcaaagtggtttaccagcaacataccattcaatcctcccaacagtctgacgggggaagtactactctaatccgtgttttacaggcaggaggaaactggcatgcagagggctcagtaacttgcaagagcttgcacagctagtctgacatggagccagattttgatgccaggctgtctggcaccaaagccagtatattaactgctatgcagtcctgcctcctgatacgagggaaaacagtgcattctcctttaaatgctgcacacatccatatccctatttacactattgattcttttttttttttttttttttgagaaaaaagactaattgggtcatctttattttcctagcactagcatggtacttatactttgtgacttcccaacacattgaactcttttttttttttttgtcttttttttttttttatactttaagttttagggtacatgtgcacattgtgcaggttagttacatgttacatatgtatacatgtgccatgctggtgcactgcacccactaactcgtcatctagcattaggtatatctcccaatgctatccctcccccctccccccaccccacaacagttcccagagtgtgatattccccttcctgtgtccatgtgatctcattgttcaattcccatctatgagtgagaatatgcggtgtttggtttttttttcttgtgatagtttactgagaatgatgttttccagtttcatccatgtccctacaaaggacatgaactcatcattttttatggctgcatagtattccatggtgtatatgggccacattttcttaatccagtctatcattgttggacatttgggttggttccaagtctttgctattgtgaataacgccgcaataaacatatgtgtgcatgtgtctttatagcagcatgatttatagtcctttgggtatatacccagtaatgggatggctgggtcaaatggtatttccagttctagatccctgaggaatcgccacactgacttccacaatggttgaactagtttacagtcccaccaacagtgtaaaagtgttcctatttctccacatcctctccagcacctgttgtttcctgactttttaatgatggccattctaactggtgtgagatggtatctcattgtggttttgatttgcatttctctgatggccagtgatggtgagcattttttcatgtgttttttggctgcataaatgtcttcttttgagaagtgtctgttcatgtccttcgcccactttttgacggggttgtttgtttttttcttgtaaatttgtttgagttcattgtagattctggatattagccctttgtcagatgagtaggttgcgaaaattttctcccattttgtaggttgcccgttcactctgatggtagtttcttttgctgtgcagaagctctttagtttaattagatcccatttgwcaattttgtcttttgttgccattgcttttggtgttttagacatgaagtccttgcccatgcctatgtcctgaatggtaatgcctaggtttccttctagggtttttatggttttaggtctaacgtttaagtctttaatccatcttgaactgatttttgtataaggtgtaaggaagggatccagtttcagctttctacatatggctagccagtttacccagcaccatttattagagagggaatcctttccccattgcttgtttttctcaggtttgtcaaagatcagacagttgtagatatgcggcgttatttctgagggctctgttctgttccattgatctatatctctgttttggtaccagtaccatgctgttttggttactgtagccttgtagtatagtttgaagtcaggtagtgtgatgcctccagctttgttcttttgggttaggattgacttggygatgtgggctcttctttggttccatatgaattttaaagtagttttttccaattctatgaagaaagtcattggtaacttgatggggatggcattgaatctgtaaattaccttgggcagtatggccattttcacgatattgattcttcctacccatgagcatggaatgttcttccatttgtttgtatcctcttttatttccttgagcagtggtttgtagttctccttgaagaggtccttcacatcccttgtaagttggattcctaggtattttattctctttgaggcaattgtgaatgggagttcactcatgatttggctctctgtttgtctgttggtgtataagaatgcttatgatttttgtacattgattttgtatcctgagactttgctgaagttgcttatcagcttaaggagattttgggctgagacgatggggttttctagatatacaatcatgtcatctgcaaacagggacaatttgacttcctcttttcctaattgaataccctttatttccttctcctgcctcattgccctggccagaacttccaacactgtgttgaataggagtggtgagagagggcatccctgtcttgtgccagttttcaaagagaatgcttccagtttttgcccattcagtatgatattggctgtgggtttgtcatagatagctcttattattttgaaatacgtcccattaatacccaatttattgagagtttttagcatgaagggttgttgaattttgtcaaaggctttttctgcatctattgaaataatcatgtggtttttgtctttggctctgtttatatgctggattacatttattgatttgcgtatattgaaccagccttgcatcccagggaggaagcccacttgatcatggtggataagctttttgatgtgctgctggattcgttttgccagtattttattgaggatttttgcatcaatgttcatcaaggatattggtctaaaattctctttttttgttgtgtctctgccaggctttggtatcagaatgatgctggcctcataaaatgagttatggaggattccctctttttctattgattggaatagtttcagaaggaatggtaccagttcctccttgtacctctggtagaattcagctgtgaatctatctggtcctggactctttttggttggtaagctattgattattgccacaatttcagatcctgttattggtctattcagagattcaacttcttcctggtttagtcttgggagagtgtatgtgtcaaggaatttatccatttcttctagattttctagttcatttgcgtagaggtgtttgtagtattctctgatggtagtttgcatttctgtgggatcggtggtgatatcccctttatcattttttattgtgtctattagattcttctctctttttttctttattagtcttgctagcagtctatcaattttgtagatcctttcaaaaaaccagctcctggattcattaattttttgaagggttttttgtgtctctatttccttcagttctgctctgatcttwgttatttcttgccttctgctagcttttgaatgtgtttgctcttgcttttctagttcttttaattgtgatgttagggtattaattttggatctttcctgctttctcttgtgggcattaagtgctataaatttacttctacacactgctttaaatgtgtcccagagattctggtatgttgtgtctttgttctcattggtttcaaagaacatctttctttgtgccttcatttcgttatgtacccagtagtcattcaggagcaggttgttcagtttccatgtcgttgagcggttttgagtgagattcttaatcctgagttctagtttgattgcactgtggtctgagagatagtttgttataatttctgtgtycttttacatttgctaaggagacctttacttccaagtatgtggtcaattttggaataggtgtggtgtggtgctgaaaaaaatgtatattctgttgatttggggtggagagttctgtagatgtctattaggtccactcggtgcagagctgagttcaattcctgggtatccttgttgaatttctgtctcattgatctgtctaatgttgacagtggggtgttaaagtctcccattattaatgtgtgggagtctaagtctctttgtaggtcactcaggacttgctttatgaatcttggtgctcctgtattgggtgcatatatatttaggatagttagctcttcttgttgaattgatccctttaccattatgtaatggccttctttgtctcttttgatctttgttggtttaaagtcggttttatcagagactaggattgcaacccctgccttttttttgttttccatttgcttggtagatcttcctccatccttttattttgagcctatgtgtgtctctgcacgtgagatgggtttcctgaatacagcacactgatgagtcttgactctttatccaacttgccagtctgtgtcttttaattggagcatttagtccatttacatttaaagttaatattgttatgtgtgaatttgattctgtcattatgacgttagctggtgattttgctcgttagttgatgcagtttcttcctagtctcgatggtctttacattttggcatgattttgcagcrgctggtaccggttgctcctttccatgtttagcgcttccttcaggagctcttttagggcaggcctggtggtgacaaaatctctcagcatttgcttgtctgtaaagtattttatttctccttcacttatgaagctgagtttggctggatatgaaattctgggttgaaaattcttttctttaagaatgttgaatattggcccccactctcttctggcttgtagggtttctgccgagagatccgctgttagtctgatgggcttccctttgagggtaacccgacctttctctctggctgcccttaacattttttccttcatttcaactttggtgaatctgacaattatgtgtcttggagttgctcttctcgaggagtatctttgtggcgttctctgtatttcctgaatctgaacgttggcctgccttgctagattggggaagttctcctggataataccctgcagagtgttttccaacttggttccattctccccatcactttcaggtacaccaatcagacgtagatttggtcttttcacatagtcccatatttcttggaggctttgctcatttctttttattcttttttctctaaacttcccttctcgcttcatttcattcatttcatcttccattgctgataccctttcttccagttgatcgcatcggctcctgaggcttctgcattcttcacgtagttctcgagccttggttttcagctccatcagctcctttaagcacttctctgtattggttattctagttatacattcttctaaatttttttcaaagttttcaacttctttgcctttggtttgaatgtcctcctgtagctcagagtaatttgatcgtctgaagccttcttctctcagctcgtcaaagtcattctccatccagctttgttccgttgctggtgacgaactgtgttcctttggaggaggagaggcgctctgcgttttagaatttccagtttttctgttctgttttttccccatctttgtggttttatctacttttggtctttgatgatggtgatgtacagatgggttttcggtgtggatgtcctttctgtttgttagttttccttctaacagataggaccctcagctgcaggtctgttggaataccctgccttgtgaggtgtcagtgtgcccctgctggggggtgcctcccagttaggctgctcgggggtcaggggtcagggacccacttgaggaggcagtctgcccgttctcagatctccagctgtgtgctgggagaaccactgctctcttcaaagctgtcagacagggacatttaagtctgcagaggttactgctgtctttttgtttgtctgtgccctgcccccagaggtggagcctacagaggcaggcaggcctccttgtgctgtggtgggctccgcccagttcacccagttygagcttccgggctgctttgtttatctaagcaagcctgggcaatggcgggtgcccctcccccagcctcgctgccaccttgcagtttgatctcagactgctgtgctagcaatcagcgagactccgtgggcgtaggaccctccaagccaggtgtgggatataatctcgtggttcgccgttttttaagcccgtcggaaawgcgcagtattcgggtgggagtgacccgattttccaggtgccgtccgtcacccctttctttgactcggaaagggaactccctgaccccttgcgcttcccaagtgaggcaatgcctcgccctgcttcggctcgcgcatggtgcgcgcacccactgacctgcgcccactgtctggcactccctagtgagatgaacccggtacctcagatggaaatgcagaaatcaccgtcttctgcgtcgctcacgctgggagctgtagaccagagctgttcctattcggccatcttggctcctccccctgctacactattgattcttatgtgatgtagctcagcctttgcctcaattacagtaattctgagtcagtgggggcatagatgaataaagttttgctgcatttgtaagacactggaatcatgtgtaccacagactgaatttgcccttctaatctggaagggcaaatccctagaagaagcatggaggaatgtggagcaggtgtccacattcctgaactggcaggcagaaagcagggcttgcatcctacatgctgtgcatcttagctaagggactactctgtccaggcctcrgtgtcttgtctatgaaatgagaagatgctatagttcccttacagttgcgatgtgtaactttaagctgagatctagtcatgccagcagagcatcctggattcaaagaggacagtgccagcttttagtagaagcagggcctcacttgtgaattttttttttggtccacttcctatggctgagatctctgactccaggatttcaatcttcatggtttccaggaaagtttatctggagattgcaatggaggatggcccagaggaggagccctatggggaagaggaagagtgcctgatcagtgtctccccaggagagtgggcatggctcccacattcagggaaaaactctaggtggaaccctgtagactcctgcccccaccagttggctggatggtcctgttcctagcccagaagagagtcaagggttttgcagagtccaaatcctgggatcctccaccacctcttttctaagtggtttcccagtctctacttgaacttctccaatagcagggagctgagtacttgcaaaagccaaacagggcaggattcctgtcttgtttttcatatcatcatctccttccttctaacagccacagattcaacgtacttgctcattaactatttgtccaacaaattaatgagcaaagaggagggaacttctaactttgggaaggaggcaaagacttctaagagtaggggacatttgagttgggccttaaaaggtgaagagaaggttgctaaaccagaaaaattggggaggggaattcaggcgttaggtgcttccaaaagagacctaagcagttctactttgctagaaattccttcgttgtgccatgttggtgtgctgcacccattaactcgtcatttaacattaggtatatctcctaatgctatccctcccccctccccccaccccaccacagaccaacatggcacatgtatacatatgtaacaaacctgcacgttgtgcacatgtaccctaaaactaaaagtataataaaaaaaaaaaaagaaattccttcgttgtatcaagccaacctggtcctcattctgcccctgggaccatagagacccaaccatcagatgcatgaagagaacgttactttgtattccctctccgtgagaaatgtccctggatgtttcacgcactcctcctctcgtagcatgatttccacacttttaacagcccttcattcctctcccgtgagccattctacctgccagtatcccttgtaaagagtggcactcagaacaaatcacaggactcatggtccatcctgggcccatcccctgccacctacccctccctcagctaacaagcgaaggtcagagagagctcaaagtgatccgttagaaggaaaatgccaagagctatggccgcgtcacctcgtcctcacctgtcagaagcagtaaactttggattgctgtgtcttaaaacagtcttcagctttggaaatgttcctgcaaaggaataaacagacttatgcatactctctttttatcagcttttggtaccccctgctggcgaaattgtgtgacccagttggcaaaaatctcaaagcaactacagaaaaaaatcctcagttcagaaagtcataagtacttgagttttgaaggctctgagaattccatgaattatatgatcatcccatgagtcatatgactattgcatgagattttttttttcttcttcaacatgctatagctgcagctattttgtgggctctgcgggggaaatctctgactcccatgaatattttgttaattctgcaaacattccaagaaggaaatgctaagttaccgcccaaaatatttctagttacgaatattccaggtcaccagctaattttrtgcaggcgtttccttctctttctttgcacgtatctacttttaaagtggttgtaatttgtgttcagagtaagaggactatcttttctagactccaaattgcagacttttaagtataaattcgtgcaacaagtttattgagccatgtgccagacactcagcaagaaattggagtaggtgcaaagagtcaaaagccctttcccaagaagttcttgtcgtagtaggtgaaagagttgaatcactgcaatttgactcaacaagtacgtagctaacatggcaccaaaaccctccctgatctgctgccagggttcaaaccaggttctagctcttacatagcaacaggtatttcttcttggtgttcatcgtctttgtgatttttgtctctgtatttatctgtttaatgcccgtctttgccattagtcttcatgttccatgtggattaaggtcaagaagacatgatcttctagtatttagcagagactcatacatgtacatgttcaatggatgagtcaagcaagaggagaaaattataattctatgtagaagagcagggagaagcctcagaggagatgtgacacttacattgagccttggaggacaaagaggaggtgaccagtggagaagaagagggacacatcaaggaatatggagtattgagaaatagtgtggtgggaggaggtagttgatgttttctgaaaggggaggataaggttatgtgcagagaataagactgagttgaagcccagtccttagtttaagggtcttgtttgccctattcacagatttgggtttctctttcgttgagagagaaaaataatgaggtagtaaattaaattatttggctatggagatgaatgtcaatttttctgtgttactgagaggtctttttaacacttaaattcagaattctgaaagaatagatatagatccccaaactgtggttttgtgttttatttccttccacaaataccccctccatttccaccttgtagctgtctttgccaattgccataacatctatccatacattaaaatgattatataacattattatcaccatgaaaatacagagtcagccatcagctttaaatactaaggatgtaatatatctgatatttttacaattcagttagctttccaatttttaaatatgtgttttggggatgcttagtttttctttttttaatacaggtgttcagagctacccaaacatttctataaagtaccatttttcataaaagcagcaaggctttcattattattatgattcctttgaaaaccaatgatctgtgcctaagacaaccctttccatattactttaccctgaatggaatgagattggttgagagttctgcccctaaggaaatatcaaagcctccgaaacatactcatttatagttttaagttaactctcttatcagatttccttttatttcctgctggggcaatgtgagcagagctcagatagaagcaaagaatctgctatatttcttttcaaatttatgattaagaaggtcacatatacatttttaaacacactcctttttgataataaatgaagaataaaatttcaaaatgtcatcagaagcagaattgctcatttttctttcgttggcattcccccgcccctgtctaattgtctgaccaatccaatgcttcatttcttgttgtatatctgcctggaatcattttactggtagaacagtgtgcctgtggccaaagcattataatgaaaagatgcattcctcttcctgagtgcctttctttccccgagccaacttaaaaaaattagtgaataaagaattccattttaggctacatgtttctccaaattatggccaaaacgagacgtataaagaaactttctcggctgggcacggtggctcmcacctgtaatcctagcactttgggaggccaatgcaggcggattgcctgagctcaggagttcaagaccaccctgggcaatatggtaaaacgctgtctctactaaattacaaaaacttagctggatgcggtggcagacacctgtagtcccagctactctggaggctgaggcatgagaattacttgagcctgggaggcagaggctgcagtgagctgaaatcgcaccactgcactccagtgtaggcaacagaataagacactgtccacacatacatacacacacacacacacacacacacacacgcaacttttctcttcttggttgggattcctggatccagttccyctttccacctttctctactgtgctctctgcttccagagtgcattctgtatgaagtctgtcaaaaagatcacttgccacttctgacttgttgggttcagctagtgagaactgccacaggcgaccagaggaagggcataaggtgtagtcagggcattttttttttttttttttttttttgcctctggttctctccctgtcaggttgtctatgactggctgggcctttcaagagaaagccgctgcttctgttcagggtrcctccttttcacagctctcttctttggggctctggttactgcttcctctatttgttcctctggtcccataggtaataaacagctctcctactgaggcactagtatattatgggtcyctatacatttgtcacctttatcagcagaccttttataaataaaccttcctcaaattgtcctcatttgagtatgccctctgtcattcttctgtgaagtctacacctagagcatgagattcatgtttcaaggaggatgctatcaaactggaatttgtcctatgtgaactcctctaaaacacttctaagctgaggtttgggtctttcttttcttttctgttttttgtttgtttgtttgtttgatggggtctcactctgtcacccagactggagtgcagaggcgtgatctcggctcactgcagcctccacctcttgggctctcaagtgatcttcccacctcagcctgctgagtagcacaggtgtgcaccaccacacctggctaatttttgtagagatggggtttcaccatgttgcccaagctggtctcaattcctgggctcaagtgatctgcccagctcagcctcccagcgtgctgggattacaggcatgagccactgttcccagcctaagttgaggtttatcctttccttttatacttcctctggcagggagattgttacctcttgaaactatctgtttcatgatcagtggggctcaaccttggaaaattattccctgtattgcactggatttgacctctctgggacagccctttttgtgtgttgagacaggacaggaatgaccaaaattgaatttgaagcctactgttgtgaaggatggagtaagagacttggagaaatttactctcaagatatctgatgtttaacctatagcctttcatgtgataagactataacagctatatttcgatgcatatatgttggaaaaagagggaccatgttcgctttttcgaaatatttgaataactcttatatgcaagaggagttagtcatatttttgtatctctaatgatatatctgagacctatccagttaaaatttaaaggacatagattttaaatccatagaaaagaactttttaactttttagttcctcagtgaggtcaaagtccacatcatttgaaagaattcagggagagatgggatcccacagtggggctgttggggagggaattccaacattagaatatagttggatccactggcaatagtagaaaaaacaagaatarcaactgctaggtgtctagtgtccactatgtgygaggcactgtgctctgtgtattttatgcattgtctcatttaatcctcacaaccctataaggttggtcctgtcatctgccacagtatacagaagaatagttcaggatttagagtaagaaatttgccctgggtcttgcagctagttggcaggcagcagaggtaagctatgaacctgagtctgtctgacaccaaagctgatatttttaacctccagtggctggtgtcagaataacttggggaacttgatggccatgtagaattctaggtcctgtcctacttcaatgatcctgagcctctgtgtgtgtgtgtktgtgtgtatttttttgtgactcttcaggtgattcaaatttacaccaaagtttgagaagcactgctctacactattattatcataatagttatattatgataatatccgtctggttctgagggtcttttattcccatgggaataaggttgcatcaattcagctctaaatttccttcttttgagctgtgaaactaacccgcacactcatccatttccaaccaccagcccctgcttcactctactattatttggtaggtttttgatgagctcagttcctgagaaagacaagcctccatttttaatctcattcagagccacagaaacagaaaggccagtctagccacttcctccctctgaaaggagacttagggaaaggaatacaaatcttgttgatttcctctgaaaggagagtgggggaagcattgtacaagtctcatygatttcccattttaggctcaaacatagaacacatgcattgtcgggggtgaggcagcagcgtgagtctcatatttctgagtaaatggaaaccattcatggtttgttctgccttgattctttttctggagaatgaaccagatttgggggttgaggatgagcattggggaagaacaatctacccaatgctttaatgcaactggcaccatctgactgtggttttttccccttgcacatgtcccaaaggaagctggccaagaagcagaaggagacccagagtggagcccagagggagatggggcctgtggcctctgccgacaaacccaccaccaagctcagcrccagccgcaatgatgaaggcttctcttctagttctcaggacgtcaacggattcagtaagtagagccaacaaaggggaaggggacatccgtggtccagctcagccctagtacttctgctgtgaaccccacacattgatcaggtgctgccaggcatagggtatggatgcttgcctgatatggactgggatgaaggttctccctgacaaagacttggggcagttcatcctaagatgaaaaggaatatttaaaaaatcttccccaaatcagatggaaatgggagcaagtcatcctaactgcttgtggacataaatagagacaggttaaaaataatagcagtaaaaaagaaagaggaggaggatggttatgtccttaaggagaaaaatatgccacactgaattgagtggcttaagattttcaaatctgtgtttcatatacaccacataaggtaggtgagtcacagattatgactgtctccactctgagtggttaggaaactgaggctcagagaagcaacttatctaaaatacaatggctgatgagttacatatttagattggaagcctcatccctcaaacatttgccagttccaccacagccagtgttccaagtagcattggtcaagggcacctgagtccttgtgcagtgttaataaaggatcccaagatttgggtggttaagatatcagggttaacccttatcctaagaagaactccaagactgccaacatctaaggcttccttgtggacagacttgcttctgttcttacagccattctatcagacagttaacagactagatttcccagcctcttccccaaattgggtaatgcaagaagtctcaaagaatctgtgcataacacagatgtcctccacataccatgtaagctacaaatggaagaacctccattttgtaaaaaatcactcaagagatgatcagtttgggatgatggggatctatgagaggataaagaaagaaagaaaaaatttatccccttctataatgtagacactgtctctcatcctcaccatagtcctgtaagatccttagtattattgttcccattttataggtaagctatgcaatgctaagtgtgtttggccagccatctcagagccacacagcttgtttttaatggatccagatctgagagtaactcaggcccatgattcctaagctccagtgtagcacagaacctacctggggaggttttcaacacatccatatctggaccccacaccttatctcctgaatcaaaatctcctgggggatgagaggtggggcccaactgagggatatggattttgtaagtcattcagagagttytcataggcacccagatttagaatacagcacttggacagaggcaatagctatgcttagatactgatgtactgtctttgggaagagagattagtttaaacctacaaaaatgttgagaagacagcaaaatgaatactcatataccctttacctagattcaccaactgctaccattttgcaacatttgcacttttgcacttggctgtactcaccctctctctctttctccccttatccatgttttttttttcaaaattttctgaatcatttagaagtaagttgcagacatcatgacactttacctccagagaattcagcatgtatttcctaagaactaggatacctcttcaacataaccacaataaagtataaccttacttcagtgatctaatataccagttcatagtcaaattgcctcaatgtcctccaaatgttctctattgcttatttgtttgttattttaatccaggatccaatcagagcgctcacattgtatttggttttcagctgtctttatcctctttgatctagaacagccctctcaactttattttttctttcaggatactgactttttttttttttttttttttttttgatggagtctcactctatcacccaggagggagtgcagtggtgcgatctctgctcactgcaagctccgcctcctgggttcaccccattctcctgcctcagcctcccaagtagctgggaatacaggtgcccaccaccacgcgtggctaattttttgtatttttagtcgagacggggtttcaccgtgtttgccaggatggtctcgatctcctgacctcgtaatccgcccgcctcggcctcccaaagtgctgggattacaggcgtgagccaccacacccagccttgacatttttttaaagtctagggctgtcgtcctgcagagtgttccacaatccagatttgtctaatttttttcatcatgataacattcaggttacacattttggcaaaaatatgacatarctgatatgacgtacttccctttacatcctattaatggacatatcataccgctttgcacattaccagtgatggtaagtttgagttcttcttaaggttagataatggcttttaaagacaaagtctaatggcacatactgattatgagcaaatatttaacatctgtttttcttagggatcagagcaaatttgcggtttgcctaaccatgaagccagtcctttttttcccattttcaatccagataaatcactgagactcatacatttcctagaagcagggaaattggttgttgacatagaccagggttgacaagaaaatgggcttgatttttccttaaaagaaaggaacatcctagctataattttgcatctgtaaaccaacctctgttgcaaaattacaggtagctaggaggaataagttctaatgttctattgtactgtagggtgactataattaataacagtttattgtatattttcaaatagctaaagcagtggattttgaatgtttctaacacaaaggaatgataaatttagaggtgattaatatattaattaccctgattattatacattatatacatgtatcacactataccccataaataygtatataattagtgtcaattaataataatagaaaaaaagagaaaggctcatcaggagctcactgagtctctggctatgctaagttgtcactggatcccctgctttcggctctggggcagagaagttcatttgcaagttcatctgattgaaaatactggtcaagtaataccaattcatccttttctgtccagtccagcctcttgtgcacttttttccatttgtaaaagtaccctgggaggactcttaaaagcaaaatgattatggccaaaacttcttgacaatcattgtgaccctgaaattttagatattggttctcaatctttctgatctcaaatgcaaacctgggtaatactgatttcttatgtttcaaaggataacattgtcactgttcgctatgggccaaaacttagacccttaagatgaaaacacccaagactgaaatagtttaacttgccataaaggaagaggagaaatatccagtgaaatctaattagatgttttaaaggccagggacaaacttttcaaatgattaaggtgtgtatgtatgtgtgtgcatatgtgttttatatttacacagacacgtaaatatacagagagaggtataaacctacacagtcatatatacacaaatatacatatatgactgtatatatgcattcatcataacaatattgctttctaaaatatttaaataatgattgacttattatactcaattattagaaaattctgcattagtctgaatcactgaatacgttaggactctctatgcatctgacgtcctcaggctacagctacaaaaacactctcaggatcttttgactgccctagaatgcatcaggtacctttaaaatgccctgtggaaccactgggatgagatttgagggggaaaaatgtaagtaatgcttacactggagatgagaaattgcttctgaaatcaccctgatgtatgtagaattgaatctatttttgtggcattagggaagtgactgtctggcctctgaatcggtgtctttaggaggccctgagattatgtacaaatgttgaggcagcattgagaggtagggcacagaatagttgttacattgcaaaagattacagaagaacgtgccttgagcaattatttcattattgaccaggtaggccctagcctaattcaaattctacctgtccctgcataggtttattttctggggttttcttttttcttttttttattatgctttaagttttagggtacatgtgcacaacgtgcaggttagttacatatgtatacatgtaccatgttggtgtgctgcacccagtaactcgtcatttaacattaggtgtatctccaaatgctatccctcccccatcccccaccccacaacaggccccggtgtgtgatgtttcccttcctgtgtccatgtgttctcactattcaatttccacctatgagtgagaacatgcggtgtttgatttttctatttcaagtgactgctaagttctgtgacatctattcaatcaaaccttctaatattgtataggaacaatgacctccagggctctagggtgatggggctttgtcagatatgggccattgctttggagtgccttggtattcttgaaaaaggagtacgtgtcacatttcaaggacaaacaacgtgcattgttttccatttagagaaatgctagcttttattaagtaatctgattttgatcttactgccctgtgtacttgttatttttctctgcgatcttttgctcactgggatcattttctgggtctttcttctggtgcttaaatcttcttctttatctcttttgttcacatgtcatcttcttgttcattttcagtccaaacaaaaatgcttcaaaataaattccttttgaattcctgtgatatggggacttggtagtctgctcttcccatratggcatttgacagattaacttgcctactgggtaccatgagttaactccgtcctgatttttatgctttccctctattgaattattccatgtctggaaggtaaaggcagtccttctctaagggtcatcagacagacactgggccatctagctctctgctaagtgtcaccttggagctgggatttaatggactttttctcagtacatgcctacccctgtgctgtaagccatgtggcacggtctggggagagaggtagtttcaaagatgaataaaatgaggtattrtatcacaaataatacatggttctacttgtaagcctttcatagtttacgaagtctttctgcaaaacgctccactgcagcaatagttccttattcctgtaggaataaggtagctagtaggtttttaattattcccattctacagatgaggaaactgaggttcagagagctttcatggcccaaatcatacatatattgcagagtcgtaatgagaatacatctctcctgatttcagttagagtctatccatctcattctgcaaagaatttggggatatatccaataaaagaacctacaatttaaaaaatagtgagaaaaataatcagtatcaggaaaatgtgaaggtcaggaccaggatatattgaaatataactatattacattaaaatgtaatctaaaatatgcrctctgataattttaaattccactttggctctgggatttctagtagaaaatgcccaaagaagaagataacttttattgggcacctactatgtgctaaaacttatgctttatataaattccactctgaagctcccaaggaaccctatcattagatattattcctattttgtgaatgagaaaattgagcttcagagaactgaagtaaataagcccaaagtcacacaatgaagaaagagtagggatagaattagaagcaaataaggctctctgactcctaaatcagtgttccttctcctctactgtggatggtagcccaacattcaccagtctcacagaggaaggtcactgacagccgggagaaagggagaacttcacttccttactgataggtcagctggcttttctaccatgtgggcagaagctgctgccacagctgttttctgaacagaggcctgggrccaggtactggcatggagcctagcagattcccacaaggtgccaggtactatgataagcatgctcaaatatggagtcttagtcattctctcagtaaccctgtatagtccatatgattattatcgaattcattttgcagttgaggaaactgatgctctcagatattaaaagatcttcttgaagtcatatgacaaatagataatgggccctggaccccagagcagatattctactttcaaaaccaagcaactttgtctttcctttgacctttagcggtctctctaccatgaaggcgagtgaaggagagacaggaaatcaaggtgaaatagactttctggctgggagaacagtgcttcttactggttcctctattccctgaaactcctgcctcaggaaggcagctgccaagtggatgtacgcacagacaggttctgccggaatcatcctactaggaccctcttaggaaagtgggactgcagaccagtagtcccatccttacgcatcccaaagctagaccaatccctgggtagttatagagagagaggagcaaagaatggcccctgcctaacagagagcttgcagcctggcagtggagacaaatggttcaagaaagagaacctttgttacaggactttgtgcaatggaagcctacacgaagagccacaggaccctttccctgactttgtacctcccaacatgaccaaaatataccaggcagccagcacacagtcaccttaagaggtattttctgccaaagaggagggtggaccctgaaacctgatattcttcctgttctttaccacacagacctcataaaagggtttctttgtgggcagttcagagaatgttcaggcttggtactcccttgggatggttcagtagagatgaggcaggcagaaggaagtaccaggcaaaattttagccagattattttaggaacatgttatataactaaagcaattcaaatagggaagacggatcatggcttttaaaacaatagaggctggctggggtggtggtaaactctttgtaaagattccttaaccctttcaggaaaatggccagctggctgggaaatgggtctctgggaaaactggcctgaccctgatcttctctggcaaaaactcttgacttgatggtgtgtgatgtcaaggattgctacatttgcttgggactctctctgggtcagtcattttgctaggtgctgttcacatattgtctctgatcctcaaaacaatgcaaccagttaggaatcattatcttgatttcataaatggcataattgatgaccccaagctaagagctgtattaaacactgcatcctaaatcccccacccctcattgttgttgatcagtacataatgacagttgcccaactctctggcccatcagatactcattgagtacttgtttgaatatatgaatgaatgaatgatggagctggaattcacactcagatctagttccaagcccagacctggttccatcttttctcataatrtattctctcttcaattaagccaaaatctgtcctctgtaacttcattcattcctgcttttgtacacaaccatgtattagtcagcaaccacgtgctggcctttgtctgccctctggtgtcacacagggtaatggaatcagtgcttctcttcctgcagcacccacaccctccccagctatttgactgcagctacctctgtgcccaggtccttccctcaggctaaacagtcactgcatcagccatcagccctcctcggaataaatttctgtttttcagtctgctcaaaatctcttttgacccttctgtctccatttggtccatgcccacggaatgtgtggtttccaagacaaccatgaccctctacattgggctgagtcactgggagttcagagagctaccatcaccctcactctgatcctaaacctgggtttaaaatatatcactcatgttttaattaacctctaaatattcatcacgtgactgcctaatgtagaaatcatggcttccagctagggctgcctcagtcagcccagatgaagatgacttttggggcccaaatcaaagattttacattttgtctgttctgtttcttgttaggtttgaccctgcttgccaagcctacagggctattttttttttttttatttctggttgtgtcagccaatcacttaatcctcctagtctggggccttgaaatgtaggaattactacattgttaatatttatgatcctagttattatatacagagcattaattatatgcccatttacgtgctgagtgttttatattgtataagcattcttatctcattggtatggtgggaaaattaagtaagtgttatgattatacctgataatttaaaggtgaggaaacaggctttaaaatagtaaggaatttgcctaaggctttgtagctttaaatggcagagctggaactcaaacctaggtcagcctgacaccccgaggcccttagtccaagactactcctccatgctgccttctgtagatgttattattcccatttcatagacaaggaaacttaaggccacagacactgagtcatctgctcaaagcagtggttcttgaagcatgatctccagaacagcagcatcagcatctcctgggaacttgttacaagcaaattctcaggccctacctcagacctactgaacccaaaactctagggttagggccaagcaatcagtttttaacaagccttccaggtgattcagagaatcactagctcaaagtaatgcccaggactgtcagactcaagcccttcttctttatttgcaaagctgtctttcatgatagtagaattatggcctctctgggagaggaaggctctagctcacctccctgggtagatgaactaagaggttattgccataggagtactggacctgaagggtgctaaagcccattaatagttatgagggtccccgaatctgggaatctcaaccgtatctttgattttgtctccttttgtctgaacagtgaacaatctaagagtcaggatggaaggagtggaaatttacaaggaaaagcaatgatgagtcacacactgaaatcgagagctcaacagagcattgtgaaaaagaactcaaagatgcaaaaatcctgtttgcaggaacaattatattttcaggttgctccaagattaaattgaatctgggagaagaattgaatgttacaagcttgccccctccagttttattgaatatcttacaggaattattraatattttgcaatcatccacttagctgacagattaaaggacacacttattaagttcctggcaacccaaagttgaatggaattgtttattccttagcagttacaaaatggaaatttaggcagccttgagaaagttgaccaatttyccatcacaaacactaaggagttaaattaagacaagttttagagaagaatattagactcaaaaaagatataatagttatacataatcaaactaaaactaaaaattaccttagatgttattgatccaaacttctcatcttaaaaatgaacatttgagttgcagagagttttcccaagatcactcaatgagtcacaagtagaaccagctagaattgggcccgtggcctttaattagggacacgaccgttctagttttgtcccacggtacccttcaaaggaatgaagtacagtcaacaatggtttgtcttctatgtaatattttctgtagactcctaatctgatttctgcataaatagaaccttctcaaattgaattatacttttcatctcctggttatgggagtagctgaggtgttcctttaaatattcaatgaatgccgactctatgccaagcattttagggattgtaaagataaataagacatggtctctgcctccaatgatattactgtcctctaagaggagagttktaagtggattagtttcaataaatgtgataaatgatagagaaaaggtgtgtatagtgtcccagaaacactgatcagacacccagcaagtgattaattctggctaagtgatttggaaaatacgatgtaaggagatggattttgatttgaaaatagtgcaagagaacagattgacccaggtggaaggggcaaaagcttggaartatgaggtgtgaggtctggtggactcagagaagtgggtttgaagtccaagatactctgtgtcaagaatgtatggccagagacgaagctggaatggtagctggagcctccttggaaaggacttcacatttgtgtcccatttaaattcactttccaggaagggtaacctgcttgggaattggagtgatcccagtgtcagctgtccttgtgtgattttggaacccagcttcatatgctctttgagttgtatagatccagctttctattgtagataagcagagtgcattttatcagttacagaccttcactgtcattgtcagctggcccaagcattcctcaatacactttcaaagagacctcagtaaagttacaaggctgaagttgctttttgacaatttatcctaggccactacatcttgagaagaaaatagaattgttctctacacctcacaggtggtcttgaattataacagagcacttaaaaagtgcttgttaaagtaatcagggataaagaagtgatgttgacgatgtaaatatatagttgctaggtagcagaataaactgagcttagagaccaatttccccccctctgctcaaagctacagacttgatgagttgaaaacatagataataattctactagctaacattttgtgagtaattgctggacaaagcactttctatgcctcatttcatttaatattctcaacamtgctatgaggcatgttatggaaactgaggctcagagaacttaagtaacttgctcaaggtcacatagctaccgagaaaccaagcccagggcttgaacctagtttcacatgatggacctatcacgcagcccctccttctggaaacattttctttgcttgacttttgctctccttgtgttttgccttcctccccagccatttcttctcattcttctttactggttctgtacttgctcccaacctctaatcattgaagtgtcccyggccttagccctgaagctcttcctttctgctcatactcactctaggtaggtggtgatgatgccaaatgagatagcacaggaaggggccagatttgaagcagaagagggggrcatttacatctaggccaatcgatttgaggtgttattgagtcatggaagagatgccaggttggcagtggactctggggcctggagctcaacagaggagcctggcctggggatataaatgttcactgcattttgtatacaatgtgattggagactttgccatgaatagggaaactgcggcccacagaggtgaaactcattgcctaggatcactcagcaagttaatggaagaaccagaactttgagccaagacttacatataggaggacctatagaaaagccatcagttaaagctcagggtataacatcaaaacagtgggctataaatggggctgtgtaaatgtggtccaagtgcagagcattctggaaatcacctggatcctgggatggaactcagaatgtgtgaaggagctgatggattagaagaccccatcaatatctactcagctggattgtgataggatctctacattcaaagtagaagtttacggcaagaacctgaggtctggtttatgtattaatggttgggagtggatctaggaaagtcaatggaagagccatagggcggactatcacaaagattgaaaagctgcatgtgaggtagtagaaggaaatagcaaagggccaaggatgggcaaagcccctatgctcagtgcatcaccatttccataattctctgggttgcttcctacataattttgaaaagggttccatgatgtttagttactcagcaccggttgacttttagtgagatgctcttaactaggtggaaagaactgcccaccccaccagacatcaaacacatctcaaatctacactcacctgtagaatagacagatgttaagtgagcacaagattccactaaccaaaataataaccattagtagcataagaaatggcatttctactctcaaaaagcccatgaawtagggaacacagataatagttatatgacttggtatgcccagtagaggtgtgtgtagaagctgccaagagaatgttgtccagtgagggtgggggagctgtcgtgatccattaacctgtgattcatctctgttcagatgatttacttttcaccttaccaatcatatgagttgatatcctaattatatggggctgaaaatgaaataaaacttcaattccccttaatagcaaggatacattcaggagagatgtaacatagattaatcttgacacgttcctctctctcacctcccacatcgagttcaacaccaagttttgatgagtctacatcttcgatatatctagaatccayctattttcctcyatatccactacctccatccttgtccaagtcatcatcatctcttacctgaataagatccacaactcctaaataatcctcatatccatccgtgtcattctgtagtctattttttcataggagccagggagaccttttcaaggcaaatctaaacacgttgtaccactcatccctgggttaaaacaattcttttgcttctgattgtttataagctaaagatcaaagtccccatcctgacttcacatacaggtcttgtccttctgaccttccccaggctctctcatctcacttcccctttctctgtgagctccgtgacaccataatcttctcacagtacttaaactttgtcacactccttctaccacaggacctttgactgtgctattgctagacagagcaatggcatggtcaaaggtcctgtggtagaaggaatgtggggtggaagtgtggtagaaggaatgtggtagaaggagcgtgggatgggaggcccataggccaaatccagtgcactctgtctttattagaataaagctttattagaacacaaccatgcttatttgttcatgcatttcctatggttgcttttgtactacaatggtagagttgagtagttgccacagagaccacctagcccacaaagcctaaaatatttactctctggtctttgacagaaatgttttccaactcctcatctagatcactggctatacccatgcttttctcctaattgattcctttagacctccattcttacatttcttcctttcctgacccccttctcccttcaccagattggatttcttttgttaggtgctatgacagaattgtattccaccttttttctcagcaacaactgcggtttgcaaatgtgtttaagacttgacccctctactagatgggaagctgaagaaaggaggaccatgtttttgtttactactgtatcctcagcagagtgcctgacccctctgttagatggcaagctcgagagggaaggaccatttattttctgcttattactgtatcctcaacatgtggcacagcatgtggcacagaatgaatacctgaaactcttgttgacagatgggtagatgaatagttggataaacagacaagacttaggtatataaatcctatatactcagagaaaactaaaaggaatatttagaaagctcagtacaactgacatcacacactattgtcctgttttcagcgttcagaattgaataaaggtggataaagaaatcaagggatgatgctttgccagtcagatgctatctggatcttagcctctctcccactcctgccatcacccactgtagccaacactgaagggaattttacaaagccctttttatggttcctacaaaaccagaagctgctgctcaaaatatcctcaagaagtcaaccatttggatctgggaatctgatacaattagtccttcaatcataggaataggaagagaaatcagctggtgatcttcagaccacatacaaatataggcagagattcagataggctactatatggccctcccgatggaagaaccaagaaaaatagtaaaggaaagaagcatatataacaacagatgtgattcttgattggatggatgaccctacaggtagccatggggacaacagtattctgaggaggttctgggagatgatgggcacctgttacatgggtttaatctatgtggtcatggatacctggcttttccacaccacttgtcctggcagccaagatgtttctctagttattgaaactccgaagtaaaaactgtgaggtaaaaaggaagatatttggaccatgctggttttctaggtgagaggaagccacgatgagttgataggatatcaaattcttctaggtgagaagcagccaggatgagtttaataccagcaggaatgagctgggtgcagtgactcatgcctgtaatcccaacattttgggaggccaaggtgggtggatcacctgaggtcagaagttcgagaccactctagctaacatggcgaaaccccatctctggtaaaaatacaaaaaaaaaaaaattagccgggtgtggtggtgcatgcctgtaatcccacctactcaggaggctgaggcaggagaatcacttgaacccaggaggtggaggttacagtgaaccgagatcatgccactgcactccaacctgggcaacagagtgaaactctatcgagagagagagagagaaggagaagaaggaggagaagaagaagaagaagaagaggaagaagaagaagaagaagaagaagaagaagaataagaagaagaagaagaagaggaagaggaagaagaagaagaaggaggaggaggaggaggaaggggggaggaaggagggaagaaaggaaggagtggggaggggagggaagaaggaagggagggagggaaagcaaaggaaaggaaaggaaagaaataccagcaggaaatagaatccttaaggtacttcaaggtgatcaaagaaaacatcatagagaagttgaatcttaaacactgtgtggtcagaattagtcaatgcagaaaagaagaaataagtgacatggtgtaacacaccatatcacaacttaacagtgtaaaacaacaaccattgtatttggcttctaattctttgggccaggagtttggataggttacaacagggatagcttgtgtctgcttgaaaatggggagcctcagctgggatgacttgaatggctggagawgactgtgacagctcttgtaggacaacatgtctgggacctcagttcttccttaggtggcatctgtcagggatggaaggcccaaatgcctccctcatttgcatattcaacccctatgctaaaatgactgtaacrtctagggtaggctggaatcactctctccctatacatctaccttaggcttcctwgyaacaggacagactcatggtaattgtacttcttgcatgatagctgtcttcccccagagcaagtgtttgagaaagccaggagaaatgctagtcctcctaaaaactaggctcagaactagccagcttcacttctgctgtgtatcattattaaaagcagtcacatattagcctaaatttaagggagtagaggagcagactcaacccttctataggaaaaatggcatatgcatataggaagagaaggaatcaattgtggtcatcctggwaacaagctatgacattattctaaaataaaagaatacatatacaggggcatagaggtgggaaagtctacttggctaatatagtcaataataggaatattttcaaaacctccattttccacttggattagcgtgataattctgctattacaagcaagtagttttgtggtctctgcacattttacaaatctatagcttttgctctcttgtacaattccttgtgagtataaatgtattccctaacatccagagtccaaaagacatcagtaatgttaacttcttcctatatcctgaaagacagggtgaagggcaggggacggtgttagcgtctctgtccatggtgttggtcttccttgctgttaggttcccaggaagacccttccttatgttgcacttaaaattataagtggattggcttctctgtagtacttgaaatattagaaccataggattaagtggtaaaagatgaacctgaagaggtaagcaggaactggggtctcgaatactagggagtttgaaatgtattatgtttctgcaaggagctaacatagattttaagaagtagaaaggaaggattgagtcggttttagaaagatcatcttggtgatagtgaggtaaaagttttggagagtgggagtggataaagctttaagtaagtattgtttctgcctatatcagacttcaaggaaagtgacagcacaaaatgctggtgcacatggaaatctgattacacacacacacacacacacacacacacacacacacacacacccgcttgtaggattaacagtcactacaacccaacgggtatggccaactctctgtaatgaagcaatggtagagagaaggtgttctacggcattccattcttgaaaccatttttaagccgagtgtattgactagatctccctgcttgctccatattgtattgattagtcagtattttgagggtgtgatacctggaaatttttggacatgtttgactttgaaatgagtgttcttattcagttaatgtctcatgggaccagttgagtttttccaaggtgaaaccttttatcttcaggatctttgatctaggttagatgaaattcccactgatgtacagacatgacagaggctcagaacataggagtcattccaaactaacagtcacttctgtctcttctgcagtggagacccaaatggtcatccagtgaatcttcagccagctgtgttctagcaaatacacacacttgcaaatctggtccctgtcaccctctctgtaacccttcttattctatcccatcattctcctttcatattgatccatcagcagaagtataccaataactcactatctttgttatgctttatttatgaaatagccatttgcctagcgtgttcttcaattttaaaaaacaaactcacaatgccactgctcaaccaaaaatccgttattggcttcccattgccctccagatgaagtaaaaattaacctcgtggcctacaaggctcagaatgacatgacttctgtcagcatctttagtctcatctctggctactctctgtcttgctcaatatactccagtcatattgacctccttcctattctttgaaaacactaagcatttcccaaaatatggctttcacaattctgtttgctctttccagaacagtcttccactctatatttcactgtttagccactttttatccttcaggtctatgattaaatgtcttcttttgagggattccctaaattgtctatctaaacagtggccacttgttgtttttttttaattttactacattctagtccctcttagcatgtgtcagaaatttcttgtatgcaaatgtttattcatttaataattttttggctaatgtctgtcatcttcaccagacttttaaaccatgattgcatagacaacttctgtccgggcttctactatatccctggagactagtatggtgcttggcctatgaatacgattgagtggtatttgttgaatgaatcattatgctaattttaagtcaggatagatcacaatggttcactttcactattcagtattcagtcaactgatcttatgcattgctgggacaatgaggacctgcagacatagcgatgactagggttactcttagattttaatcccatagaggaaggttgagggaggaggacaagggaggggaccattgcactagtctgggagagatatatggtgcactttgcacctccatttcttagaaagtcctaatcctkgtatctttgtcctagtcatcagttctaaaggccccatcaccaaatactggcttccttggactctctaccactcagtgtagccctggaaaacagagggaacactcttcagacccactttgtgtcccctactgcccctacccttgtgatctcccctctctcctccagagggctctaggcttctagccttttacacttccccagtcacagcttactcttctccaatttcatgcccttgtgagccttcccaatatctggcataatctgaaaagtcaatttactcttaygtattaagggatgtatcatattgtatttaaatgggaaagtacaagaaactaatatttattgagccctaactgtgtgccaaggactatgctagatgctgtgcataygttatatcatttaatccttaaaacctatgagttgatgattattgttggtactaggcttctttcacacatgtggagattgaggttcagggagattaaataacttgctcaaggtcacatagctattagtagtagagctaggatttaaacttaatctttctcttgcatatgatcctactactataatgtactccctcccaaatagtgagaaatatgcggacacctctgaagccactaagtaagaggatggcatactgggacagtggtgtcttaaaatcagaggatataggctcttgtttactccactgatttctaagattgcactactctcttcagaggttagagtgtaacaagcttctgaacatgctgccactcatttattcaacaaggtttgttgagcacctactatgtgcctgacatattatgcacttttaatatacatcagtgaagaatacagaaattaaaaattccctgtctttctagagcttacattccattgatggtaggaagtggaaagagagacaggaaataagcaatggacagcaaaagataagtacattatatgatatgacataataacaagtgagggtgcactgaaacaatagaacatgctgaatgggatcaggagtcataagtggaggaggattgcagttttatagaagatgacatctgactaaagactttaaaaaggtaacagatgtgagccatgtcaggaaagagtgtctctattagaggctcccaaggcaagcatgtgcctgatatgtggaagctagaaccctgttccagctgtaaaggtcagtcaaaaccagtggaacccataagaaatatggacttctcctctaaatttagatcctttcagaaggtaccattgtaaattaaatgggttgaaaccatggtgcttccaaaaaatagtgaagacccttgtgcctatgagagctgagtctcaccactagyctagccttctggggtaaggagaaaactctgtaatctttgacttccttgtttatgacaaaacacgtcwatctgcaggaatcttcccggagccaccgcatccaggatctgtccttggtgctgaccctgatcttctttagctcaagatgatctagcattgatttctgcatcttcttgcccattgctgggttctgctattactacagctggctatacttggctattccatgcctttctttaggctagtcacccatactatcatcatggtgattgctccagccccccagattccggtacacctaccccattcagacttagtcccttggccctgcttggcaaagagcccagtgtaatactgttaaggatgttagctggcacagtcacttctgtcattgttttctgaaagcatcattgctttttcaactgaccctaaatgtggtgagggtttagtcaccattccaaatcatttatttagcatgaaaatttattagttaggccattgtttagcaaattcatcacattatattttttacttagcattatcacttaattagcgttttattactggaattggctgtcaattatgtggctaattcattgtcttagggaatggattttttatctgcgtaaagcaattgaaagtacattgttaactctttaacgattaaagattgttgtcaatggcaattcatgtgataaggaaaattaaaccatttactttccttgaaaaatcagatcttggaaaactctttggaaaagtgtaaagagggtactttagaagctttcatgaattaaaaaacttttattaagtgaatgccttggaatacttggcaaagctaagcaaagtcagctggaagattttgactggactccttggaatgaattattataatatactctcatatgtgtatatttaaatgttctttcatcgacattacctcttttggttctcacaaaaacattgcagaatgatattaggatttgtggttggcaaactttaagatggccccaatgatccctgcctcctatgccacattcttatataacgcccttcctcattgcagccaagatctagtgactggcttccaatgaataggatatgataaagtgatgagatgtccctttcaagatttgtctttaagaagactgtggcttttatcttgggtgctctctctcactcccacttgtctgttccttgggaagctagctactatattgtaagttgacctattggcaagaaatcgagggagatgcccagccaacagccagcaaggaactgagtsccatactgcagtagcccatgaaaaaatgaatctgtcagtatcatgtcagtgattatgaaatcagttaacttgaattctctcccagctgagtcttcagatgagatcattaccacagcggtcagcytgastgcaacctcacaaaagaccttgagccagagatacacatctaggctgcaaccagatttctatctgcagaaactgagatcgtatatgtttgttattttaagctgctgtggttgggggtagtttgtcaagtagcagtggataactaatacatggcttaacatgtgagatgttaattaatttgcccaaagcctttgactaataagyagtagagccaggatttaaccctggttcttctgatgcatttcaatagacaagaagataggaattacagtccagacctctcattgcagctgccagggatcctcaaagctttgacatcccataagggcaactattcagggactgtttccctrtaacattgactcccttatgacttgcacacctttattactatgagaatcactaggrttcttcagaggctggcaagcaggcttgaaaaacagatcttctggctgggcacggtggctctcgcttgtaatcccagcactttgggaggccgaggtgggtggatcacaaggtcaggagttcgagaacagcctggccaacacagtgaaatcttatctctactaaaaatacaaaaattagccgggtgtggtggcaggtgcctgttatcccagctacttgggaggctgaggcaggagagtcgcttgaacccaggtggcagaggttgcactgagccaagatcatgccactgcactctagcctgggcgaaagagctagactccatgaaagaaagaaaagaaaagaaggaaggaaagaaggaaggagagagaaagagagagagaaaggaaagaaagaaaaaagagagagaggaagggaaggggaggggagggaagggagaagagaaggagggagacagacagacagaaagatctttaccatgttcccaataaggaattgggtcaaacttaccattcttcttccctaggtgctatcctgcccccccataaaatggttataacagtagttcccaaaacatgactggccccaaactaaagccactaaatccttatgtctagaatatggagcaaaggaatctatatttagtatgttctttgaatgactcttgtacggtactagcatttggaatctactatataaaacaaagtagtttggcatttcagtgatcagcctctataattcagcacctgaggatcagccaggctgaaccttgatggggacacactgctttattcattcttatgagagtgttaggtatctgttctttccagggttaaggccatcagatttaattagttgcattttttggttggttttgaacaatactaagctgtactacttcattcattcagtaagagcagaaagaataatgtttgcttttttaagagaaattccaggacctttaaagaacacattgtatcttttaactggaagctcccttagagaccacctaatccctcactactcaaggtgtggtccatggaccagcatcatcagcatcacctgagagcttgttacaaatgcaggctctcaggccacacttcagcccactgtattagaatctgcctatagaagatctctagatatgtacattacaccttgagaagcattggtctaattcagctgcctggttttaaaattaaggtccacaaaggtgaaggtaattgtgcaagataatttagtggtaacaccaggatgaaaactcaggtcttgtaactcccaaactgtgttctttccattgtcttaatgtcccgttgtctttgtagttcataatatccacaaactcagcctaaatatccagggcatagtttgaaatggagaaaggaagcttttatccacccacaacaatggcaaactctttcaaacatctgttgcacatttaaatttcatctttcagacaagtttagttatttcattttctctttcttgcacatcaacaaaagacaaagtcacctgtcaggctgaagattgtaaaaacctgtcaaaattgagtttttctagtttagctaagtattactctgcaactattttgcattccttagtcttattataatttttatgaatgagagatagaaaataggagcagyctgtattttcagtgtgaggcattacttagtcttttccttctatcacacatcttcccataagtgtgcaggttatggagtttggtgatatatacataatacaaaattctgggccagttgttttcagtgcacatacaaccctggagccaatgagaaactccaaatcatgtccagtcccctggagccacagtgaagctgaacattttcactctgagagaagagcttcggatctgagtgtagttaaaatcaccagaagcccatcaggagaagataygcattttgagtaaatgtggcttatcaacctccccacactcaccaaggcaaatggaactgaggcaggaaatagagatcatgatatcctcaccaaaagaattagaagacatgacagatgaaccttgaagataaacaaacattgtatttatcaacaaggtggagggtggatttcagagagcaaggwgtacctaacaaatgagtgtttccagagtaggcactagattctggagatacacgagtaaacaacacagatatgatacctgtcttcatggagcttacagtccggtgaaggataagatactaatctcactattattcaataactatagtaattcatgaagacgatgtatgttcaggaatatacatatattgtaattcatgaaaatgatactgttaggatataacatgggaccctcagatggggatggaggcagacagagatgtcttccttgatatcttcattcagaaaagttaaaatacttttagtgaccagtcatcccctagattctactattaacattttactatatttattttattacctatcttcccatctatccatccttcaatccatcttaatttttatgcatatcaaaggaaattttagacatcactacacttccctttcctcccaatatttaactgtacacatcattaatgcmgactcaagagtctggttttttcctttgagataaaatttacttgcaaaaaaacacagaaatcttaggttttccattttatgagttcaacaattgcatacactttgcaacccagccccctagtaatatacagacttgccaggaagatccctcatgcccattcccagccatcccctgcccctactcaacccaattggtaaccaccattcattcataccacagatgggtttgtttattctagaggaggaattgacttgagctgagtgctgaaggatgaataggagtccacgtggccttggaagtttgggggaaaagttataaacactccaggagaatagcacgtcctgtacagattctcaggtgggcgagaattcagtgaggagacagtgtggctgcagcctagaggggaaaggacagagagacacaagatgaggcaaatgagattggtgagagctagaccaatcatagccttgaagccatattaaatatcttaaatctggaacatagccaaaggacagtgggcatccaataaaaagtttgagcagggaggtgacatgctcagctttggcctttgaaaaagttctcatgccttattttggagaaaagaacatggagaaggaagaggggattcaaggagttgtaaggatgttgtttcagccactatggatagggaaagagaggggcagcagatttgaggatcctggccatggagagaaatgactatctcttcttctgttgtattaacctctgatgtgttgaacttctaacaattataacctctgatgtgttgagcttctaacaattataaatcagtgcttgattttctctttctatctccagttttcagagatactagccataaaggctttgcagaaactggttcagagagattgagtaacttgcccaaaatcacacaggcagtaggtgatggtgtcagggttctcactcagccctattcatgtccaaagtctgtacgtgttagaccactaccctgtcttcagagagtattgtgtgagcctctcagtctttcctattggacttgccgttttcctcaatatatcagattcttcaaacactctagaattttcaaggcagaagactgtccgagttgctggcagtccctgtcaacacagggccccactttgaggataagttcacctgcccaagttttcctttaagtgatggtttgagaataggggcaggtgagtccacatggatctatcaataccgggttttatttatgctggtagtggctctgtgaaacacagaactgacatgcagagtcgctttccatttcttgtgcttgctgcctcaatcaatccctttatctataactcagatccttcctcatttaatcccagtctttccttccatataaactcctctcaaatgccacacccttatcactcccttcatgcttgcaagaatattaaaactgtgtgatttacctttctttattatttatgctttgagtaacttactgaccaagacatgttcttctaagttcttttgcatatgctatttatcttaacaagccatagtcacatgcagaacttcttactgaaagcatgaagtaactttccaataatattaatctttctaacactaagccaccttacagtttcatctactttaatatacttcattctcttctgaaaaataatacactctctgggaatccattctttgccaaccaatatttgtactctactttatcatcagtttataaaattctttaggcgtatatttcaatgtctatttatgggttattcttctaccggtcaaagttcagcattttttaaggccattattttcaacaacaagtgtctctgaaagtataaatggatggtgaatatgcaagaattaaataatcaacctacatgttaccaaaaagggcttatatttccagtgagttaaaagacttaaaaagtccataattatatcccttcttctttgtggtgcaacaaaatacttccaggattccatgcacgcccctcagctttattccctcacttcctagtttgatcactaagtggttaaggccagccacagagaatccctatcactactaaacatctgttgctctggmaaactcaacgacytttcattttttttccaaatgtattgtttatacaacctatgctgtggaacactggtatcagcatttttgctgcctctttcctcactgattttgatagaattttgacaaaaagaaaaaaattattttgaaagttttttaaaaaatagtgaaacccttttttgaacaaaattatacctagatgtttattttctaaaacagataaaaagccatttatatctggttggagaagaggtaagggaaaactcacatgcttgccaggatacacacactccccacacacatgacatgcacaaaaccctttattgtggcccagttcactccagacacatagaagaatctctgaacagaggtctcctttcctaactctgcctcagctcttagggaactaagtccatagactgatgctttgcttattgcttcctctctagaccagatgggtgaaactttccacttgatttactcaaaatgaaaataataaccgctagtcactggaacaagtcaagattgatggcccttgtagatcacaagagcaaggccgtcaaaggaatgacaccctctaaaattgaacagtgcacagcatgtatgaccagccacatattgtggtcctgtggaagcctggattaaaggagcatcaggaaagatgggatcccagtttgtcgatccctagcggagtttggcatttcactgagagacaattcttttcattattgctgcagtctcccagaatctagtaaccaggtcttagtgtagaaagaagaaactcarcgctagtgttccattgcatgagdggtccttgtgatgtaaccatttctgcatcttgactgtgatggtggtcacacaggtctacacatgggataaaattgcataaattaaacatacacacaagcgcatgtaaaactaatgaaatctgaataagatcagtaacatatatgtcaattttctggttataatattgtactatagttacacaagtgttaacattggggaaaactgggtgaagggtatttaagacccrtttatgttatttcttacgattgcatgtgaatctgtaatgatctcaaaatatgacttcttttttaaaaagctagcacccaggtgatgggctggtgtttaccagctgaccctgaccacgtccatcagagtcttgagatgtgtctcagggcttctctggtcattaatcattctccagtctaagcctgggctaaaaatgttctgtcagtctctaacaactgtgaagtggcttatttgtgtcttttttccttaatcattttttggcagaggtttgtctaatttgttggtgttttcaaaggaaagagccagcttttgctgttttttttcagctcctctgctgtatctttaacttgtgttatgttccatgtctgttcttatatacatatttactttctttctattttcaatgactatgtttttttatctcaagaagttgaatgtatatttttcaaacccacctatcctttttctgtcatgtgtgcattattgcaatggttcatattccttcttttttctctttaatcaatctaaatgtatttacttaatagtctctttgattgttttattattttcaattcttgagaggtgtatttttctgtgtatgatgacttctgactctctcctatggggataagattccttacaaggctcttgtcattctttataatttattttttactatgagttcgtctttagtggaggcagttttgttctgtgggaattaatgtgccttggattatgaaaatacctctacaggatgatttctcatttgcttgtcaggacagtgtagttttcagtggtattacacagtttttttaatgttgatttctatgttggcaggtgcttctatcaaacaagtaacaaaatttggatgccagatgcacttgtactagaagtcagggttttcttttgttttgtttttttatctctatttgaatcctgttcattcttcttgttatgctagtagttgatgccttaaacacacacacgcacacatgcacacctctacagtaccctgtacagtacatacacattcgcttaaaattgtgttcttcaattaagagtgtcaggattgaaatagtacacattgaatatccattatgaaaggtgaagaagataatatacttttattcctagtgatgtatcagtcacccacttcctggtttttgttaatacaattggaaattttagccaagaatttttatattagatttttaaatctgatttctctttaagcattacctcttatagttcattctgttttgattcacatttattgtgatttttacactcatatctgtgtttaccaaatcaactttttttataacaagacttcttccattcttgtggatgtttttttctctatttctggactcacatccttgactagctttatcagctacccaaccctctggaaaagaatcagagccaacataacttcttattctttatgtgtcagggaatgcctttctgtagcttcgcaaatgaaaaactatttactgtataattttttagccacatcatttttacttgaaaaattttgtttcattgttttctggaatttaaatttgggcaagaaaatgtatgagtaacgtagtttctgattttttatacatagccattttccagcctagatgtttatctgagtatttctacatcaataatatttaaacaattgtatcagaatataggctctatttttaagttgtaggtggagaactctttacacgtgaagatttaagtttttattttgccaatgagttgttttaatattgtgtcctgataagaaaggacacataatgtgcttctgttccatttattctgttcttctgtaacagcaattatgtcttttatatgtttgttttcttttctctaaaaatgtctttttgttcccttcacacatgaacacacatgagcagatgatatatacaaaggaaatatacattgtattgttctgctttccttgcgttttaatttccaagtttttcaaattaattctccacaagcctgttgcttattctcattacagattccagtgcccattttaattctggtattgcattttggtttctttacaattgtttcttacctcacccagtaaatattttttctagctacttcttaacttgatctattttgggaaaagtctgttgtcttagtcttattatttcacctttaatttcctttattcttctatcttttctcgcatttcgttttcaataaacttcaaggaacctaaaatgcacttctactttctgttgtttagattaagataccagtaacagaaaaaaaatgaataaaaatggcttaagcagcaagttaatgtattatcttctagaacaggaagtcaagtgttagagttggttgaatgagatgcccatgaatgtcattgaggacccacattctttcaagctctcctcttcatcmtcttatcttggcatgagggcaacctcagcccagctcccctcatggatgcaagattgtttcagcagttccaggcatcacacacagacatggtactgtctggtggcagagacgggccactggattgtccttcttagagataagagaacctttcctagaagccttctaatggaacttccctcccatatcatataaaagatttttatttaacttgcaaaaggtatcggaacaccttgatggcgtagggacatcagaatttgtcccttgttttgggagtagggtcattccctgcccccgcccccaccaagtcatacggtgaacttagccagaaaataacaagacaggggatggctcttgggtcaacagtcaatactgactgktgtgtgtgtgtgtgtgtgtgtgtgtgtgtgtgtgtgtgtgtgtgtgtgtttgaaaattgtacttttcacggtatccaggctatcactttccttactgttaacatggtggattttcttctaagacctcatattatcttgtttctgtttatttaactttaaaggaagagaagtctctccagacctgttgcttgccagtaaatagaggaggtagatcctcatcgttgcctcactgtccaactagttattgttggaatccttttattccataccatcctggcatgtgtgatgctgctataattcatcaatattcctcccaaattctggcagtggtttaagcaagaggagcaatggatgtttatagcccccatccctacatagagtgtctaacaccatccttccatctggtgtgagtgctgtgaaagaaggaattcatactctcccccacaagcaggaggattgatctctttatcagaaacagtaaatgaatcctagaagcattttcccatgactgttcccatcacaattgcttcctaacactgaatctgcgtctcggaaacaaagataccatcttttgtctttaccatgtcaaagaccccagtgatggaggtttaggaggagaaagagcttggaaatgccccaaccctgctatatggttgatacagtctttgattctctgagctcaggaattaaaatgagaaaattggaagcatttcttttctgttcttcargccattgggtttgctttatcccaagtaacaaagtctatcaaagtcaattgtatcatgtttgtttcagctccatagaaaatggcacagtggagtggcattctattactattagttctacaagttcaaccctactatgtgtttggtcagacataagaaagatgggaaaaggtaaatccatctgttgttacattgagtaagaggatgtgaatctactgttcctcaggggtcacaaatctcatacacctatgctagtgcaagtctagaattcagaaacacagaacagagcattcttacaacatgactcctaagcacaagcmaactgcttcatcttatgcttcaacaaggaaatgtaatcacttccagcgttggaggggaaactacctgtggttgaatcaattgagagattatgttgaatcaattgagagagggattttcgagaaatttttascagttgaaatatatatcttcctgcacatgggatgtgtgctgctgcaataataaacaagttttcttcccagattctggcaataggttagtggatagacttagatttcagagctgttacaagtttattatcttgagccttttctagtattttgtgagggagaagaggggaggcactgactgccagccaggttccaccttgagatttcttccagtggaatcacatttaacccttgcaacaaccttctcagaagaagatgatgatgatcaatcatgatcattgtcatcaccatcagcaattacaaataaagaccttaggctcaaagtatggttacccttgaacaacatgggtttgaactgcacagctctacttaatatatgaattttcttctgactctgtcactcctgagacagcaagaccaacctttcttcttcctcctcctcctcctcctcctcctcagtctactcaatgtgtagacaatgaggatgaagaactgtatgatgatccacttccacttaataaatagtaaatatattttctcttccttatgattttctcaataacattttcttttctctagcttactttactgtaggaatacaatatataacacatataacatacaacatgtgtgttaatcagctgtttatgttatcaataaggcttctgctcaacagtaggctattagtagttaagttttgagggcgtcataagttatacatggattttcaactccacagrgggttggttcccctaacctccatgttattcaagggtcagctgtaacttatttgaggtcctatagctagaaatctgtgaagatcacatttgaatccaatgttttatcttcagagtgagtctgtgctttgactctgatacctgctgttgccacagtccccacagtgttggttccagttgcatccccactctgtgcaggtgacccagcctcctcttcacctcaaaacttctctcctcttccagactctctcctctcaatgagcagtcgctagctacttacacatcactcttcatactctcctgccctaaagagcacatggagctaggatgaatagtgatagaagaaatacattgatactggtaaggaactacaggaatttgattrgctagttaagaaattttgtcttgactccctgaagacttttgctaagaaaaatgacttgatcaaagctctgtaaagggaactgtgaaagaaggaagggccatcaggaaactgatggagtagtcctgtcatgaagacctgaatgagggcaatagcagcaggaatggagtaaaatagatggctttggggtgtgtcataaaggaaagcagagaggagacaaggaaaggcgaaagaagccctaaatgactccctagatgccatctctagtgtgtggattctcatatgtccaatatgacattatgcacaaattcatcagaacaaatactggtttttactgcttcctggataccagacactgtactgagcactcagcatgcactatctctttgaatccttacaacatgtgttttctctgtattatagataaagaaactgagatgcagaaagatttgtcacttggccaaggaatgatccaaaccccattctatctgattctgggacccagactcaacatttctcagggtgcagattgagttcccctcatgcaacatgaacagaccccccttttttttttttctaagatggagtcttgctctgtcacccctggctggagtgcaatggcaccatcttggctcactgcaacttccacctccctggttcaagtaattcccctgcctcagcctcccaagtagctgggattacaggtgcacagcaccacacctggctaatttttttgtacttttagtagagatggggtttcaccatgttggctagactgatctcgaaactcctgacctagacaatccgcccacctaggcctcccaaattgctgggattacaggcatgaaccaccgcacctggccccracttcttctcaaatagttatgtaaacattttagtgagcactaaaacaaaattagcacatcacattcatgattttatgttgcactatcattcataatgaggcaaagttaaaaaaaatagttgagagtttatctgaagaaaagttttgaagatgtaattgtgtagatctgcattgttcaatacagtagccactggccacctgtggctatttaaattgaaataaatcaaaattaaattaaacattcatttcctcagcaccagtaggcacatttcaaagtgctcaatagccacagatggccagtgactaccatattgaacagtgcaaatatagaacattggtgtcaatgtgtaaggttcttttggatagtgctgggtgagagctgttttacactggatcagtgtctttttatttagcatttactccagctctaaattacctctctttagaacttgatctggctctggataagtctgtgtgcacctgcattgtcccatacattagcctaccatttaccagtgtctgttgaatcctggaaatatggccagtctgaattgaaatgtgctgtaagtgtaaaatacacgttggatttcaaagcttttgtgtgaataaagaatgtraaaatatagcattaataatttttgtgattatatgttgaaatattatttcagacatatggggttaggtaaaatgtattattgaaattactttcatgtgttctttttcgccttatttaatgttgccacaagaccatcttaaattacatacatggcttgcaatatatttccactggccagtgctattctagacctctttgccccactgtgtgactctagaactctctttctttccctatctctttctgtatatctgcactgcccaatatagtagacataagccacctgtaaatatttctatttgaattaattaaaattaaacaaaatttaaaattcagctcctctgtctcatcagccacatttcagacgctcagtagccacatgtgattagtggccaccaaattgcagagcatagatgtagaacacttccattgttgtggaaagttctattggacagctgtcacatagatggtacacaactatggcaagagacacagaggtggatcatgaatgcctaatgcttggagaatgtttccagattgccaaaccccatggcacatccttcttccatctcttaggggcctgtctcttcctatcttaggcttattcacgcacaccttatattttcttctcccctccttcaagggctgtggcctgcttatttctccctgaacatacctccctgctgtatgaacacaatatctaacgtgcattgtacagtataggtactcattaaatatttcttaaccagttggagtggcaattcccagtaagtgatggaaatatgtgactaaaggtagagggagatctatatggctggtagcagtggggcaggggataagggtgggcagcagcggtgatgaatctaggatcccaaggaagaggaggagagagcaggaagacagcaaagaggaaatcagtgagacagtaacccaaaatctcatacacagcaccaaaatccttctgcccatcccacaagctcctcgcgggcagtaacaagagttactgcaggggaattcacagggttaggtaacagctatataaaaagtgtgaaagaaatccaaaatattattgcacgataaataaacataccaaacccataaatcagaagaaggcatgagaattaaggggctggtgaggagaaaaaatgaaaaatcctctgtccctgggccagctggtgtgagttacattttatgagcagcgtgtgaattccagtgcccttgttgaattagcagcagaatcgcacattagttttaaggctccctcttgaacaggaacatcataacgtcttttaattgggcctgataaaaacgtagcattacttgtaggttcctgagagaagtgagttgtgaaattgggttttcattaaacctaacgatggaaaattaagtatagtgcgtctggtgaaatggagtgtgataaaagacatcacttctgcattatcagaggttaataagggaataggtgaggtaagatactttggaaaggggagtctaacccgttggattaataaaccttgaaaatcccttggttctgagtcttcatagcatcattagcactggcattgacattattgcaaatgttacagcaatacaagttgttaaatttcaatgcatttattttccattccagtgttggttttgctgacaccaagtttacagtctgtctagcaatgtgtttagggaaaatatccatattgacagctatttggttttggaaacatttgacatttctcacacacataaaaagccaagttcccattcctaggaagcctgtctttcccaggcagctggtctcccatgcagcccatgccccaagttcctctgggagactgtgggtctctgaagacaactgtccccatgtttgatggtagctttggtgggaaatactcacaggcctcctagcattgactcagctcatcctttcrtagaaatcatagagtatggcatgactccaagctttaggtatgcagcatccatacctctgyggctcttgccatagctttgtaccatctctagatgaatcaaacacaagtgctcccttcctctccatttccaatcacaccatcacaggagtgatattcgctggaaggatgccttcgatgagagctattcatgacagctgggacacctacaagaaacagtgtgagtctttaaagaaggagattcctcctaaaacccttcagcaggttcacactggcttcaagggtcttgcacattcacagtctctggatctgccttgcaccatctgttacagtgttgccctcccctgacatttctacccacagcttttactccttatcaacctccttgttcttaactacatgtgccttcatctctcaggctctgtcctttttcttcagttgattcttctcgtctatttccttgctagacagtcaagccttgagggtggaatcagtatttctgtctgcattgccactgcctaccatagtccttggcacagagtgggttctcagtaagtcgaactcatgaaaccaaggggttgatggagaaagggaacacccccatgtttgccaagtggtacatttaagcaatgccagtgaayatgtactagctattacctaaaatcccgggagaaaaagtaagcagtatttctctgtgcagtcaggaaggttttgctaacgacttgcctaggcccttctttcttgtgcataaatctaaatcttagaaatctttctgtaagcagtccaggggttatttggctggtccccaaaggacagtctctcctttggagatgtttacctaccaccctgaattaggaagttttagagaccacactctgcctacgatgaccccacctactaattaggtacgaccccatcagtgtctcaaagtcagaccagtcagattagtagmctctcctcccttggtaggtggaggcaggcagaaggctgcaaagtgaaaaatttatcccctactccaaccacagatataagtgaaagcattagggtgaccaaccattcctgtgtgcccatgactgagaggtttcccaacagctgkactttcaatgttaaaactggaaaattgtcagtcaaactgggacaagttggtcacctagaaagcaggaaggtcaggtgttcccttccattatctttccttgccaggaacaggcttgccgatgytgctgccgagaagtagagtgtgcattcacacacaggatccatgtctgatggagtattccaacatgacaggcaaataagctgaagggcacatggattttgaaaagacaagttgcagaaaattgggaatatatgctaaacctcccagggaatgagtatggcataggccgagtgggtacctgcataggtgttttgcagggtctgaaaacatctgggggagacacattaactgctgcagctggcagttctcatctcttgcatgccacaaacaagatggtctggggcatagactgtccatgtctttggaaggaggttgggaagaccaagcctagatggttctgggaaaggtaaactggccctgagagatcaagaatgtatgcctggcagggaggtggtaagcaagaaattggttctagtcgtccaaggggaacagaagaattcaaacccaatctgaccaggcatcagttttcagggtgaccaaactgacagaaggcagttaaagcaactcattggatgaaaaggtttttatcaagagagaatatagatcctacatcagggagagattttatgaaggcgatgagacatagcatccaggcccggggaaagtagctagcagcactgaaggaagaggcccaggcttccctatctgcaaagtgggttcagtgatgccactggattaatagtattaagtgatggggaaactatacaatagcaagaaggtggtcactgtggcagagctcataactagagagagcagctgggagggtcagggtccctgctagcttctggcagtccaagactagccccaattcttcccagggtaaaactcaaaggaaaaaaaaatagtagagaagccaggtcacagccatgcaggcaaatagaccagaaktatacatgtgactccaatcttcgagtacctgaggccacctgaggctctcctcccctgcagacaggcatcaggcactatttccagcctctctgcttccgaaacaggagggggctcccaataaatagcctgcctagcttcttagtggttctgcccaacaaagtctaaacgaaggactgagacagacggggwtgatgamcaacctggaactttatcagtctgtgcccttgaaatgtgttgtggtcattggtttgcttgtgggtttgatacttagatctaccaacacagccaggccagggaaggagtgtatctccaatccttttgcagtttccctatcagttgagtcccaagttggttccctctgccctcctcaggccaagctgggggagacagggaggacaaagggcaaagcttctataggtgatgatctgttctgcctccttcttttcgaagcagatggcagccgcggggagctytcccagcccaccctcacgatccagactcatccctaccgcacctgtgaccctgtggagatgagctacccccgggaccagttccaacccgccatccgggtggctgacttgctgcagcacatcacgcagatgaagagaggccagggctacgggttcaaggaggaatacgaggtaagagaccagcctgtggggaaacttcctgatagtttcagaggcttatttgggcactaaagccttgctacaaaaagtatggctccctggccagcagcctcagtatcacctgggagcgtgtaggaaatgcaacatctcaggccccatccctccctactgaatcagaacctgcattttaaccagaaactaggtgatttgtatacacattaaatttgagaagcaccatgctaaataattctaagacatcctttttcactcttgtttctctccccttcccctttcattatccaaagtttcattacctccaacgtttctrcactttggagtctcacctccattcactatgccagaatggctcaagctcccatcccacatgctgtagaaaagccagcacatctcccctgccaatgatttccagcatgcatgcttgcccttggtcacctcttgtctcatactcaagcttctgtggtattctggtccccgctcccatcccccgaaggcaatgcttcatctccagtgaccacagttccctctttctgcaccatctcttcaccctgcactgggcatccctttcccatctccccaaagcatccctaacacaaaggatttgcaggtagtggttgttaccgaggtttggggaataatagagaaggactgcagtaaaggacaggcagcagctcaatacaacgttgttcttcttataagttccttaaccatctacattgctggtaaggccttctaaggttctggtctcctgacaggtctctatctaatttctcctcaaagtcttctttactgtcttcaaaacttcctccacccccacccctcagcatccagacaaagggcaccacgttcctcttttattttgcagaacaatttagctttctttatctcactctttttgtttcaaatcctgcccattaggcctcacgttttacaaacaaaaagcaaaataaaataaaaggaaaatgcattaagacgtttttctgaaccaaagagcagctcactctccaagaataattctgcaactctcctggttgcagttagactccagctgcagccagctttgaaaacaagaatttctttcttcacttttcctttcctgtctctcccttccctccttctttcctaaaatatcttttgagtatcttctgtgtaccatggtctgagttatatgtatttgtggtttttttgttgtttgttcttttttttttcttcacatgcagcgtgtgccccagctatgcttgattcagttttgctgtgtgcagtagaaaactcattggctcagactccacacatttggaattcttaatattgcagactaagtttatccctcagactatattctgagaaagagcttacaaagcaatatttctgaagtcgtatgaggtcatgaaattgtgctaaactgggggtgcagacagctggattccaatgtagtaagctgtttgattttagaattttgctatctgagttttaaaattctttattagtcgaatgaagaatttggataaggtgatctctcaggacctatctggtcctaaaactttatgagagtgtaaaacatggtgacaaggggcatgtttgacatatttataagaacaaaaatgtttatgtcaatggatgtaagtaattacaagcttgggagagctagcacttaatttcaaaaacggtctaagtaaaatagcacttttcatattctcatctacaaatcttgaaaggatattcgaattagagttgaagaagatgatctcatcactacccatccctggatctcatttcctagggggttgaatggtcccagtctctgggacatagggtgcatgtgagcatgctttctgtgtgtgtatgcagacctgcttgttgaacaaatgtcaggaagattatgttatttggtaccctaaaacttaaagtataataataattaaaaaaagaaaatattttcaagccatatatccaagaaaaaaaaaacaagattctatagacagcatggccttcagaggatgggttatattttaataattagcaagaaagtgaggaaggcaacataggattgggaaaacagcctccaggtggcatatctcccaaaagaaactggaagtatgggaggtggataataaatagctgtttgggtgaaaaaaaaaaaagaaagaaaggaaatggtatattcaacattagtcataacaatttgattaaaaatttcaaatatcattaagggagatatgtggcttaccaaaaaaaaaaaaagggacaagtagccaaatgctgagaaacacatatgtaagaacttgcaatctgaaatttgaagacagaattacaagtgtatttgactactttcatgcatttcgttctagattaatatttcttttaaagcattcatccctgtgtggtgagttgcttttcaaactttcttcgttgtacccttttgtattttccaaactttctagcatggaaatgaacagcttttataatgagaaaacaaacaatacatgttatttcatcatttgaatctcaaccagaaatctaactaggctagccttggcctcaattagtccaaattatattaatcagcaagctgtaaagcttagcttctagttaacattattttctgattaactgagggttaattggaaaatattgcctgataaaagtcatttcacaatgtgctagcccgcaatgtccagcccagaatacagctggattgctttgatcatcaaggctmctgtgatatctcggtaatcctcctgagcataggagtcacagatctgctaggagaatcattgtcctattgcagataaaagactcctgagcctccagtgctactctcataccaacctgctctgtgctgtttgttgcctgtcacttctctgctctgttcagtgttttcatacacatgagtgggtttgacaagttgacatctaagggacatctcagccatagcaagctgcatcagaagacaaaattcaattcagttgaataatcacttaaaatttgttcagtaaatatgtactatttactattcccagggacaattctaggtatttaggatacaacagtgaatgaaacaaagattcttgcccttctgaagcttgtattctagaaagggaaataggaaataaacataagcttaaaaaaataagcaaattatataatgtagtgtgttagacagtgagaaatactgtttgctatgttacaaaccactccaaattttaacaacatgaaacaaccaatctcttgcattcattgattctgtggaatctgtgcagggtacaacagggacaacctgtttcttctacacagtgttcagagccttggctaggaagtctccaaggctgggggctggaatcatctgaacatgtcttcactcacatgtctagtgactgatgcaggctttcagctgggattgtccactggaagacctacacatggcctcttcagtggcctgggcttcttcacagtgtagtagccttgggataggtggacgatttccatggtggctcagaactccataggtgagctccccagataacaaggtgaaaagtgcatcaccgttgtggcccaaacttgggtatcacactgcattattcctaccatgtactattggttgtaagcaggtaaaaactccccactttctaggagaggggaatttgactctatcccttgatgaggaggaggggcagttgccagattctagaggagcatgcagagcaagaaatattggggggggaagaaaatcccagcactttgaaaggctgaggtgggtggattgcctgaggtcaggagttcaagaccagcctggccgacatggtgaaaccccttctctactacaaatacaaaaattagccaggcgtgatggtgggtgcctgtaaccctaggtactctggaggctgaggcaggagaatcacttgaacccaggaggcacaggttgcagtgagctgagatcgtgccagtatactccagcctgtgggacagagtgagactccatctccaaaaaaaaaaaaagaaaaagaaaatctttggataataatacagtctgccacaagtaccatggaaaaagaaagaatagagcaaggaagggagatttgttccagggacatgaagtagaggaggttccaatagtaaaaaggataaaaggatagtccttaattagatgacgaaacttggaatatagacatggtggaagatatctggaggaagagagttccagatccagagagtaatatatctggcatgtacaagcagttgcaaagaggccagggtggcagaggaagagtgagcaagggataagagtaataggagattcgactggagaaataaagagggacctgaccatgctatgcattacaagccgttataaggactttggcttttactctgactaaaatggaaagccacctcagagctttgagaagacargtgctaatgatctgaccttacttccttctagctactgtgttgagaatggaacttaggaaggcaagggtgaaagcaagttaagaggacattgcagtaacccaggtgacagacaacgatgactcagggcatggcagaggaggtggtgagatgtggttggattctgaatatatttaaaagatggagccaacagcatttcctaacacatggtgtatgttacaaaaggaattaagggtaactccaaggctgttgtttgtgccactggtaggatggagctgcctctaatggaaatggggatgctcaagtaaagcagagctggaacaatcagtagtttcatgttaaattgagtttgcaatgtccattagacatattagtgtctccatgtggtggcaagaaggtagttggatctatgaagttggaatttgataaagaagcctgggctggagagaaagctttgggagttattggcctatagatgattaaagccacaagactgggtgaggtcaccaagcaagtgagtatagacagagacaaggacctaggaccaggcctttcagaatttcaactttaagatatgggagcattttccagggtacagacactgtactaggctctgggaactaaatagagcccttgcctgctagggaatgtagagcctattctgagagccaaaaaatgccaccatagaggtatatccagagctatgagaatccttgggggtgggatgcattaacccagcctaaaggtaaatagccagtggctttctggaagacatgaagcctcaaccgaagcttgagaagtaggaagaaccaaattaaagaagggaagggcgttccaggcagagcggctagcataagctatggcacaggggtgggcacagcaggttgagtgaggggaaccagaaacggtttgggaggaagcatggagggagatggggctgaaactgtcaacaggggccaggatgaagcaaaagatgagtgtttgttacactaatgactttggattgtaatcaagaagccactggagccatcgaagagagcaggactttctaaagtagatttgcattttagatcttgtagagatcagagcagggacaacagaggcaggtaggcggctgggacagtaattcaaggaaaatatggggctgcccaaaccaggagactgggcccagagcccagacaagcctacgcactttttctgcatgtagagccataaaatcagcttgttctcgttggcatgaaaacttgagtctctcaatatatattttaagttcaattatttgaaataatgtatgaactatcttgaattgaagagtcaaaatgcctggaatcaagtcctataacattcattaagtattcaggtgaccttaggcaggtcactctcctctgggcctccatttccacatttatgcagtgggagcaaaggggtttgtcaaagtgatccaaataacccttctgtcactgatattctgggagtctaaataagaaccaattggccgagccagctgggcctccctcccactgatggtcgcatgggacctcactatctggggctgccgcttccatggttatgtctcaagttctaaaaaccacaattggccaagggccttgggctcctaggagctcaaggaggcccaagacaaattaacttcacctgccagatagatctgagcctcagtcagaggccttcaatttgggttgcgcattagagttacctggggaagttttaaaaaacaccaatgctcaggccacatttcagatcagtttcactgggggtgggatgtatacttcagtgtacagccacatttcagaatcactgggggtgggatatatacttcagtgttttctaagccctccggttgatgtgaatatacttttaaagctgagaaccactaagaaaacccatggagtccccagcatgtgcccacacacatcccctggcatgctctgccaaccctcaggtctactcctgctgatgaaagggcatgtgattctgaaccatatacccttcctattaaagtcaagagcatgtgattctgaaccacagcatcctccctcctccccagcctgcttcccccccagctccagttctcccaccttcccctgttacacagcaaaaccctaagcatcacagcaaaatataagagatgtgggctggagagccgagttatctgtgtcccatgtaacygctgccatggtagtcagaagagcagcaggtttagggaagaaaagggagaattggaagaggtgactttgtgatgggagagaaggaagaagcacattcatcccagttcaatccagacaggctgtcgccataatgaatggaaccagcccagtagggcaaccagaaggtactggttattacagctccattaagactatttaaagcaacaaggaacagctgtgaggaatatgatgcagcctaatgaagagcaaacatttgttcattttccagctcaggacggacacaccatatgtatggcttttgtggggaaggcctgtgttgccatcttgttcttagtcatctgtgggtgatggggtgatggcaggcaggcagcttttgaatggggtataactatagagatggaagtttcaggtcaccccaggtgctcccttctctgctcagagccccctgagcagtgtctgaggacacctctgcttctcccacaaggtttgttctcctcagttggtaacagagtgatgacagaatatcccaccacaggcaaccccagaaaggttctggttcagctcctcaatttgcagatgagcatggttctagggaggggcatgaggaattactggcccacgcccaaatcatgaatgggaaatccatggggttcttcaactctgggaactcataatgaccaaaacaggaatacctgggctccacctgctcgtttcactccactccaccccacctccagattgaaaaaagacaataggccattatagggastggccaaaagccatcagtgaccgctgtggtttcaaacttgagagttttccagcaggaaagagctcacatggaagagactatggttatgatcatggaagagttaccaaggatcttggagggatctaggatcttggaagagttaccaaggttatgatcatggcccctggcagtctgcctcttcactgtagctggctgcaagtgtagagaagagttgctggcctagagtcagccacccagaagctcatgcatgaccatggagacacgtgtaggcagctggaagtctgtagcctgaagtgagttatggggatccccaaaattgtaggctcacagctgggaggaatagaggtaccctcgtgtgagattccccattaagggaaaagggaagagactcagtctttcccttttagcctatttttattgttctacttacaatattgtttctaacagagcacatggtgggttttttgtgtatttaatacaggatctcccccaaccaagtgagcaattttcaggtggtactatagaaaaatcctttgaccaagagtcaaaacctggtcctcaatctgctcctgagactctgggtggtcttgggcaagactcttccctctctgggtctcattttcatctgtgaaatgtttgactacaggcttagcatgaaattctaaaggctgatagtatatgcttctattttatgaacactaatctggccagaaacactgactgagtatttattgtgcacctaacactgggcactggagatagaaagataaataaagaaaataaagatgctgctttaaagaaagctcgtggtcttgccacaccatgtaatgatgtaacagaactctagttcaaatgctttggagacacacttgctttttgccacttcttgttgccaaaagctatcagaagtttcagaaaagataagactccgagttagagaaaagtagaagaagatgggtagaggagaaggttgtgtacaagagggaactacatgtgcaaagcttggaagcaaaaaacgaaatgattaaaatgctgcagccaatttttttttaggagaaacaaagatgcctgcctatgaaaggagaaatgaaactagttggggagatttaataggaatcttacacccgttgcacagttttcttgaaaacagttaccaaggttatgatcatggcccctggcagtctgcctcttcaccatagctggctgcaagtttagaggagagttgctggtctggagtcagccacccggaagctcatgcatgaccatggagacgggtgtagacagctggaagtctgtagcctgaagtgaattatggggatccccaagattgtagactcacagctgggaggaatagaggtaccctcgcgtgagatttcccattaagctatagacttcttgaaggcagggaatttgtcacctaaaggagaacttgtagcttttaattgggccttttaaagagtgttttgtgagtctacatgcagacatgcactcaacttctctgccttgatcaaagttcctgtcacagacaaatacccccatcttgctgcaatctgattttctacttagcttcaccagcagaactcataaattactgtctatttagtgacatggtatgcaataatatttgctctcctgatgccactctgaatagacgtcattagtcatcctctcctgccttctctgtccacatttataatccctaagtcttgtgcttttcagcacagaagatggaatttgttgaaagcttggcctctgccaaggccaccactaactcctacagcaccttagagtgaaataacaaaaggtgcacctgtctcaagatatttggctgtcaccttccagaaaatgttcataataaatatggaaaccctaaaatttctgccgtatgcatggtgctcccatagatgcaatgctcttcgattgtgcacaacctgcagagctgtgattcccttgtcacccacaagctgaccatcgacatcagtaaatgtgttaactgaacccgtggaccacaatagagaccagaccttaggctcccaacagattatgaaacgttcccattccctaaatgctattttacctatacctagagggaccagcttatcccaattttcccaaaayggtcccagttttaaaactgaaagtcctacatcctgggaatccctttggtctgaggcaaaccagaatagatgtttcagagatttcccatctttgcccttgtaagaaaaaagaaactggatgtttctaccattgtgaaagacagtgtggcgattcctcaaggatctagaacgagaaataccatttgacccagcaatcccattactgggtatatacccaaagcattataaataattctactataaagacatatgcacacatatgtttactgcagcactatttataatagcaaagacttggaaccaacccaaatgcccatcaatgatagactggataaagaaaatgtggcacatatataccatggaatactatgcagccatagaaaagaatgagttcatgtcctttgcagggacatggatgaagctggaaaccatcattctcagcaaactaacacaagaacagaaaagcaaacaccacatgttctcataagtgggagttgaacaatgaggacacatggacacgggaatatgacaccccagggcctgtcagggggtgggggtggggacaaagggagggagaacattagagcaaatacctaatgtatgcggggcttgaaacctagatgataggttgataggtgcagcaaaccaccatggcacatgtatagctatgtaacaaacctgcacgttctgcacatgtatcccagaacttacttaaagtaaaattaaaaaaaaaaaaaaaatccttgatgtttttgactgaagatggcaagagaatgatttctacaagtggaccaaaaaggctcaatattatatccctgggaaagaggatatggaagatggaagattctgggcacctactgtgtaccaggcattgtgccaggtgctatgggtattgtatcgggtagtcactaatcatcacaaaattccgtggggtgtgttattttccattttttaaaatttacatagtataaaattagttttgggagagtgtacagttttatgagttttaataaatagagtcgtttaaacaccaacacaatcaggacacatgagaatttcatcaaccaaaaagttaccttgcgttacttctgtatagttaaatccttccccacccataaccttcaggatgtattactgactcttttcagaaacgtttattgacactcgaagtggtgaacttatttgcagtaaaaatattcaaacattttagtctgtctgccttttgcaaagctctgccttttccctgactcgcatacacagttagtgtgcaagtgtatttcttgacaagacaaatgaaggaaagacccaggtaaaatggtgcctccttgctgaagactctccagagtgttccctgcaccaggagagtacagtgttggacaggggtgtggagaaatcctggcaggctggactgaacatggaggcggcaagccctcagctgtgccctggagcatcagccaggaactgcctcatcagcgatccctggcctggttttgctgcaccctagggcataacatatccaattatctccagggatacagtcaagcaaaggagagtgaaggggggcattgcaaatgacagaatctgctgaggataggaggtaaatgggtaaatgaaatgggctgacaygccctcagccttgaattgggagtgagctgctctaggaagctttgtgttttgacatcttactattttaggcataactcagaagggcttaggtgcaaagaagagtgtctaaagaaggatggcaagcttctgttggtttggctcagtagarccaggtagaagaaaaaatcagccacacaggcatcagcgatcattctcagttctagcagaaaatkaacgtactaagtgggacattgargtaggtttcatagtcctatggactgagtcagcacagcagaacacaagaagtctgtgacttgtggtcatgtggtctgagcctcccatgggctcagctctgtggataggagggtgggttgcactygcagggagagttagtctggggcgggtaccagatgataattttattctaaaatctataaagcatatcatcaaggataaagaaggttccagtgacaagcactgtctgccatttatcatgatgctggcactagctcagcctacccctcttaaaaagtttctgggtcaggcgcggtggctcacgcctgtaatcccagcactttgggaggccaaggcaggcagattacctgaggtcaggagttcgagaccagcttgaccaacatggagaaaccccgtctctattaaaaatacaaaaattagccgggtgtggtggcacaggactgtaatcccagctactcaggaggctgaggcgggagaatcacttgaacccaggaggcagacgttgcggtgagctgagatcatgccattgcactccagcctgggcaacaagagggaaattccatcatctcaaaaaaaaaaaaaatccaaaactttcccattgaattataataaaactcacgttcttgtccttggtccacgagaccttgattgaacaccctgccccaaccccaagccaaatccacattatttgtcatcctcctcttattctctctgctctggagagcctccctttctagaggctctagaacacaaaaagctcattccatcccagggcctccgcacttgctgttccctctgaatggaacattccttccccagctctcgccaaagctggcatctgcttatcatttagtttttagctgaaatgtattggccagagatcagcagggacacacctcctggaggtgaacaagttgggtttatcacttgttgcaatgaagtgaatgcatacctggaagtgtgcattcctgtgggacatttcaggaagaggatgttaggaaggactcagaatgtgggctgtgtttgctgatttgaaagaggccctaaggaggtgaggctttgttttaggttggacacactgggaagtggtatgattggatatcttaatacatcttacctataagaagggaagatcagatagaggctagagctgtaattggcaaagaatcaggccgctcatattaaccagaatatgggggtgtttggtcatttttttggcttggacaatgttcatatctttgtctgcatccagatacaacttgcttttgtcttgttccatcgtggcctcagagcggccttgcctgtggttggtcttccgtgcaattgtccacgttcagcaggagagcaccaaggcctacctgtgagtgccaggtcagctcccagaattcaggggctgcttttctccctctcagatctccccttttcagagttctccccacaccaccctatctagtcccttgcccgggtccctgtctatcccagcacctggcatccagatggtcactggggaaggaaggaagtgagtgagggagggagtggggacagactcaatgtatattcttgggcaagtcatttcctgtctcaggacctcactttgctgatctataaaatgagtcaataattttctcaaaagatccttccaaatctgacttttgaggattctataaataccacggcgcagctctccagggataaggacatccccaaatacatcttttgaactaaaaaaaaaaaaaaaaaaaaaatgactgccttggaaaaacaacactgttgaagagtaggaaacatttccacactcagagaggaatgtaaaaatagggcccagcactctcaggagaagagaatgagaaaaggaaagcggagattgataatggatgaatataatgagatggcaattttggtttcaaaagaatgtgattagcgcctaatgactgccaccattccctggtcaatctactgtaactagccactaatggaaaaataatgcccttagcttgctcactttgaagatggaaatgagtctctctttcatacttttccccctcatattttttttgcttcaagagattatcccttattagattgtagctccctaaaaagggaaatggatgtgtgatcaaagtctgccaattacggggtcattaccactccctcccagaggctctattaggcatccctcctctgcttttatcaacatcatcacagcccccaggcctactcrgtccccttcagcccccactaagggagacagaggctcccaggaccatgacagggcctgtgtggtttcccacgaactgccacccacttatcacaactgttttgttcggtttaggattgttgagggataggtgcatgctggggtgtctcctggaaggcatggtgtttgttgatggtgagaggaccccaaactgccattcaaggattctgggagtgaatacaagagactttcatgaaatctctgcaggatgtcacaggacagagaaagggcacacatttattctgtggggccccatgagatggcataggcaaagtgcagtgaggttgagtaaagaaaaaactctggtgagtctgtccaaaagtgaggccaaaagttggagaagtggtgagctatctgtcatggaggttatccaagtgatagatgctatggatccacttatcagctgcttggaaggccattgtggatgggaacacaactaggcaattttcaaggtcactgacacctctaagatcccaggatatttgccctctgaaagcacagaagccacctcattcactaattattccactcattcattcatcctaaataggtctttcaagcacatctgaagtatagagccagcatcgggttctggagatacagtcgtgacaaagatgctaccctttccttgaagaagcctatgaccaagttgagaaatagagttaaattattagatgcaaagaagtctatctaataatagaagtaactggctttacctggggatgcagtggggtgagggagagtgaacagagaagattccacaaagaagatgcttacgctgagttttgaaggacatgtaggagtttgtcagacggactcaggtggaagggaatttcaggtaaagggaacagcatgcgaaaagtcttataaattttaaacaccttataactggtaggatagatataagagcaagaagtgatgctgcaggggcatttggggtgaagtcattaaggatgttgcactaaagagtttgaaatttatcctgaaggcaatggcaagaggaatcactgggtcctattcacattttagaaagatctttctgattacagtggagaatggattggaggggacaaacccaaaacaaaaggaaccaatgaggagactcatgggaaaatattttaaagtcactatttgcaaaaattatggctgcatagtagcatcagctggggagttttaaacactaccaatgcctatgtcccaccccagagagtctgacttcattggtcttgagaaggaccttggctttgggagttgtaaaacctgcccaggtgattctaatgtgcagtcataaagagaccttaagctaatggtaacccaaaccctggcacatggcaagtactcaacgcaattattttttcaaaaaattagtatgaaaacagtcatgctatcctgcttttggcttcaccccactttcagggggacatgtttggttgaacaattggcttttatcacagagggtttcaggtacaaaatccaccctcaatagatcagctttgacatccagaagtccagtgctaccactgagagcagcaacctcccttcacatacagagaacagacctggcaagttgcctggaggagatggagttacctggctgggatagaagaggaggctagggctggaatctgagttctaagagttacctgcagtagctagaagcatcttccacctagagatggcctaaactggtggcaatatggatgcaaggtttggtagaatgaggagcaagaagagaaataygaaaaggagaagaaggagaaagaacaagaggagaaaagtgagagataagccccacatttgtgaaatgagcacttacctatccttataacatttttgccatacccagatttaggtcagagattggtgcccaaaacctagcacctgtattgcttctcttccaggatgtttgtctaagggcgttggacacagaaagaacaaaattatgacccattaatagctaggaaggcactttattaccygaatctaaaacctaagaaaggctaagttgtagaacatggctcagcctgagaagcccaggaaaggaactccttcctgtgccctctaatgaatcttcagttgctaggtagcagaatgagcactaattccacctactcagccactgcatagatgaggatcatagtcatgcttctagaataaaggtcagcaagctatagccataggctaaatccagcccaacatccatctatcthtctatctatctatctatctatctatctatctatctatctatctatctatgagacaaagtctcactgtcacccaggcaggagtgcagtggcgtgatctcggctcactgcaacctccacctcctgggttcaagcaattcttctgcctcagcttcctgagtagctgagagtacaggcatgtgtcaccacgcccagctaatttttgtatctttagtacagatggggtttcaccatattgaccaggctggtcttgaactcctgacctcttgatccactcacgtcagcatcccaaagtgctgggattacaggcgtgagccactgcgtctggccccaacacctatttttgtaaatagagatgtatttgaacatagccatgaccatttgtttgatttttatatgtgactgtttccactctacaacagtagagttgagtatgagttgttgcaacagagactacacaactaacaaagcccaaacttctttctagtttgcccattacagaaaaagcattccaactccaactctaggaaaagactcacccaggttgacttaacacttgagagaccagatgcaagaaaggtagaaccatgcatgagcactggcctgttaagaacctgccaataaaacagggcttattgaggggctgaatttctgatcaacctggttcaggttcctccttgcttaggatagacctagtaaggaatagatgggcaaaggcaaggctggtgtattaaaatgaatggtgggttctcctcctgcactgctgacagagagctgtgtagactgaaggtgttacaaattcagtctcagaagcaatgaaagggcatgagcaggatgttcagcctattctactaaatttagggtagagagagtaatcaaaacatggtctgataatcatgcttctgcagcttttctatagctgttcccactcccttaactgcccgtcctccctgtctgtgaaataactgactgcacccttccctgtgtttccataccacttgactcataactcttgtaaattgtctcatgtttgttgacttgtctgtcttatcggtggttgccatcctcttaaactgattgatgacttctatctcttccctatccctaagctctgggtgtccatgtccaacttcctattcaacatcagcttggatgtctaatggacatctccaacgtggctgccatttttgttattttgaacatgtttttaaaaaagtgtgcagtattcaatgctaggcactctactaagcactttatgtacccaaaacacaacacttaattcttacctccccaatcctgtttctaacccaggcttctccatctcaataaatcacatctctcccccctcagttcttcaaactaatgatctaagggtcagccttctttcctctccttccttcacagtcaggatctatggcagatggtgccctgcacacatccactctacactcactgttcccacgcatgcccaccttatggcttcctcctgtaagcacctgtgactttttgcctgagggcttcttcaagacagaagaatatgcacactctgcccacagagcatggaagaaatgctggggagtttccaagagttgtcctcaaccaatactggatgcgaattgatcagtaactaccccaactttgtgccaaccccatggtgggataactctaaggcatgagatgtgcccattggattaggccccagttgcccacagtggtaacctgctcattgatgtgctctatattgacttcattcccttgattgtgccacttccacattctcccacccaaactccctgggagtgcctcccaaacaaactacttgtgcctgacttgttatctctgagtctgcttccgaggcaacccaagtcaacarcattcaactgaacatcctgcaaataatcacttctcatatgtccaccaccacggtctaagagtccaaggtaccatcatgtgttgcctggagtactgccacaacttttttttttttttttttgaaacagagtctcgctctgtcgcccaggctggagtgcagtagcgtgctctcagctcattgccagctccgcttcccgggttcacgccattctcctgcctcagcctcccaagtagctaggactacaggcacctgccaccatgcccggctaatttttctgtacttttagtagaggctgggtttcaccgtgttaagccaggatggtcttgatctcctgacctcgtgatccactcacctaggcctcccaaagtgctgggattacaggcttgagccatcgcgcctggccactgccacaactttctagcagatctccctgcttcctccatgcccctcccagagcctgtgttccatacatgagccagattgtactttgtaatacatgaatcagatgattcccctgcccaaaaccctctgatggtttttcatcacacttagaataatgcccagttcattaaccagtaatagcaatgtcttatataatctggactcccccatccgctctagatacttccatcactacttccctcttcacaacactccagtccttgaatatggtcatttggttgctgcctgaccatctttgcatctgctgttccctctgcctgaaaagcactttctacttttcttggtgtgactggctgtttcatattaaggaattacagtatcatgaaggaattatagtatctatcattaatgaagtcccccttatctgcagttttgtttttcatggtttcagttacccaaggtcaatctcagtcaaaaaatattaagatatttagagagagagagaaagactgcatttatataacttgtagtatattgttgtcatactattttattattgttcttaatctcttgctatgcctaatttataaattgaactttatcataggtatgtatgtataagaaaaaacatagtatgtatagggttcggtaatatccatggtttcaggagcccccccactggggggtctttgaacaaatcctccaaggataagggaggactactgtaactaaaatgttaccttcttggagaagccctcccagagtgtataatctgaaataattctcattcctcatcactatccctttattctgctttattttcatcatagcatttttcatatctaaaattacacatttactcttttattacacatttactatatttcctagttgactggaagctcaaggggaacttgtctgtttctctatatccctagtacctaaaacagtgcccagcccatgttaggggctcagtaagtatctgttgagtgtatgaatgaataattcaatgaatggacaagcgattcccccactgggctagattgtgaactcatgacacagaagacatcaataacatttgaaacaatgaacaagagaataggtccagggacagacaaaatctaygtcctccccaggccccatccaaggacatctatccctttccactaggagtcccatcgcagtgggtcttactttgcccygttggttcatctccacttccataaagctcctatctcaggccactctaaccactctgtccttgctttttaggccttaccagaggggcagacagcttcgtgggacacagccaaggaggatgaaaaccgcaataagaatcgatatgggaacatcatatcctgtaggtgcccttctgggagctcctaagcttcaggtgttgaggatgcaggggaaaagaggctattactattatttacctggaatttgttatcaaataatctttgctgtctctagctttgtatctacatgccaagatggaagctttatatcagccttactgccatccctagactggatgacagagcatggctgatctcagccagagggagcaggcagggagatgggtcagggcagagcagaaccatgaagcctcttggggaagaacctctgaaggctgggtctcaccgagcattgcctgctcaattcctcaggtcggggaagaagcccagccaaaagggctgacatgcggaagaccccacagctggataaagagatgagctctgtgttcccagaagctcctctaattcaaaggaggactttggcagcaacctggggtgaggagcatgggccccagcctgtgagggaggggctaggagaacccgggcaagagartgatgctcctccaagaaggtggagtcacwctggctgatgcttggaagtaaaggctgatgctcagaagaagccagtaactctggcatacacctggggcttggggtatgcccagctcaggcctcacaggagcccggggctaytcctatagtatgagagacagagtttagggcaacacagattctacctgtccccactatagtagggcaggggctctgaggtgagggcctgccctcaggtctgcatcagtgcacctcgggaggtactgagcctgcaggggaaggcatgttacgcagagctaaggaaggacattgcctttgctcaacaatgagctttacctttcctgtaggcacccccagtgaatgactcattgatgaagtcagcggtgcagagtagttagcgccctcgggagtcaaactgcccaggtttctatcccaactgtagggccctgggaaagttacttgacctctgtaaacttttgattcctcccctttacaatgatgaggataataggaggagcatttaaaggtacataaaactcttgctacagtgcctggcaccattactcttagccacaggggtacttgcttgaggtcactggtgagcagcatggatctatcattccaccttattttattaaccaggattcactgggtactcaggacatgtcctgtggggacatagaataaggcaggttggttggggagaggtgggcatgatcagatgtccattttggaaagatcactagggcagcagatatggaaggtatacttgattgggaagggctggtagcagagggatcagtcagcagactactgcartagtctcaccaagggatgatggggcctgaacaaacagtgacaataacttgtgtgtgacaggtgcatggtattcagttctggggggtgaggaagagagagactgccacagaactgaatgtcatgcataggtaacacacaagtattgtcactgccaaatattcgtaggtacagccttcaaagtaaaataaatacagagaagacaaagttatctcgtrcaaaatgctaagcatgtattctaattagaacaggagtctacaacagcctttgtctgactcagtgtaaccaacctggaccttttgacatctcaccaatggtgtggggaacatccctgggtctcagctcacagagtaacccagttcatccaaaagaaaaaaaaaaaggatcctgaatgacaaattatttctagcacaattcagagttttgttttgttttgttttgttttaactgtctagacattgcctaagaaaaaacttggaggaagaaagagtaagatacaggcagattgtaaaggaagaaaaaggcagaagttttagcttagctgtttcctgtgctgatttaggaatgggctatgaatggtagaactaatcagaaaacatttataatttctctcttggaagatggtaattcagacagcaagatttcttgcaagtgaagtgttgagaagtgatattcaaacagtcagcaaacatgtattaagacttatgacatgtgggcctcctcaaagcaggccctgtgatgggcactgggaggtggagctcctgctcctggggagcccccactctgccacagggagctgcttgccctgtctggtccccagcattctctgctcctgcactgtggacactgtaccctaaaatatatagtcacttatctgataaagcctatgcctgagrctctgagcttgcttcaccctagccctgccctgcctgcatctcttagactgaggactttctccaaagctgggaaaggatcccctgcccaggcacaggcagcctgcaaatcctgaagggttaatacccccaggagaagccctccaccatgaaataccccagcttcttcaccgttctcctgaagttccttctggagttcccacagggatgagaatacagctacctgcagtcctaatgggcttgaaaactcacccttaataagctgccttctcttccctgtcgtacatcacccctttcctactggtattcctgtctcctcctacataaactgcttggactaaaatctctgtcttagatctacttctgaggaacccaaatggagacagagagaactgaagcaccttgacgataccaccttgatgggtttaaataaaccagaatctcctttctaatttaagagtcaatcattctgcaagagatcagggcaagagcaggtctgcattcagtgctgaaagaagacagtgccgaggtaaccrgtgaattcagaaagcagcgcaagacataaaggagaatcaagaaaaaaagggaaatggaaaaaaaacaacctggaattgaaatgggatatgtaaaaaagaaacagccccaaggaatggaaagtgttcctgcccttgtatgcgtccctcccaaaggcaaagcctgccgaggcttgataaatagaaatattcttggcgcaagaagaaaactggctgtgattagcatcttaaggaacccagagcactgtgaggctggagtggaggacaaaggcccaggccagggagaacagaaaagattaaaggggacaagtaggagggagggcactgcctacaaaagaaacaacaagagaccttggcgaaatatctcctttcttccaagtgattctatttagaatttagtaatagagacagtggggtttctagggagtgtaaatggaaaggaagtgaaagggaaggaaatgaatgggtaaaataagaacaaagagacctttgcttccaagtaactctagggcagcgactgttggcaaggggaaattcaagaatcccaaagcattctccatgtaaagttttagaggtgcttcctagactggcaggaaggtgctgacactgagaagctgaagtgatcacaggggttgcaaatgttacaaaatgaggcccccttctgggatcagttctttataaaggtgtaatctagatgtagaaagactacaagggatagtgcagtaccaaaattccatcctcagaccaggaaggattccgtaggaggggttaccaggacccaaagagagatgacctgaccagaggtgggtgcgacctttggtggcaaggcagccacccatggtgaccccaccaaggggtgctggaggagtaagtacctccatcacactctcctccctccacccaatcttctgcctgtgctttccattggctggggccaaccagaatccagagaacaggagatctgttgacctaatccagtggttctcaaagtataatgcctrcagcagtggcattagtgttacctgggaactcattagaggtgctaattcttgggctccaccccagacttactgaatcagaaattctgaggacagagtctagcaatctgtatttctaraagcsctctaggtgatggtgacrcatgtgcaactttgagaatgtccaatcttggccatagcaatcagcctcctggattagagggccagatgaagtggagagggggtctgcgggcacacaggatatcagcacattttctgagacttatcttctcccaatctaggaaaagccactgggctcaggtgtattggggtcttagacatgaggtcaggcrgtcccaggttttcatcccagttctgttgtttaccttcagcacaatcacttcacctcrccmaccttcaggttctcacccatcagatggctctagggcagctctcaggatggagaggccaaattaagctgaatgattattaaatctgaatcttgtgtggccccttaagtcacagacttttaagtctagatgagttagtgtagcctttttgagttcacaggcaagaagagagagcccagagatggactgtgccctgcccgagagcacacagcaagtctgtagaacagccatgaccagagctgtggtctcttgcctgccagggtagggtggcacatattccttaccaaagagtcctctctgcatcaagtcacatccatgttcctgggggagaatgtgttgctaaggcccaacctcagagcagatgagctcttcagagaggcccatcttttccagaaggaggtggggctatggagtgcagagaggaccctcactcctagtgaggaactcaggttcaaaacaaaacccagaggacttttttcacagcaggtttctctgctgmttcctggggagacagagctgggggtgacagagtgggtgccttattcaatgctcctgactctcagcctccattcttcttcactgtctctgagggtggccattgcctgggtcctacagatgccttgtggtgcagaaaccattggtaccctgccatatccccaaacactcactacttgcatgtgtgctagtgctaattcaaattgccagcacctttgcttcttttcctaaggactttttctggccactagagccttctctgccttcttgcagggcaggcccaaagagccagaatattaaatgtccccagaacctgccctcaattaatgactgatggaagtgggtatatacataccccagctccctctctgcttaggtagaatgactcccagagctcctcagccgaattaagcctcaacttgctacaatggcaacttgctgaatgacacacccctattagatttcttctttctctgtctcacttcccactcccctgctggtgtttcctgggatcaccccccgacaacaactacttgcatccaaatacatatctcatgttcttcttttgaagaaatccaaataagaaacctccctcccttccttcagaaaggcccctcagtggggcagtgcctggatggcatccttaggacacaggtggtcctctcttggtgcttgcccctctcaactccagtccccttcagtcccctcaaaggttgcatctactggagcagctcctcccaggaccccacaaaggggcgttttccaatttcagccagcatggatctggcaggacaaggaggtacacagaatgtcgggctgtctctgcatcatgcccaagccagcctctcttgataatggtaattcaatcaagattgaatgtgcagacctttagcttcagtgaggtacccaggcagtctcagcagaattacctgcctcctccttatccacttttgcaagatgatggcattaacatttccaatacttgtaggaaatggtttttcagctccacaattcattgtaatgagtcaaatctcttttctctgaaaaaaaaaaaaaaaaaaaaaaaaagcactgttctttaccctctgtagtgcccagaagacaggaagaaagaatatcaagtatccaaataatattctctccccagccccacctctttgaagtgattctctctttaagtggatgtgggttgagatgacaggtttactgggctatctttggtgatggagggagggagaaggagttgtggtttgttctgagagttagaactgtatgaaagaggaaagtgaaccctctctctcgggtggccatgagaccttagtgggatgaggaccaatgttggagactgagaacttagaggaaagtggaagctggagaagtgtggcatagaagggtatggaggtcatggatctcagcgttccaggaggagtgaggaccctacaactctataaagaagccctcatccctataccttctcctgagttattaaactttttggagccttgaatttctcattcatgaaatgggatgatggtatagacctcacagggttactgtgagaatcaaatggcatggcatccccatggcatttgataagtgcctggaacatcttacacttttcacacagctaaatttccgtatcccaccacctggcacaaggtgagtctctagtcttatggcccatttccagtaagatcttctggtctttcccaagacagattgaagtgaataaccagagcacctctgcactaagtcactaaacattggtctgtatactcaaacctgaacgtgtatcagaatcacctggagggcatattgaaatgcatattgatgggccccaccccacagtttctgattcagtgagtctgggctggggcccaagaatttccatttcaaacaagttcccaggtgctgctgatgccattggcccaggtctagaataaaaacaaaactgaatttatatagttgtgttaatttcttacaacataccaggtgggttcatattttacatcttttaatccttgcagcaagtctgcacagctatatatgatttggatgttatagctgggtaaacagaggctcaggggaggtggtaacctrccccaggtgatatggttagggtgtgacaagcctcaggtctgccttcagactccacccaatccataacctcccttctgctaaaggcaagaattggctgccagtctttggaagggataggctgggtctacaggtgtggtgaggggtcagctatgaggagaggaagaattggagcccaggatccaggcgcaactgccagcttggatggaggtgttctttgaacatgcaaaggccctgtggtcagagtgaacacagtgcatttgagcaactgaaagaagaccacagttatcagagcagtatgtgaagctggagagagaagtaggtcccaaaccatcagatcatgcaagacattgcagggtgtgctaggctttgtcctctgtcagtggtgttctgtagctgactcataccagcttgcaaaagcagattgttaaattttcaggaattttgtgaggtggttgatgctatgttggtagcttgaaatcggtcatggtgggagtatttacaccacagaaatcagcagacattactgatcagggccttttttcccacagggagctgtatgttaaacatttaccagcatactagtggtctttgacctcaagcaaggaacagcagattgattgcaaactgagtgatgatgttcccctagacttgtgttaaagggagctctttgaatttatgtgtcttggtaccatgtctcccttctaccttctgccaccagttccctcctcgccacagccagctcttgcccatctctcacctcaactgagagccgggggagccaggctgcaccttcccctcgcctcattgaggagtttgcttctcctccacatgactcttcttaactcctctccttgtcttgaatatcaaacaaggagtaccaaattagctgtttttcaagcttgcaaaatgtagatagagcataatgaacattctaggctgcttgtaaattacctcgtataaacgccttcacatygcctgccgccccatctttctccatgtgcatgtgggtaaacacaattttttatccttctaattatataaagttagaagaagaaggggacacagaataatattagcatctcccaaaaggaataaataaaccatgaggacactgccactccttgcagtgcctttgtggtggacctacagctgaattccaccctttagtgaacacacacaatagttctttgcctctgcagatagatggatctgtatttggtacagaggkcaagtggagagcaccaagtttctaagtatctctgctattagctcactgcctgcctcacattcagccccaaaaccatcatttattaagcacctgctgtgtaccaggcattgtcctagcatttttctttagagcagttttaggtttacagaaaagttgagcagaaagtacctcattcccatgtactccctcccacccacatactgtttcccctattattaacatcttgcattagtgtggtacattcattacaattagctaatattgatttattattattagctaaagtccatagtttattcaggtttgctttttatgttgtacagttmtataggatttgacaaatgtacaatgacatatatctactattgcactattgtatagaatagtttcacggccttaaacatcctctatgcttcacctattcatccttccctcctcccaagcccctggaaactactgatctttctcctgtgtctagagttttatctttttccagaatgtcatatagtcagaattgtacagtatgtagccttttcagattggcttctttcacttagaaatatgcatttaagtttcctccatgtctgttgcagcttgataactcatttctgcttctcactgaaccataggccattgtatggatatcgaatgaatgctccttcacttacagtgaggttatatccccataaacccataagtttaaaatatcataagtcaaaaatgcatttaatatacctaacctgacaaacatcatagcttagcctagcctacgttaaacatgctcagaacacttatattagatgattagttgggcaaaatcatctaatacaaagtacattttataataaagtgtagaatatgtcagggaattgattgaacactgtaccaaaaattaaaaacagaacgtttatatgtgtactcaaattaaggtttctactgaatgcatgttgctttggaactatcataaagtcaaaaaaacctaagtctaatcatcccaagtgagggaccgtctgcaccacaatttgtttatccattcacctattgaaggacatattggttgcctccaagtttttgcagttttaagtaaagctgctataaacatccatgtgcaggttttcctatggacataagttttcacytcatttgggtaaataccaagaagtacaattgctagatatagtatggtaagtgtatgtttagtcttgtaagaaactgtcaaactgtcttccaaagtggctgtaccattttgcattcccaccagcaatgaatgacaggtcttgctgtgccacatcctccccagcctgtggtggtgtcagtgttttggattttggccatcctaatatgtatgtagtggtatcttgttttaatttgcaatttcttaataacacatgatgttaaacatcttttcatgtgcttatttgccatctgtatatcttccttgattaggtgtctgttcagatctttctcccattttttaatcaggtcatttgctttcttactgagttttaagagtttgttgtgtatttttgatacaagtcctttctgagatacgtgtttggcaaatatttcctcccagtctgtggcttatcctctcatttcttaatgtcctagcacttttcacacctatgttttctcatttaatcctctcatgccatatagtattggctccattttgctaaggaaaccaaagctaagagagatcaattgacttgctaggtgatggagctaagatttgaagccaaatctgatcacagctccatatctcacgtcttatattaaaagtttatctcacttgacataagttagctgtgtaggcatgaattttggttacatcataataaagcacctttccactgtcccagaaaagaaacactgtattaggctgccctgcagagcccagcatgattccttgagtcttcatggcttcacagggcatggagagccttctgaaatgaaacccccgctgctgcctcctctgtctcccctcccatcgctgttcccctcacactctgttttcccaggacaggagacccttgcagctcccccacsgtgcttgcttttttcaggatatctgccttcactctagccattccctctgatggaaagacttcctcattgtgcactggccaaaccttactcatttttaattcctcattcacatgtcactacacaaagccctctattccccatcttctagatttggaagttttgcttctgcatacagtctgtctccactaaattgacaaactccttaaacatgagtatcacatttgatagcactttcttaatcccttcaactagcctggcacatagtaggtgtgcagtaaacacattcttaataaatgaaggagagacgttgtcaaacaccatcatctggtggctagagatcactttcatccataagtacacttaactagaataaataagttcgtttctttttgttttgtttttaatcatttttgctttccggtttttcaacttcattttatattttaaaaattccctttcaacattttaaaccayaatctctgtttccagtgctatgggccccaggggcaggcataactcaacaaataaaggagatttctgaatcagtaagtcataatgagaccactgagtgaaaacacaatgtgcattttcacttttttgaggcctacagcttctggaactgctggtaacagaggcttgatgccctgggctgagagtcaggtgccaggctttgtctgaattccagcctgctggatgggctgtcccccaggaagtcctctctggggctagaatcctgcaggaactggggaagagctgtttgcacasactccagctgtagtgcctgtgagatgcctgagactctgggacagcaagttatgtgggcagagtagggtttcagggtcagataaacctaaccgagaagtcctatctctgccacacacatgatgcgtaacttcggaagcttgcttaatctttctgagcctcagtgtcttcatctgtaaaatgggaagactcataataccatatcattctggtatccttataataacctatatggctattttgaggcataaatggttgaaggagataatgcatgtaaagtttctcttacctaccatgaatccaataaaggttaacttcaaactcctcccccatgtcacattccactctcccrctcacccaaagggattgcttagaccacccacctgctccctctagttgcttctgctgaaacttccccctgatgagtaagaaaagtcgcatttagtataacttgctgtctagcacagtgcctgcctgccacatggcagatactcagtgaatgattcttaaatgaatggatagatatggggtgtatcttataccagccctaggcctgtttgtccataataggacccattccttaccttctcccactctagtgtgcattgcaggtaacttacccctgcaggttgtgtttttcaggctctcctgtcagctatttaggtttagccaatgacatgcactgggagattggagagaaggagaaagggagaagccagggtattacaactacaattgccttccttagcagcaagggaagcacctccttgcctccagctcctactagaatcccactgtggcttcaggttccagcaggtggccccagctcctgagcactgccaactccaccacctccctccatcccttcagcccaagggcaggcagtgtctccttgttgctgcttatctctgagtttctccactttcttctatctggctgctcaactctttgtaacccaggcaaccacttctcagtagttaattccctctgctgggtatatctgaagtggtttctaacattgtgcttacaccccctttggaaacaggagcgaccgaactcagagttaagagaacttcactcctctgtgctctaccattcactggccatgtggccagtcaggctttctggagcctcagtttcctcatttgtaacaagggctaaaagaacccatcctacttctcttccacagggtcactgtgagaacccaatgagggcatccaattataccttttccatgtactactgagtacctgctgtatgtcaggaccttttaaaggtgcaggggatggaacagggaataaggcataatgtcccagttctcaagggggttttggttaattgcaataaatgtgccttgtaaactgcagaatgctgtataattctaagaagataagctgatctgacctccgtgactcccagaaaacccttggggatgtccagagctctccagcccacatcttagggacccattcctgccctagaggaaggtgaactaggatgcagtgactgcacaatgatacgtgcacagtgacctggatagcaaaccaaggtccctcctcccaaccagaccgaaccaatgttccacttgtgtgtgtctattagcgtgtcagagctcacttaattaactgtaaaggattatcctgattcttctgctgtactggttttcttttaatggtttttatttggtgttagttgaagtaagcatgctaccaaataaagcctgcaaatcttgtttatgtctagatagtgtttgaaaaggcatcctctataacacaatttttagttattgatgacctcttttataatgatttagtcagcctcactttaatgatagtattgataacaatatatggctgacaatctatctctaacaatactccaaggggcaaatgaaaagcaatttgtgcatgtgtggaagataggtaaacttgctgtttttaaacaacatgaaaatggagtatattaatccagatgcaacactctcctgtcctaagcatttttatatggtctctctcacattgtcctatgaagcaagtatttccatccccattttaatgattaagtcactaagacttaaagaaacaggtgactaatccagttaggtaatgacgaaatcagaagggaaggtagaaaaatgagaagtgcttacctccctgagcctccacttcctcatctataaatgggagcagtaactgagggtggtgttgagagttaaatgagagtagcacaatgcctgatatgcagtyattaataaacagtagttctaaaggaggacattagctgygtaaggcctcttatcaaccatccccttgatttctgctctctctgcagacgaccattcccgggtgaggctgctggtgctggatggagacccgcactctgactacatcaatgccaactacattgacgtgagtgtcttaatggggctgggggctggggctggcttttgcaggctcaagatctgtggtttaccccaaactctcctccagaaggtggcccttccagagcagtctggatcctccttgatatgtggaactagtgtaacccaagttgactgtccatctaccactgcatccactttcaggctagctgtagtagcctgctctatggggcctcaggacaactgttagtcttactcattcaccccatttattcatttgtgtatatgtctgttgatccattcattcattcacataaacgcatggccatttatgccacaaaaattttaaagtgcctactgtaaaatgtatactagatgctatgggaaccataatgctaataataccatggtctctaccctttaaaaccttagcagggagataatgtgcacatcaataattccagggcaaagtagaaattgttaagtgtcaaaagtacagataacatgctgcagagattcagaagtagggaaaaatatcacttctcccatcaggaatgcaaaatatgatgtgaaccaaagcttcaagcacagatatgatttaaaatcaaagagaggggagaggggcctctggttagagagaatagcacaagccaagatggagcaactggccaggagatacatagcagctccatttgaggggagcagagaatatgtaacaggaataatggaaaatattgttgggactacatcagtgaagattaaatgctcagacttaggaagtgggactttatcccatagacaagaggaagctattaaaaattttttatcaaggaggtgaccagcttagaactgagctttggcatgatttatctgctaccaaagataagacagatccgagggaagaaattctggaattaagacaactacaaccaataaggaaagaggctgcttcaatattccagagacgactgaggaagggactaaactcaaacaggagccaagaagggtatgcatggaagtgagagaatttgctaagcaagagcatgactgctgaggtcagaaggacaacccaatgtgactgattcaagccatgcatctcaggacctcagctcacagtccatgggtcttgaagaatggcacagagattcatactggtcccctagactctcaaatgtatttatagataggctataaagtgtggtggtgcagtttgtgaattcccccttaatctagactaagccaggtgagttattaactcaacaaatacttattgagccttgtattgatcatctgactgcttgccctcagatctattttgtgtccttccctgttctgccttgcattgcagggtgtgtgtgtgtgtgagagagagagagaaagagagagagacagacagacagacagacagacactggaggatgatggaagggcagtgtattctccatctcactcccttccttgggcagcaactccagcagtggctgtaccctgtctgtggctccatctttcctcaagcaggcctgccatagtccagtctcctgccagtcagcccactggggctctggttatttctggactctggactctagttatttctccctctcctgttctcccactagttctaagggttggttgcagcctactcctgtccctgatctctgggttgccccactattctctgtttggcatcttggctcctccatcacttgtgtaaccaactccccatactgaattgcctcgtctgaaacacatagactggtttctgtttccctaactacaccctaattaacaaagggcctactacatggccaagaactgaggctgcaacttcagtggagttgaagatgaacaccgtctctgccaccatagcccttccagaaaagttcacaggagacagccagttctgaatagcttttctccagcccagagcaaggcactctgagcatacatccatcatgccagcagcctttccttcatacatccagtattcagttcacaaacacagagcagaccctccactgtgtatgggaaatactgacttttaagaccaggtctctgacctaaaagggactcaaatctggtgagggagtcagataagaaaatagaccttcacagagcaggggctgtgggaccataaaggaaaatcaaagcttcaagttggtgggaaagggaagtagccagtgaaggctccctggaggaggtgatgtctcagttctgccttgaaagatgacttagagccagccaggcaagaagggtttatagtaacctaagaattactgatcacctttcatgtaccaacatcaccttaactagtatcacaacttcacaaggtaagtaccactactacccatttccagatgagtaagtgagtctcttaagattatataacttgtccaggattatactgctaggaggtaggggaggagggagcagaaatttgagtcaagagtacctctcccaccataccctgctgtctttaataatcacagtgagcaatgacaacaccaactggctcttaatgagtcactcttggggtcctatgatgggtggctcaagtaagtcagcttatcaaaacttcttaacaacccttcaaggtaggtgttctcattcccattctccagatggggagggctaaggtttagagaaatcacaaatacgtctcaggccatgcagctggtcagtggcagaaccaggatgggaaccagacctgaatggctcccagtttagcactctttctccttcccctccccccccccactcccagacaccgccttgtagccaacacacagcaaggaccgagtcagcatatattgatgcaggttgaattgattccttccatttctcctcgaccttgtctatggctgcatggatatgaccctaaggaccacaggccacacagggtctggcatgcctgagtttctgtatctggcattcatcatttgactagaatcccccaacaaaagtcattttcctagataggcactcactccaaagttgaatgagcrtctgactacagtcagggccaagatacactttggtattttataggcaacaaacgaaattgctttaaatgcaagttaatctctacaactgctaattatgcctctgattcatttcctgttttatcattgcaaggcatgtttcaagcctttaaagacaggaaaccagagctgtaggttaagagcastgtccaaggtcacacaactgaacttcagttctctgcccacttaggacacaccacgaccttcttcttctgtctgtaataggttaggcagacagggcaaatggcctctgttcatgctgtcttattatgggatattgaactccaggctcaatctcagtggttagaatccagggccaataaagtcatgaatctggtctgtgttgaagacctgtgttgaatccaggcctttttgattactagctttatgatcttgggtaaattacttaatcattctgatatctataaaatgagataatgatgccaccccacaagtgtgcaattactgatgtaaagtatctgtcatgatcccaaaaggaaacataggcttccccaaagtgggtacccagggaaagtttaataaggatgtgaacaggattaagagaaaccagtagggtagggtgcagtatcactaggctaacaatagtagggagtccttaccagccctagacccagataagggaagagagkagctatgagagagggctgcccttcaagaactgaagcccttgattgagtgacaaggtcaagcaaggcatggagacctggcagggaggaacctagaagaacatatgccccaacctcctcctggcctctgagttcctgcttttgttccccattgactaaacccaatttgaagcagaaagaataggagcccatggcgcgatccatacagagcagaccatggaaggaaaaaggggaaatggagggacaaagggaagaaagccaaccacaagcaactccttgcacagttaccactatagggtgaagagtagaggaactccattaattgtgaaccaactacatactccagcaaagataaaattcctggggtctctatagggattcctggcaaaacagtactccagacagctaactaggtcctcactccatcaccctggtctccaacrcagccacaatccttcctggctctctaaagagctaactgcccatgctagaatcatttctctacaattggatcttgacgattcattaaaataactccattgggacaatgagctgaatggggccagccctgtctctgcctccggaggccgtggtctgttactgtctgaaccatcccgctggcaggtttgtttgcacacccgaaaatgtattggccacttaaatctgttatgaattaccagcctggaaataaatatcgtatctgggtccccagtaagtaacagatgcatgagtgcagagtgagataaatgcgttttggatgcaaacctctttcccattgctcacagacagatggaggcaggcccagtgctggtttgcagtcaatctgcgtgctgtgtaggtgggacttaaatgaactcaaagttcttttaaggttaggaagttttctgtactcgctcttggcgaatccccagaggagccccaattgagcagtacgtttccttttatctcctttgctgaggagtctcgtggttagaatgttttctctttggggactgcgtgggtttttggaagccaaggagggtctctttactcagatgcagcgtgggaacaggcacacagcatgcgtacattcagtcaatatgaatttttcaaggccaatggcccaggctgacttgtaggtgctggggacatggccatgagcaagccagccctggcttcatggagctcccattcaactgggggagcatgtaaatgaagaaagaatagtgtgctatttggtgataggttatctaacgaaaagtaagccagagaaagtggaaagaagctgatggggtggtcagagatgaactctccacagacgtgattgacaactgagcagaagcttggatggagcgagagagcaagccactcaggtacctgggggcagacatagcaggcacggggaatggccagtgctaaggcctctggatggacatgtgatccctatctctgaagaagagcaagagccagtggatgatgaaagaatggcagagaaactgggaacatcactgaaaggatgaaatagaaatgacaagaggtgtcaagatgcccaaactaggtttaaggagccaatcaaccaccacctcctctgaggggaccctccttggctgttcaattcccatgggtactccacagagtccccacatcttcccattagtagcctttaccccagtctgttgatgtctataagttgctcaaaagcaaagtccacattcatcgggtccacttttgtatttccagtgccttgtacatagtagtaggtgcttaatacctgttgattgacagtgaataactgtgcaaacaaatgaattcacaaaatagagaatccaagccatctaactccacaactaaaatgtgaatctcttgctcaaaatgttatctcactgaatttcaagcacattagaatcttccaaatcacagcttcctccagggtctctttttcttccagcctgagcattaagaggatgctccaacttcagctcaaaaacattcatacatgtatttcaccaaccagactgctgaaaactgcacccagctctgggtggcatgtcccatgtcccaggaggagaaaggtacaaaaaaatttactgcagcacatggaattgcattcactgagcatatacaaagccctactgggccactcaggaggaatgagtcagctctgtatcccagaggagagcatatttcaagagcagcttggtgaggctgaagcacagggtgcatggggttgtaggagtggacaaagagggacaactggaggtgaggctggagatgaaaatggagacagatgactagtccgaaggtaaggcatttggcattaccatgcagacaatagggagctactgcaggcttataagcagggaaataacacactcagtgtgcaagaggaagctcatggggttaggaagcagcaaggctacagagtgaaactgcaggcagggaagccagctagtggttggtgctgtggcctcagccagggaggatgagggctgtgggaatgagtgatgggaatggcagaagagggcagacttgagaaactgcatctttccaggatctaggggactattttctattcccaaagctactcaagamaacccttgggtttaattctttcttttagcctgagcagccctgtccacttgacttggaggaagggataggtcttcctaccccttgtgtcacagggaagggctcagttattacattaacacaaagaaggtctcatcatcccagtgtcccctgagaggcctgcatacacttttagtcttgataggcactcagtaaataaatatttgccaaataaacaataaaataacaatagcaaagacatatatgttaaatcttagaatagtgcctggcacatagtaactgttatatatcaactcatttaatctggtcaacaacactatgaggtaaataccattatccccattaattttttaattttatagatttagagagcacaagtgcagttttgttactgtatgtattgcacagtggtgaagtataggcttttagtgtaaccatcacctgaatagtatacattgcacctattaaattatttctcatccctctcaccaccctcctaccctgccaaccttctgagtcaccaatgtctacgattccacactttacatccatatgtacacattatttagctcccactgtaagtgaaaacatgcggtatttgactttctgtttctgggagttttttgcttaagataatggcctccaggyccatccatgtatccaygttgctgcaaaagtcatgatttcattattttttatggcttagtagtattccatggtacacatatatatgtatatacacacaccatggaatactacatctatatatatatatctcttcatatatatccatatatatatggaatactatatatatatatatatawaaaatttctttattcagtcatccattgagatggacacataggttgatttcatatctttgttattgtgaattttaaaactgaggcacaatgagactaagtagcttgccctagaccacacaccctagaagggacagagccagcgttcaaacccaggcagctgagttccggagtccatggtacgcataaccaccatgctgtgttgcctgcctagttggtttgtcaacagcttgtttattgggtatttgctctgagtctcacattgtgctgagctctgtgacaaaaaaaattttaagcttagtagggagtgtttgtccttaagaaactgacaacctcactaagtacataggagtcctcaagcacagagttttagtagggctgttgattgctctgcggttaatccaacagttctggtcatgacattgcccctggattggtgccaacctccaactctagagcaggcccagcaattggaaggtgcctgcaaaatcattatcgagcaagtgaaacacaaaggtggagaaatgtacaagggacgcagaaacttgtctttgtatcagaaagtgggtctagaactttagagatgccacatctgtggcaccataaaccatacagatggcagttctatttcctgaagaaagtggcctcgaggcagttcatctacctcaacagggcaaaaagactggtcagcaacatctaagacaaagacagatgttcatcaaactttaggacttattttctctggacatggttaaccataaaagctaagtggatttcaggactgtcaacaatctcccaattgataggctctaaaattggcatctgtgttctttaaaaattttattcatctattcatttattcactcatgtatttatttaacaaatactaattgcattcagtgttctgcactaaatgcaggtctgtctccaaaacttaaacttctactcaatatgactgtaactggaaagaggacactccatgtatgccatgtccaggcaaaagaggggtcaccttcaacctcttgtccaatgatgaaggttatggggcagcagggtactccccaaccagagtacagcagggcctactgtagtgctctgaaatgtacagagaaattagaaactggtctttgtatttgcaggtatctttatgggtctcccaggtcagccttccataaggtcttctccgtacctgggacttcaattccaagcccaggaatgttggcatagagaagcaatgtgggatgcttctcaattttctttttctaattgttactaatggaagaagtcaacaattgaattgttttcttcctttttcttctctgggtgtcccatagggtcttgtacagtgttcttcatataatcatggctcaagaaagactttttggtggttgatgctccccataaacctggaaactccttctctacctgtttttgggtgcataaggataagcaatgcccawccaatctttgctcccagtgccactggctccaaggcaagcctatgtaggcacctcacaagtaactataaaaatagctagcatttagtgacttactacacactttatgtgcaatatctcatttaacctttgccacttctctgggaataactgatgctgtyctcattttgcccatgagaaaatcaagacttggagaggatgtttattaatattgtrctgtttgcaagctttgacaacagactcttcacagtgcttttctcctgttatccagggrtaccatcgacctcggcactacattgcgactcaaggtaagtgccctccctccacctagtgcctcagagaggcttcaggggtcccaggggaaagggctctcttaactgcaaggcttgtcctctcctcctatatctgttactccaaccctcctttttcactaaacagccctggaggagaggaatgagtttccaccagcaaagaagccacggaggggtaggctgaagactctccagaggtccttgagattgttcatttgtttatttgggaaggaaaatggtggcaagtttcactataggaaaaaggcccatgagtgacagagcaaggagcttcacttggtcaggagggagaggcccaagcaggtgccatcaacacctgccagggccggagctgatggtgccttatctccacgataggtgcatgcccataacagatatgcagctggctgccctagaaagtaacttggcagtgcgttttcagaaggcttaaaaatgatcgtacctttcaaacccttctggaaaaaaatcctgcagataattatatatatagacaatgacgcatataagaacattattcacggtgttatctataataggaataaaaaagcgaaaaatcttaaatgcccaacaattggtacgttggttacataaagtgtgttaccgccatattatagaaaacttcgcagctattaaaactgttacgcttggtaagaatttttaagggcatcagaaaatgcatataataggtctgatgcttattacagtaaatacacacatatacatataaatatagaaaaatggtattcaaacttttatatcaaacacatgtattacttttgtaattttaaaaatgatgaaggcccaggacattgaaagagtaatttccaaggaaattgctttggactgtcagagcctattttctgctcctggtcttttttttttttttttttttttttttttccttcctttctgttgaggccctagaggaatgcctccagcatttgtcaagcacaaaatcaggcatctcctgtttttgttctcagcgtctggcaccctgcagctctctccaccccccaccccagttgccttcctgtctctcatggaggttctggagaccaattttcgaaaactcccttaagccataatacagtccagataaggtgataggtggagttggtagaaagggtctgagcaggaggaggacagaagggagaggagaggctgccaacatttccagtagatgctgcagattgtgagagcttggaatgagcctttccccatccataccctaatctgtccccatcaggctcacatgtctcaggcccgtgtctcagatacttggtgtcttaacaaggatcacctggcctcactcctgctcaccagtgtggagacttgaccaaccrgrgggacaaaccttctcagctgctgctttgcacttgcattctctaacctcactgtcttctctgttggcaggtccgatgcaggagactgtaaaggacttttggagaatgatctggcaggagaactcygccagcatcgtcatggtcacaaacctggtggaagtgggcagggtaagcctctcctgcactcgcctgggcagaggatgctggagatgcactctcgaacatctctttgttccatgcatcgtgctaagtgcctcctagtcagtatttcaccctcacggcaacctacaagggaggtgtcatcactcctattccacattcaagcaatgtcctttcccttcaaatccccttcatccctttttacaccctcactctccgttgatgatgtcatctcatatattttgaggaaattaaaaccatcagtcgttcactccctcattgtcacaccacaatcctacttgtatctacaactgtcctcttgttcttctcctctgctgtcagatttgactataagaaatggctgtttttgttgacccaaatggtcgaatgtcaactgtttcctatggctcagcctaacacaacagaagccatgtctctgcccttccaaaggcaagcatagtgcctggatcacagattctactcaataatttttttcatttttccctttctcacttgcaaaataagtctctttctcattgccaaattgttccccttagcatacaaacatgcccagtaccttccatcttaaaaagaaaggaaaaggtaaataaaaagtattttcttgttccctcttttctgccaaactttaaagactcacagggtggctctgtttcttcactcatgttctcttctacccaccgcagcgtagctcctccctccatcccaccaatagtgatattgtcaatatcactcgcacccttcatgtcgacaaatccagtctccacttctctcttctcatcttactcaatctcagcagcatccaaccctttgctacccgctcttcttcccctgacctctaaatcttgatgttcttcagggctcagatcttggtctcctgctctgctccatctcaactctctctgaagtggtcctcaactactcctggggcttagaaatgggactgctattcccagcttgcttttgcctacttagttaactctggcatgtgggtgggctgctgagtttaaaggcaaggtgtacaaacacgagaattaaaagggctctctacacatcatatgaactaactaaaatgtgggcaggtaagtttttgtttgggtaagaaacagataattcataaagatgaattctggcctctgcgacgatgggaaggagacaatctgggctttcgtaatccaataaaggggtatggacatctcagggcctaatgggaatttaggaccaggtgagactttayccatgagtccacccttatctagtccatcactcaattttacagatgaggaaacagacctaaaggggtagagtacctaccctgaygtcactcagccaaaacctaggcacaaaatctgacgctggactctgattccagtgcttgtggtcactccactcagactgttccccagggacccaggcccagggtgcagctactgtggacataaaggccagcccaggattcagggattcagaggcaaattccagcctgttctacaatatatcccccattggaaacagattcccttgatggatagaccataaatctaaattggatttggggaggaaagcagtctcttagataagctcctgctagtgccaaacactgtgccaggtgcttattgtgcattaccgaaacctacaaccatcataggagcccatgttcctagttattattcaagtgccctgggtttgcatcctggccccatcccttaccaacagttgaccttgggcaattttcttagctttcctatgcttcctcgtctgcaaaatggggatgataatatctacttcataaagttgtgttgataagtcattagaattaatacatgtaaagtattcgcagaacactttgtgagccgtggtagacagagtacacagtcagtaaatgttagctatcattattgataggaagctgaggctcagagaggyttcagcactttcttgggccacccagatactgagtgttaggaccaaacaatgaatccatttgcccccatgctctgttgcactataccagtgtttccctaagtgggttccatgggatgctagtctgcaggatgattagtgagaagagggttccacggttaaatacgtttgggaaatgctgcgtcctctgtgccccttttggagagtcgcaaaacacaaaacacattagcactagcatgagaaagaagctgaatagtcctgtagcaaagctgcctatttaactgtgtaatacagcatttcccaaactcatttgaccacaaaacctttttttgtttgttttttgtttcttgttttttacctaacacctattagcacccagcggaacacactgtgggaaatgccactctaggccgtgcggcgtcccccggaatggtaatcatgcttttgttcttttaaggggaaaaccatgatctctttttcatccatgagtgcgacttaaacagtcgactggggaatggcttgctcgcgtccagggtcagagaggaactgcgcatcttcccttggagtccagcagctaccatccttttcccaaccaagagcctttctccttccagacccccaactgccacctcttaatgatgtccccctcccaaccacttctgcttccacctcctatttcccaccttttattctcatctttgctcagctgatratactcagctgctccaccctgacagagcagaaaggggactcagtcagtccccaaactggccacatggccttggacaagtcaccaaacctctgaacttcagtattattttcatctgtaaagtggggacaataacacccacctatctcaccttgttctatttgatgacatagtgtgataatgcattggaaarttacaaggagctttgcaaaagaaggtactacaattatttctaatggctccagtgcctctgggagtgagcttggccctgtgcagcttgctgatccctggccagctgtgaaccctgtggactgaaatgccaccaaagtcacccttgggtttatttggatgggacgaccagatgagacagctgctcacactcagccatgtgcttatgcatccttgtctctgttctgtctctgtctctgtctctcacttggccacaggtgaaatgtgtgcgatactggccagatgacacggaggtctacggagacattaaagtcaccctgattgaaacagagcccctggcagaatacgtcatacgcaccttcacagtccagaaggtaagcttcntggaggctgtgggcagccggtccaccatgagagccagcttgtttgttcatccagaacatgtggtaactgagggtctgctctacgtccagccccatacttggcaccagcaacagatcagcaatcagggcagacatgggtcctgctaccagggatcccacatctagtaggtggggcaaactgaattcaataagcaaatcaatgaaataacaacacattgtgataaaagccacacaggaatatgcaaaggatggagatagaaatccacagtaggatggggtggtaggagagggcctcttagcagaggaggcatttgggcagagaatgagggaggaggaaccagtgaagggtagaaaggaaagaagagctatcccaggcagaaggaaaaaacatgcagtctggaggggaaaaagtgatctcaacctgttcaaggcatgtggtctcaaccgggggcattttgatcccccaaggaatatttgtaaatgtctggcaacatttttggttgacacaacttgggggagaagggttaggatggtactggcacctagtgggtggagaggccagagatgcttataaacattccacaatgcacaggacagcctccgacaacaaaggattatccagcccaaggcatcagtagtgtcgaggttgagaaatgctggtctggacattaaaaggaggccagggctgcacaagcttggtgagcaaggatgtgattgcaaataaatatatttataacatgttacataataattgctattctatcattactattatatcataatgatagctaacacttactgagcacttactggaccaggtacttttctaaatgctttgcgtagagtaactcagttaatcctcccaataaccctataaggtaagcactattattatccccattttacatatgaagaaactgagacacagagagtttaaatcagtcatccaaagttgcccagctgcaaggttggtacaaccaggattcacaccttggctcctgtaacacatttctctttccattacaccataggttccatttctctaaaaccaatcactttaatagacaatgtggccacaggcctaaggatgcaaaagcactggggacttacatgctttgagagctgtgcccttgaggctttgacaagtccttgcaagggccaaagcaggctgctctgcagactagagcccggcatgcacacagtactgttccagcatacagagtggcctaggacatactgtttgccccggaagctccccctccaacccccaggctcctaaagtctcagggtctttttcatctgaatctgcagtctcgggtgaaaaagtcaggaagcctgtgaactccctccactaagaggaaggaaaccatcggtacttcaatgttgccttaggtcaggttttttagaagcagagcctgaggcaaggattcagaaacatgaggtatatcaggggagctctcccaggagaaattcctaagagagagtgggaagcaggagagggaaggaaagacaccaaccaaggacagaggctccagtgaagtctagcctagagctgatccacagggaacctccaaggataaactatgccacagagtgagttgtcccccttaaggcgtggaagccagacttctgtgctcccacgtcagtcagtctgctgatcgtggaccatccactgaggggtaacctccagggtgggccagcccctgtcagctgagggcgtgtctccagagaaggggacaattgaaaggcagtagcaaccaacagtccctgcagctsaggcctggaagcacaggcccaaggaagaggacccaggggtaccagtctcatctgccacatctgtgttgaatgcccgaggatgggatgagtgactggcgacacgggcagggaggccttgaggaattgcagctagcaaaccatgttgaggcattaaggtcctttctcgtgttacattttctttgtcttttaaacaaccacgagggaagatattactcayagggagatgcccttaaaagaccccaagggcctctgaggattaactgggcttagccagcctctccacagcatgcaggcaggcactcagcaaacattacctgcgattttagctcaaaatcggttcctgagctgggaacctggaaataataaacagggagtgctgtctgcccttgaagacagcacagacgcatcggggagagaggatccttgataaatcatcacagcacaggtgggaagagctcgaaggaaggcttcttgggactgaattgatttggaggatggcgtgaaaaaagtccaagtattcttgaagctttctcctctctcacttcagctcattcatcactgccttcatctgggcatctgatttctccctcctaacaggactgtctgcctctagtcctgcccctatgttagtttgggtttcccagaagcagagccagaagcagcagtcgtttgggtgccctggctcatgtgtttagggagagtttgcagggggaaggcagtgagagagccaggatggggtggggaaaggagctgagtgaggaagtggcctcagcagagacttgcttccacctaaccccatgggagccctggaacatgaatggtactgcacacttggtccaaccttgaggcaaaggggcctcaggtgccccccataagggtaaaaaaaatttctgtttttcccagaacattactggttttagcactgaaagtcccacgtaccgggcaacccrtcagtcctgggcagactgagcaagtggcaagccagttggtcactctccctctactatcagtcagtcactgaaggatgctgccccacccagccacaccccaggggaggggggttcctgttcagctgagaacagttctcttcagaagagggtaactgtgagctgtgtgcagccacgactcagagcaggtggcaatgagtccactggcccagtgatggggatctgagtgggcaccaatagtgccctctctgcaacccccgatccacccacctgaatccatccttcatgtagcaggatgcagcctcctaaaatgcaagtctaatgatgcacttcctcttgtgtggaaccgtctgtgtaatctccctgtagcttcccagtgcctttgagataaagtccaaaggccttaatgtagattcaaggccttctgggatccagctctcatctattctcctgcacccccaggcctgtggtctcccatggcctgacttccacttgcctctagcattgccctgggttgctagtgattctctgcacacaccatgctaagccctgtccccaggcctgtgcccatgctgtccccctgccttggattccttcctcttctcccgtcaactgggtaatactcacacatcactatattagaatgattaagagtgcagactgtggagacagacagccagggttcacatggtccctttacaacttgtgagttgtactgtgaccttgggtgtgtcacttaaccttgtttagcctcagtttcctgatccatcaaatggagataaaaatatagggatttatatcaggattaagtaagttagcatgttgaagtgttcagaagagtgactggcacacagtaaatgcttagttaatgtttgttagttattattttcactattagtctgtttcaagatggaggtcaagcatcacctcctccagaaagccttctgggatttctcttctcctcagatcaggttagcaggcactcctttatccacttcaatagaattacccacttgggcatctgcctccccgacaaggccatgagctgttccagggataggagctgtggcttttattctcaccttcctagtacctagcacaaggctgggaaggctgggcacaggtcacacttggtaaatgatttttcaatgaaggaatgaatgaataatcaaacagactcttcctattcagtgttctctgggtatctgcaggagattgctaagtagaaaaatagtagggaacaggaactgtctaagcgaaggcttagaagtgtgacctggccatggaatggtcagaaaaccactactgggcccggagtgtgtctctgtgaggggtggaggggtgtgaaaggggaggggaaccgctcagagctctaggccccactctgtctccatcagatcagagaagctctgcctttgtttgtttcgcatcttatgtaatcattctaagtaagaatctacttaataaagaagtcagtactaagttatataaactttgaaagccacacagactatcacagccaaggctggaacactacagaatatcagacctcaatcactgaacgcctcagattccactggaaacaatttggactgacttggtccttaaggccaacatttctttaaatccgtactcaatacacctcctatgaaacatttgtcaaagacgatcccctaggcaaacaaaagaaggtctcctagggtgctctgtggccctcttgggcattcagagtgtgtatgagcacactcaagactctgagaaatcctgcaataaagccatcggtttcgttttaacaatcccatatttcccaaatgtaactgattacagaatcgctctatccagtaacacctattaacaaacactgtgagggccctgtccctgcgggaggttcctcagtgcagcagctatggctccacgtgttgctgggctgggtatgcgagggcagcagctggaagaacagaggcccgttctttcctcagaaaggctaccatgagatccgggagctccgcctcttccacttcaccagctggcctgaccacggcgttccctgctatgccactggccttctgggcttcgtccgccaggtcaagttcctcaaccccccggaagctgggcccatagtggtccactgcaggtaagtcaaaggtccttcaccttgggaggccgaggcgggcagatcacgaggtcaggagttcgagaccagcctggccaacgtggtgaaacctcgtctctactaaagaaagatacaaaaacttagctggtcatggtggcatacatctgtaatcccagctacctgggaggctgaggcagaggaatcgcttgaacccaggagcgggaggttgcagtgagccaagatcgcgccactgcactccagcctgggtgacagagcgagactctgtctcaaaaaaaaraaaaaagaaaaagtcctccacctaccctagtgtgcctctgcagctcggctttcttgggagggacatgttatcttttctagtggctttactcttagagactcctcttcctgtgtcccccccatgcccagtgctttctgatgatacttggtcacaaggtcagctaacaaaaggaatagcagtagtggccattgttactgttgttgcctgaaaacagtgaagaagtcagtcaccagggaggcaggctgaacactggcagcatctgctgggtctgtcacgtgcattttacccacattatttacttctcgtccagtctggagaggtgggcattattaacattcccattttacagatacaaaaactcaagtgctgaggaggtaaacacagagtggggatatttcacctgcttttctccagacacttgccctcagctccttgacatggcagcagggcgccttggtggaagcatgcttcttttcatttctatattattttcaagatcacttgccagcctgcagggtccctcatagagagaaatggacagcaccaggttttaccttattatgaagaagagatattttcagctctgacctagaaagtcacattgagaatgagtggcatgtctttgaatcctcccaaatggagatgaagtatcctgtcaagggtgtccagaattggaggaggatggccttcctgacctgaaggctggccagctggcatcsccctccttcccaacgcctctctcttccaatatgaccttggggcagcccatcttttcagaccctggatgcttgagttatcacatccctgccctggcagtttgtgtcagtcaagagaccatggaagactccataagctgtggatgtctcagagccagccccgtcctcatacagcatccatttatttatcttcccagcaatagtagctacacaaccccatttcacagataaggcaagtgaggatgaggaggtaatcctggactctctaaatgttttgcatgtattttctgctttgctttatatctcatagcaatcaaagggcaatggatcattaatgccccccatctctatatcccaaagagcacccagatcaagggttagggagaaagaaagaaagacaatggcaaatgtttgtttatcatcaggacttcggcgcatgatggctctacgccggtatgtgtctccttagcaggtcatcttaatgcatctgagcagagtggtacccactcctggggccattctgaaaattattaccaaatgggttggctaagtgcctaagagagaatgcctgacatatagtaagcactctaatatatcattattctctgcctcctcttaatgttttctttctccccctccccagattatttattaatccttcaggacaggaacaatgtttgtttgttttcatattcccactcctaataccagcatctactgcatcttagattttcaataaatatttgttgaatataatagtaataatttctcaataaaaaatggctatgtatccaggcacaaagcaatttgtatgcattatgcattttaattgtaatttcatccaatttatacatattgtgctattaaygctgtgaggtggatctattaattattatcaacatcattttatagatgagtgagtattttaattattatcaacatcattttatagatgagtattgaaacccagagaggttaagtcatttgcccgaggtcatgcagctaataagtaatagagccaggatttaatcctagggggtcttttcaaatatcctgtgttcaattactatgtgatgctgaaatgaaataaacacagctttgtcctcacaaggaccctgcagggaggtatgttaaaagcatcagaaatctgaagctaacaaacaaacggacactaggcaacttggtcaccgctgattgattgatagttgttccaaaatttggaaccaaattgggctgattctttatactaaagcatggtgaatatgaacattgaagaaaaaaacacgagtgaccccccctatactccctcccagacrcagaggccaagtctcttgagtccccgcatctggattttggggagtaggttctgaagcaaacttaagtcagacttcattcaaaccatgaaagtttctcatgaatgaagactctgcttccaatgggtgtactttccaaattgttgtaggtagtggtccgcactggcctgtgccccttggatttaccatgagccaatattgcttttttgtcttgttccatctctcttcctctttgtgtgtcttttgacatctacattgttagacaaagacacttgtttccatgagaaaggcaagatgtgaaaacgcagcggaagggggcctccttgacaggctgcccggccttcccatccaaaactgcacatgtgtaaggcacatgtcttacgtgcctcttggtcagcactgatgtttcagagcccagcactgatctagaaagggctggccaaggcccatagagtctcgttgagttcccctaccattttatacttggtctgagattctcctaaagaagccactagtgaccagaaatcaagtaagtatgtatcaagaaacttgatccctgacaagggtctccggacggtcagctgctccagtttcatgacactcttgcttcacgatcctgcgaaaacagctgcaggtggagccagatgccggcctttgaacgtggtgctccaccaaccactctctgtcttggggacagctcagaggactctcgtttctgtcctgtcattcatctcccctctgttctctctcctctccttctttgcttccatccrtcaacccatttgctgaagaagaaaaaagaagagaaaagaagggtagaaamtaggaaagacatatctatgaggcagctccagcatgccaggaaccatgctaggtgttttatgctatatggatgtattattttatccatcagacaaggcaatggcatgtatatgtgtggtttgcacatgcattacaaactatacatattaagaaaggaaatgtgggaacacataatctagagcctcccagcaggacccttggggatagggctgaatgctaggggcctccccagggcaggttccccccatgaagatccttaacacagaccatacctctcttccagtgctggggctgggcggactggctgcttcattgccattgacaccatgcttgacatggccgagaatgaaggggtggtggacatcttcaactgcgtgcgtgagctccgggcccaaagggtcaacctggkacagacagaggtgagtcctagggggccaagacagttggccacctgtagccctgaccaaggagaaacatgatgatagaacggagagacacataggtaggggcatcctatggaaaggacctgggtgtgagagaagcaggagggagtagacacgtggcttactatggtgagactactgtagaagctagggtgccccagccaaccctggaggtctacagtgcaggcagttccaccaatgaagaatggtggtgagttctccatctctgaggccatccaagcagggacagaatgacaaatttcggggattattggaatagtattcttgccttgggtgaagtgatagagaaggaaagaraaggactggcatttattcagtgaccactacgtgccaagcgatggttcagtcactgcagggaatggtttaatcaacaaagtaattgagtacttaagctgggtgctgggcatttcaagagatgtaacacacagcctctgccctcaagggagaagcagacctttaggcaactctctgtgcagttggagagcccaaacctaagagtattgaaaggaattaatctttattgttgtgtacctactgtgagccaggcagcatacattctttctagtcacggtattgtttctactcctccaaaccagctatggtgtagctcctagtattatctccaatttatcaatgaagaagaaactaagaaattgtgtccctaagacctcacataccagactgtggtagaacttcggtccatgtgacccccaaaggcctctgctttttcgccagaaccacactctcactaagcagccttttctgcctatcccactctgtaccttggcttatcattcctgtaacgagcccatcttctgttctagtgaaggctctgggtgcctgggcgaccagagctgggacagatagggaactatgcacatcatcaatcctgcaaagggaagtgacccatggttttggtacagccagcctctctgaatctgcagtgaataccaccattgattggtttacacacataggctctgagctaactcacacaggccagtcttcaggcttctagcactaaagccaagagggctgctttatctattcctaggtccatgcatgcagaagccaggcttgctggttgcagtcagacatatggggagacatattcaaatgcagatgcatcacatagcatctggaaaagtactctttatagagaaactgaccaagttctgcagaaaaagtcactcaacaaacatttatctggggcctagaagtaacaccaacttctgcctggtggattaacagatggctttccagaaagaatgaaacattaaaggtatggaaaagagggagtggagtttcaggaggagagtacagcaggtacaaagaattgagataggagaagatatgacacgttttgggagcagatcgtgagacaaagatttgccggcaaataatttgcttggaaggtaatcccaagacacagtggctggtgaatgggaaagtgaggcagagcagggaaggaaacaaacaaaggctactttaacaagttgttaaacactgtagacaactggaacccaattctgctggcgaactctgagacacatgcgtgtccaagtgattccacctaaagggagagatttcttagatttctatcctcaactctccatctgtcattgcttgagggttcctttccacacagcccaagtatcccctctgccttcagcagacaatcacaggtgtttgcagcaagcagccttcctcaggtaaaggtgaaagctgaggggacatgggctggacaccaagagcgcctgctgacagcatgtctagaagtttctcattttatcatgactatgctattacatcttctatcagaaacaagacccaccatagctcaggtgatcattaggaaacatggaaatttggccctttgggttacagtataaaaagtaaggatcctgtaatatattgataaatcatgtctattcttcatagccacaacactaaatgtggacagctaattcccaggccactgttcttacctggcaccccattccctctcttctgactttgcaggagcaatatgtgtttgtgcacgatgccatcctggaagcgtgcctctgtggcaacactgccatccctgtgtgtgagttccgttctctctactacaatatcagcaggctggacccccagacaaactccagccaaatcaaagatgaatttcaggtatgagcaaatcccaggctcggtgaccatcttagtcagtttgggttgttataacaaatttccatagattgggtggtttaaatgacagacacttattcattacatttctggaggctgagaagcccarcatcaagcttccagtaaatccagtgtctggggagggctcacttcctgacttgcagatagccgtcttctcgttgcatattcacgtggtggaaagtagaagcagcaagctctcacatttcttcttttttttactttttatagagataggatctcactatgttgcccaggatggtcttcaactcctgggctcaaggaatcctcccaccttggtctcccaaattgctgggattacaggcaggagccaccacacctggccctacatgtttcttcttatamgagcactaatcccgttcatgagggttctatgctcatgatcgaaacgtyttccaaagtcccaacctcctaataccatcacattgggggctaagattacgacatggattttgggagggatgaaaacatttagtccgtaacagtaacccaaccaacttcagtggctatgtgcacatttgtggggttttctttgggacaactgatctatgcactttcagtgtctgcttctctaggaagctgcagaatctattccagaacacaaaatgcacagccatgagcaactacacactcactcagggattgctggtacttgtctttaactgtgaatatgttttttaactgaggtcttattcagttctagtccaagttgtgaatggagacaaatttatacaaacaggtgtgaatttcatgctccttcatcyctggagggactcaggtcctctcagtaatttttcagtagactcttactgctaaaagtgtggtctgcagcctgaccaacatggtgaaaccctgtctctactaaaaatacaaaacaagtgagccaggcatggtggcatgcacctgtaatcccagctactcaggaggctgaggcaggagacttgcttgaacctgggaggcggaggttgcagtgagccgagattgtgccactgcactccagcctgggcaacagagtgagactccatctcaaaaacataaaaaataaaataaataaaattttaaaacctgcagtctggagaccagcagcattggcttcacctgggaacttgttataaatgcagaatctcggacctggcccagacatagtgaatgagagcctgcaagttaacaagatctctgagtgatttgtatgcatgttaaactttgagaagtactgtcctagaacatagctcaggtataccagatccacacctggaagcccatgcggtcagagctgtggcaacattgattggtctagggagcctggacatgaatcactaagtaagataaagccagagtccagccctttatcccaagaccagtgtcagaattacacctgggcaacaggagctgagaaccaggtatgagaaagcaaggaagctccaggtcttgcttcaagtcagtgggcaaatgccaggcccattgttccacgggcagatatcccaggcaggccaataccttagcaatccctaaaacaaatagccrttattgatctgaagtagagacagagagctgaatgagggaaggatggagggtacagaacactggtcattgcacgtaacatctagtccattggctagagcagttcagctctggcctcaaacttgcaagatgtactcggcaaagtccaaacacagcaatttcccagacctgttagggtttgcccctcggaggtctctcatctatcctgagcaggtcatctaggcatccttccatactcagacagctttctctctgagaagagggctggtaaatcatttcccccattccatgacaacgcaagtgatgtttagccctcagtagggattccctacccccacccctctgtatgccctcctggctggcccaccctttaaagcagcactggctgagctgaacgacttagttcatctggttggcaggtactatgaggctgtgtctgagcctgtgtgtggatgcgctgcttctgcagccttggcgttttgaaggtgtcacacagctcacacaccctatagcagggagcaggagaggacagaacatcaccgtggaagagaaatgggtcccgggaaagggagagtggggctgcgcttagagggtggaaataggcragttaggctgagttggaacattactgtctcttttgctcaggggcagccawatgagcagggcctatctattcacctttgtgccccacagaccctcaacattgtgacaccccgtgtgcggcccgaggactgcagcattgggctcctgccccggaaccatgataagaatcgaagtatggaygtgctgcctctggaccgctgcctgcccttccttatctcagtggacggagaatccagcaattacatcaacgcagcactgatggatgtaagccgagcccgggcagaaagctcctagctggcattctagggcaaatattcttcctgaggtggaggtggctggacctcagggccctgaccccaccagccagcnccccctgcttctgatctactagtcccaaggacctttgttcccctgcaggctctggtccaaacctagacacaaggtgggctcttggctccttttctcatacaaagagcctggaaagaatagaccagaagcgtaaggtggctcccrtgtcaccatggcaagtctacaggcctgcctagcaacctcttccattccccacagagccgactctcagcctgaagtttagtaaagcaggtattttctgtgctgggccttggcctgagcgtgggaacacaagacggtgcagacacaggttctgccctctggtagctcccatgaaggttccagataactcctgagcagagacaaaaatgaggatggcgcacagtaggggctcagtaaatggttattgggaaagtagtgggaagcagtaaaacaagcatggggtggaagcgggctgtgttcctggctgtcctgtgagggccactgccccccactttcttgtcatcaggtccaggaaggggcttcaccctaccctggtttgggattagggtcatgttcctggtccagcgagcctaagcttctcccctgcgtttttcggatacttctgattatcatcacttcccctccaaggtgtacaggtgtttgcagtaggaaggaactatggaccatctactaccagccatgcacttttcagcagagaaaacagaggccagacagagaaagagacttgctcaaggtcacccagggagctagtggcacagcccacacacagagctcctgggtcacactctggaattcatttcttgagcctccctgcaatttggtggatccaataagaggcaaacatctcacctcctgaggctcaaaaccaagaacaccattgcctgatataatgagcccttccagcttcccctccccagcccatctgagttcacatccatctagcccatgtggccctcctatctcactcagaatagacagaaacatgggatgctttctcctggggtcaaggccaacaacttctctgacctctaatcctcttgaagtttctcccaagggtctgggtgttagaggcaggagggtgatgatggaaggtcaatgcctatcccagctctctaggggcctgccctggcctctgtccacagagtgcccatatcctctgtaaaaaccctagctctgggttcagaatcagggagtcttggcttggtcatagcaagtagctagaggtggagagaagacctttggcattagcttatagcttagagccttctaaagtcaatgagcgcatgtatgtgtatgtgtgcatgtaggtgtgcattatgtgtgtgagtgtgatgagaaatggagcctaggggtgcgcccatacttccaatttcctcctagctttgtctcccacttctcccaacaccccctccctgccttcctcatccaggcaaagatcaaataagctcctggcctctacttaataggttagatactgcctggagtcaaatgccttctgccaagctctgatgctgattgtattctctttgtccacagggcatttctcctgtgagccatcactggggcctttgcctttctgatattaaaaacaaaaaaaagtcgtccttatctgtattccagcccagtcagtgcattatctggtaaccatagcagctttgctcctagcagaaaaatatgaagtcctctgggttaatttttaatgtttcccctggtaaaggatgatgttatccatgaaatggattgccggctgatccctgaaacccggcaggagcacggatctcgaacatattttcagataaggctttgtcaggcgtgctggcctaatagagcgtttatcacagagacagggaaaaagaaaagaaaactaacattcactgagtgttgggcaccatgtcgggccctggacttgcactgtcccattttgcatgtgggtattctcatccccattttctgatgaggtcctcggggtcagagtattttcattcatcacttgctcaaggtcaagtagctcagaaatgggagccaaggattggagccccaagtctgttaactctcaaagcctcaatgtttttccatgtctggaaatggctcaaagttgatgctgtctacagctagagagtttggcttttggaaaataaattatttgcctatgcccacccagacccctcttctgaacattctactggccaggaaaaggccctcggaagaagggcccccccagccaatgcacgcatgatatccatgtttgcaaggctttgtcctgctttttccagggtctttgccctcttccctcttgcttgtaactgcactgaaaacagctgtaactcccacagaaaccatcatcatctcttgagaaaacatatcaagcacatgagccactgatgaagtggagaatcttcccaatcttttcaaatacatgacttcagggtggggagaaaataaatagggccctggatgaagctgccagaccaccccaccccccycccccccrcccaggccattttctctgggcctctgtttccctatctgcaacacgggactgaatttattgttttattcactggagtggcactgtctagcaygtgccagcgacaataccagtgccaaggacgtaaaacaaagtcaggggtgtttctgccctgccagtaggcttacgttccggctcttgtttgctggccttttcayacgtaaatctcattcaatctgtgtgacatcattcctttggatttatgatttccgttttccaggtgaagaacatgagctttggaatcatctaataacttgccagtayttagcacccamcccgccaaaaaaaaagcactctacaaagtttgaatgaatggatgaatggatgaatgaataaatgggcaaatggatggacagatggatgactcataacttacaagtggtaaagctgtacttgaaccccaggtctaccggactattaataatgcatgtgtactttccactgccccattgactcacatgacacagtgcccaccttgccagggcaactcagcccctcactccagcctggaggcagaagggagcctgcccctttgggagaatctcggcctcaggccgacccaaaacctcgcccagcatcgtggccacagggatgcggccaatcccttatatcccaagaggtgtcttgaccagtagagcaacaaatctgcatctgaaatctttcatttcgtattgtaattatgattatttgctgagctccgaggcataaataatttatttggataatcccatcccagtgacactttcctaatgaaatgtcttagtttggaggagattgtgttcattatgagaaggtcccctttgccgccagggcgtggagagataaaagaacaggcaggtgttttgtataatctatttggcaggctctggagcctctggcctcagtccaggcctcatcatcatcagaatatcrctgatggatgtgtaatttacgaagcctgtgtcattcctttgtcagagccacaagcagcctgccgccttcgtggtcacccagcaccctctacccaacaccgtggcagacttctggaggctggtgttcgattacaactgctcctctgtggtgatgctgaatgagatggacactgcccaggtaggaggaggccaagccaagccctaggtkggtcaggggggccatgctctaaacctggagrgagatcccttgacagccggtgcctgccacatctgccccagccagctgtcttgtaataagcagtgtctggccacgagcatcagacaagccattctgctacctacagagggtcctgtcaccccccagacctccagcaaagactccccctgcctatgggctttgtccaactccccrcccgggaccagactctgttgctccatctcacaagcattgattattgtcttgctccaaatcacacagatcttgcagagccaggaggcttcctcccccagcactgagcacctgcagccctgaaaaatacccagatgcccggccacactcacctcccttccmcctctgcaatgcagcctgtacagacagagcctgggacttgaaccttggacacattacccactgaccaccccaccaagccccagttcctcacggttgacctttgttccccggcaggcttcctgccttagcccctctgttctgatagctccaagcatcacgtgcctacagcatatccccatactcaggacacaggacgtgtatcttggaacagtttctatgccagggcagccattctggggtggaagagctgagaatggtccttcagatttttaaaaacctatcctttcactgccttaaataaaacttaaagtaacattgaattcccatatgagagctggccttgtgcaggccttggatgggaatttaaaaattttttaaacagacctgagctatagtttcagccctccaaaagcgcatggtcttgctccagagacagatgagcacattgtcccaacctcatgtggctgtgttataatagaggtcagcagtgaagtgctgtgttggccaggagcagggagcaatkaattctgcccagagggtgagggaagacttcaaaaagaaggtgactttggccttgaagaaggcagaggagctttaggcatatggaggctgaactcactgggaaaaggcatttcaggcagagggaacagcagaggcaaaggcgaggcaggggatgaatatacacagacttatttgcggaacagtttatgttccagtgtggctgggacctagaggaatatcaggaggagaagaatgtagtgaggctgaaaaatgcagcagagcccagcttgcagagaggtccctgtgccaggctaaggagcttgggtcttggttggcagcatagcaagcttcagacttytactttgtaagcgacagaatcctttctatgaataaaagctttcatgcaagcccaatgtatgaaatagggatgaccaaaagctgctcatgatgaagcagtaggcaggggttgggcttccacccacactgctgtctcattttctcctggtgcccttagaggggtcagtcctttgtgggaccactggagtttggaggagcacagttagaaatactttctgtgcaggaaggtgaaacactggagggttgacagtggtataacacagccagggttcctgttagaaagatgggtctagaggctgggcatggtggctcatgcctgtaatcccagcactttgggaggccaagagttcaagcccagcctgggcaacaccatgagaccctgtctctacaaaaaaaaaaaaaaaaaaaaaawwttttaattagccaggcatggtgccatgtgtctatagtcccagttactcaggaggctgaggcgggaggattgcttgagcactgcaaggctcaagtgagctatgatcccaccactgcattccagcctgggtgacagtgcaagaacccattttttttttactgactcttactgtgtcatcccgactggagtaacagtggtgcgatcttggctgactgcaacctccgcctcccaggttcaagtgattctcatgcctcagcctcccatgtagctgggattacaggcgtgtgccaacatgcccgactaatttttgtatttttagtagagatggggtttcaccatattggccaggctggtctcaaactcttgacctcaagtgttccccctgcctcggcctcctgaagtgctgggattacaggcgtgagcaaccacatctggctgaccccatctcttaaaaaataaaaaaaataaaaattgcaaaaaaagggtaagaataaaaagaaagccaggtctggggatcagtgcaggtaaaaggccggaggaaagacctggaaaccaggagaccggggaggagaatgttgcaaatgtgtagacaataaaggtagttatctgaactgcagaagtggccaggaggtgagaggactggaattggacgtgaaaacatttccagacttaagtccccaaggtttagggagcaggtgcaggtgggaggtgaataagaaggaaagttgcagataatggcaggaagttgagtctgggcaattaggcaactggggatataactggggaaaatatgaaagtcaggaaggtaggggaaggcagcgagaagagcagatgaacaggggatgaaattgagtgcaccttgggatgtgcctgtgagagacgttccggagagagtctattgattcaggcaacccatatttgttgggcatctgctatttgctggaagctattctaggtgcttggaatgcatcactgagcaacacagacaaagcgaggcataaaaaaaaattgccatctctcatgcaacttctcttctaaagcaggagacagataataagcaacacacattctctaatgtgctcaattataagttagaaggctgacacgagtgtttggaaaaaggcaaacaagaaggcagggtagtaaagatcagaacgttggatctgggacatagaatgtcattgcaataggattgtcaaggtgggccctatggagaagaacacatttgaacacagacgtgaaggaggtgagagagtgagccatgtgactctcaggggggcatcacaggcagagggaacacctgcacccaggctgcagggtaggcatgcacctggtgcccttgaggaacagcacagaggccatgggcagagcagcacaactgtggggaaagcagcagaaggtgaggtcagagggccatggaagacatagaagaacttgggctttcactctcagagaaacagagagccatgcacatgtttgaagcagaggagcaacataatttgccttttttaataaaagcatccctctggctgctgtgttgagaatagattgttggtgcaaggatggggaagagtggtttctgaaatggaagcagagagaacagacaagagactactgtgataattcaggtggcaggtgaggttggttgaactggggggtagattctgaaggtaaagccaacaacacatccagagagattgactatggaataagagagagaaagaggaatcaagggccaggcatgcctgtaatcttacctagcactttgagaagccaaggaagcaggatcacttgaggtcaggagttgaggccacgagttaaagaccatcctggacaacacagtgacaccctgtctctacaaaagaatttttattttgagatggagtctcactctgtcgcccaggctggagtgcagtggcgcgatctcaactctgccgcctcctgggttcaagcgattctcctgcctcagcctcccaagtagctgggattacaggggtgagccaccacagccagctaatttttgtatgtttagyagagatggggtttcccaatgttggccagactggtcttgatctcctgatctcaggtgatctgctgatcttggcctcccaaagtgctggggttataggcatgagccactgcacccagtcctacaaaataattttaaatgaactgggcatggtggtccatgcctgtaatcctagctacttgggaggctgaggcaggaggatcacttgagcccaggagatcaaagctgtggagaactgtgatcacaccacagtactctagcctagggcgacagagtaagaccctgtcaaaaaaagaaagaggaatgaaggataatgtcaatgattggggcctgagcaatagaaggttagaaactgagataactataaaaataaatgaattctcataaaacagagagttctggaacattccctgcagagttttggagtctgaaggcatcaccaccctacgcttttggctgaagaaataaaagaatgaactcagctcatgagcctgggcrtgaagtctggcctgcaaaaccctgtttgcycttctstttttcaacatccctttctgcaaaaccagagctcaggcacagaggatgactttcaaagaacttcacttcgggacatataaaacctttgaaacaaaggtcaaggtcattggctatagctccccctttcagggtgggtcctgggtgaatgaagaatctttcaggcccagatgttggtacagagtttgagaactgattctctaaatgcaaaaacatcaggctcagaagtaccctgaggttggctgccataygcagctggcaagcattccctgaaaccggcagatgaatagagcacttattgatataaatatcatcaccgcagcagctgggcgccttatgaaaataaacaatgacacaggatgagcatcagaaaagccgccctcagcacctggaggggcggttctttgaagcggcgtcagcatctgtctgcctgcrtgctcatgccaaggcagcctccaagctagcccagcctggcaacatggacaggtctgccttaggacctgagcattgctaggtcactcctgagaggaccgatgccatctcctgtggtttgcctgggaaccataagagcgtacgttggggattgggcagggctacctgtaagctgcagcaaaataagaagagggtgtaagctctcacagggccttattttttttgcactgctggccaaatctgcccctgctcagaatcttacactacttcatttagtcagccccaaattttctttcattcctgcagtggttgctgttcaaaggtaattatgatcaatgagggctcaaaataaaggcattcaaacttytgcattcaaccttacagatttttctaactctttaggactccaaatgtctgtggtcagatttgyggggtaaaatcctagaaccacgccagccagcaaagcatgctgtcacttctcagactcagcagaaagaacattttcaaccacatccaacagcattgacaagatcttttccmtctttgtggtctctacggaccaccagaaagacaccagaaagaagccctccttgcagtcatgccayactcaccatactgtttagagagctcaggagatcctgcaygccagccaaagggtggggctgtgtggtagccagaatcrtggccccaccaragatgtccacatcctaacccctgagacctatgaatgtgctatggcacctggtgtatggagcatacaaggatgtttctttcctttaaaacaaataagagtccacaacttacataaaagctgagttgctctgttctggggctcccactgtggaaagcctgagagatcagggatgcaaagccttttggaaaggtgagggtgcctgagtgcaaggataatgggggctgtgatggattcccatggaagtgagagaggcaagctcctcattctcccaggagaaaagcagggtgctatttcagagatgtctcttgctgccattgtgcctctagggcaaatagcaactcctaatatccccatttttagtctgggcttgtgaaaacacagcctaacacaccagcaaaatatgcaaaatacccaacctgcatctcagccagcctcaggtctgactttgcaaggggctgtgtctctgtttctgtccccaccagaatggtaggggtaacagtaaaaaagaaacctggggtcaagagacctgagttcaaattgtagccttggtacttactcactgtgttgccctgagccagttcctttactttctccaagtcttaatgttatcatttgttagattactataacctagatgttagccaagttcattctgtctttgaagatttaaataaaatttgctctgttccctactccccatcctatgggaaaacccaatgtccatccccaacatttctgagaattctgagggggttgtmttctcatgtttacttccaagtttcagctgaggctttagtcggagagatatgagcttcatatcccagcaatgcccatgacttcaagttgaacatcacacatcctctttctgaagcctcaccttgcctcctcagctctcactagcagtaacacatcttcccctgaccctgttgcccaaaccattttcttcccatttacctcctttcccatccctcccttctcagctcttccaccctctccccaaaagttgttcctttcttaagctgcaaaatctagccatctccttagtacstctttcttaaacctgctctgagccttgcctcccrccccaagactcttctgtaggtaagttcctaaactccaacccttccttccctgaaacaaactctgatgcagctgttttaagagtaagtttccacccactatgtggagattgtattatggagcttcatgggactactggaaggatacaatgaggagagatgtgtgaatctctctctctctcccccctctctctccctctctttctccctctgtccctgtcttctttatgccttcattcacagtctgccttccttaactggacatagtatcaaagccaattatatatttttggatctttatagaatctgtttaaaggaattttataatcactgatgctgaattttaaaarcaattcaggaaacttacatttctctctttaaaataccaattcacttcacctttaggtggcctgggattgatttcttcactctgggtcgcaggggccttaataaataaagtcctttatttctaacgtgatgatattacttggcctttccattttatcaaagtatttttaataaaagaaaggcataactaaggtgcactgaaatatgctctaaaaatgtttattccaaaaatagacccatatgctagttttcattcaactcatcggagcatgtttattccagtgataacaagctttctgattccatcagcaagaaaaagacgtttaatgcrtgaggctacctctgcatttgttatatatcacacgtgaacttgcaccccccaaggacatcttttcatggcccaaacagcyatggagagcactaggtggaataatgtatggcagctgttccagggctatccacacaggcttcacaacctttgcttggtttaacttgttctgacaaaagacaacaaaagtcccctctgtttttttggaagaagcatgattatttctaaatcattaacaacaactggactgacttcctctccccggtgtgttcatcgccactacctgtatgtatctgcagtggcaaagccctcccttcaggcagtatcacctttcaccctcagaccactggaaaagaaagggtaggagagagtacttactaggcaatgaagtggaaaaagtcagttggtctagactcttggctgaagaatttgaatctattcttggatcagccaacttcaaaagttttacatctaaggaagaaaatgtcaaggttgcattcagggtaagtgtggcctttaggtcagctacgtcctcgtgatcttaaagaggcaagtaggcttcctagaattcccatttcctgagccttaagaaaccataagctttccctccccaggagttgtataaatcgcagatgcttacgtgcttatatgaaaagtctggctcctccactcacagatgtgatctctgttccatgtctatgtgagccagggagccgagctcagtttcttgctggtttctgcaagaaatacatgcacagtatgcattttacatgctattatgagtttatggcatatttcagagtttaggagcagggttatgtgacacactgagttgccttttatacctcactgcttctacagtgatctcaaccttcctcttttatcttctgggtcattcagctcatcggagcaacccacagatctctgtattttgacatgcagtatcccatayctaggatgctactcatcttcacagctaccccaagctggctgatccagaatttccacacgggcagtcctttgagtattatcctaaagagaaattttcataaaagctactaagtggaggaaaaaaatcatctatttatccatcttggtttgaggaaccctcccccatactgcctaataatcacagcttacattaattgagtacttgctagatacagatccctatgctaagtagacattaaaattcacagccactcataacaaactggagaagctaagagatgtagccaagccattcaaactagaaagygatagagccacgatttgaatccagggagcttcaagaagaaaccccaatgcattttcgcaccttttgctacacaacataagcaaaccaaaatggtagcatccattcaggtgcagctacagcacttgaacaccaggacagtcttgagctaaaccacagaggatgtttcttattgatgagagtcatttctgagccccaaagggtcagtgggaagagaaaacatggcccccctgctttctttctcttatttcccatggctagaatatatgcagtgtcccgggctgcagagagaccctgatgatccstggcagctcaaacaccacatttgccagcacatcaccctgctgaattcacccattctgctgctgctgtagtctcacaaattagggcatccaagtgaaaggatgactctgatttaggattagaaaagcctgcaaccttccccagccctctgggcattatgagagagtgacccagaaaatcgaatgcagagaagtgtcccgaaatataggagtcttgtttgaggcgtagtagaatctatyagcttgagaaattggtctggaaatcttattaaaagagacaaatcattccacattctctccagactgaagatattggggataataggacttccctgataccttggatccatgcaccttgtgtcaggatcacagccaaactctaggaaccctaaattcagtgcaggtgataaaggcaattattttttttaatgggcagttctgattaattctggtttctctgaccaaccatagacttatttgtaccaatctctcattactgtgaaggttgcaaggcggaagagccaatggcaaagagaaatgaagttcaaattgtggatttgtcatcattgcacagctcagcagatggttgtccagccatggaggcccgtgaccagcgcccgacaagacacacacacacacacacacactcacacacactcagagctcctttctcactatgcttggttaacccccagtggagacgccaggaaagcaaggcatcattgcgttctgaagcttaaccttgcatacttatgctatttatgaggggcgataagaagaatccttcaaatttatatatcatagctattactattattatttttgttgagcactgatggattcaacaatggtatgaatcactggaatttagtaaatgcttattccatgcctggcactgtggtaagggtttatttacatgaattatgtcctttatcctcagaacaaccctataaagtaggggttgccaaactttttctgtaaagagccagataggaaatatttcaggttttgcaggctatatggtctttgttacaactacccaactctgtgggtgatgcatgaaagcaactgtggacaatacataaatgaataagtgtagctgtgtttcagcaaagctttatatgcaaaaataggcagctggctgggttggcttgtgggcaatagtatgccaactgctgctataaggtgaatattcctaagctagaacttggggtttccacagctaagaaggtgggagacatgagtttccatctcctacatccttcctgctcgctgctcttcccttctaattctagttctggaggaaggagagaatgaaggtattttcacatgtgacttctcagggtgagatggctgttcttcggccacgaagtggagagcaagcacccccttcgatgaaaaccctgcatctgtagggggtgggtcacttctgtccatctagccccctatttgcaagcctggggtagcctgaaccagacccccgctgaggagagactcaatcccaaactgctctcagaagcctcggtgggtctttctttgtgaatcttggctatatcttcagggtaacccccagatgaagggtctaacacatgacttctttgttcatgttggggtggtccccagcgagcctgcagccgcaatcttgtctcccctctgtaccccagcaatgggacctgtagacctaggcaggatccatcttgtgccccttgggaaccaggaactggagggagcatgccttgctcctctctgcagccacacaccccaccccccacctcaacattctctcctcagctaaagttatctagtggcttaacagagacaaagatacaagaaacaagatatccatctcttcttcttcttctatttttttttttttttttttttttgaaatggagtcttgctctgtttcccaggttggagtacagtggcgtgatctccacccactacaacctctgccccctgggttcaagtgattctcctgcctcagcctcctgagtagctgggattacaggtgcccaccaccatacccggctaatttttgtatttttagtggagacgggtttcaccatcttggccaagctggtctcgaactcctgacctcacgatccacccaccttggcctcccaaagtgctgggattacaggcgtaagccaccgcacccagcctccatctcttcttctcaatgacccctgaagcttaaagaataatttatggccaggtgcagtggctcacacctgtaatcccggcactttgggaggccaaggtgggtggatcacgaggtcaggagatcaagaccatcctggctaacacggtgaggctctgtctctactaaaaacacaaaataaaaataaaaaaaataaaatagccgggtgtgatggcacatgcctgtagtcacaactacttgggaggctgaggcaggagaaccacttgaacccgggaggcagaggttgcagcaagccaagatcgcaccactgcactcccgcctaggtaacagagtgagactccgtctcaaaaataataataataataattataatgattttatactaggttttctcagtctctgcactatggatatttggggccacataactctcggggggagctaatctgtgcactgcaggatgttgagtagcatcctctcctctactcactaaatgcccatagcaacccgcaggtgtgacaatcaaaatgtcttcagacattgcccagatgccctctgggaaacaaaacagtctcagactgaraaccactgtcttaaacagaaggtcaatcactgccttttgctctcagctgtaggttctaatttccaattccagataaatagaaagaatcataggcaaratctgtcagcaccatgtgacattaacttttggtgcaaagtaagcataattatccccactttacctatgagaaaactgaggcctgggctgcacagctagtgagcacctgagaccagatttggacccaaggccgcctgaggtcaaacccatatatatatatatwtwwwttttttttttttttttgagatggagtctcgctgtgtcacccaggctggagtgcagtggcgcgatctcagctcactgcaagctccgcctcccgaaacccctatattttttacactacttctgatctgatcatgaatgaacactatgaaggttttcctggaatgaggaagagcttgtgatgatttgcgtggtgaaaagaaaamtagatggtacttgccctttctttagcatgttctatctaatcctgacagcggggcttagaggtagatattattctccccattttacagatgaggaaactcaggttaagcaaacctaacaaatggtttgaaatcaacatagcaaagatttgcaagcccagtgtttctgtgctcaaagccttgatatttcaacaccagaaaaagtggatggctgctccctaaaggggaaactgagtctaatttcctacataatactctacctttctggccaatgtgtccttccagccataaaaaaagcttggtgacggctgggcacagtggctcacacctataatcctagcactctgggaggctgggacaggtggatcacccgaggtcaggagttcaagactagcctggccaacacggcgaaaccccatctttactaaaaatagccagacatggtggcaggtgcctataatcccagctacttgggaggctgaggcaggagaatcacttgaacctgggaggcagaggttgcagtgagccaaaatcgtgccaatgcactccaggctgggcaacaagagtgatgctccatctcaaaaaaaaaaaagaaaaagaaaaaaagaaaagaaaagcttgttgataaatgagactttgataccsnccccctgcctttgasctccttctgtgacctctttccttatctcagttctgtatgcagtaytggcctgagaagacctccgggwgctatgggcccatccaggtggagttygtctccgcagacatcgacgaggacatcatccacagaatattccgcatctgtaacatggcccgggtaagtacacggccgccattgcttgctgagcccctcctccccaagacagatggaggctgcygrgagaggatcccgctgagccagccaagagtctgtgttgtgctctcctgataatttcttccttgaggaagtgatgcctgtgctgattccggctccagactcagcaatgactccaacacatagagatgcaacgagcgacatccaacctgccatctgcctgtttcctgacacacttgctgccgtgtagacaaaacttcttagacattagctsttccccactgtgtctctgtactggcatgagttgatgcagcctttgattggatcccataagctttgggccaggcactgccaacacctagatgaaaagtgaytacttacttccatgaggatgttcactggctgagcagagtagtgggtgggaggggcagattagcaatctatgaaatggttgctaactaatgcagctttggtcactacttggggcccaggatgaaaggagctcagcacctcccctacccccctgctcagagttcactgtccactgagacagtgagacatgttctggcacatgagcctcagggagaaaaaactctgcccaacagagtcagggaaggctttcctaaagaaagggacatttaaattgggttttgaaggctgagcaggagtttttcaggtacaaaagggggttcagggcagtcacggcaagagaatctgtgtacacgaaggaatagaagtagtcatggggactctccccgtgaggacatggcttagatcccatttggtctgtcttccaccatgatgctgcagtccccggggtatctgcaaggtgcatgtacgcaagcatccccagcagaacagccctaacagcctctctgttctcagccacaggatggttatcgtatagtccagcacctccagtacattggctggcctgcctaccgggacacgcccccctccaagcgctctctgctcaaagtggtccgacgactggagaagtggcaggagcagtatgacgggagggagggacgtactgtggtccactgcctgtgagtaytagggaggtgtcaccagggcaatagggtggtgggtgatagagcatccttgcagatgctgctggccacatrccccagtcctaggcaggcctggctataccacaactcaacatccctcaaaggctagtggcagtacattcaaaggaattatgatcctttaatggaacggggctgccagtttgttgtcctgaactaatatatgacatattattgatgcaaaacctagtggtctttccacaaacatgagaggaggttgcctgcttctctacaatgggcttaaagggatcataggacaaaaagagcatgagggaaaggcactgccctcaggggctgatagatggatgtgaaggactctaggaacactattgtgcaggggcacagtgagctccagaccagctgtgtttatacccccattgctggggtgaactggagactttacctcctgtcttcgaatggacattgtccagtctaatgaattctggtgtcattacgctgggtggaggtcaggacctcgagaggacagtggctgacaagctgtgcaacgtcaagaaaatcactgaattttataagcctgagtttcctcgtctgttcattgggtatgtggaattagacaatcttcagaccttatagtgctttggcatgaaatagaaagtgaacacactttatctgccaacatagagaccaagaatgtcatggtagcaaatatgcaaacgtaaatgtaattacttaaaagagcaagtgtcacagaatctatcctgggagtatagagtgaccacagaggattctacaaagtctcacacccaaaacaaatctgcagccataacagctatgtgtgaaatatttgattcacactcactttgcttcttagaacttcaacgatttgaggaaaagtcattgagaaggcctctctcttttaaaatgttatgttaaaggaaatttgaacgaaggtcttctctttcttacaacaaatatttctggagctagtggaggcactgataacatctgactgacctcagaattgaggtcagtcttttcaaaaccagctaattattctccctctcaaacaggtggtgcatgcacatgttaggcaagtcaaagagcttaaaggaggttaaacacrcagacacatagagatgcacacacagagcttcagggccaccacctgcagcaaaaattcttctccagaggaagcaaacctcaggctagagttcaggaagatgctgcgtagtgtcccaagtcaggctgatgggtgacatcagccaagcccagctggctctgcccacatcccagaaactagcagctggtttcctgccagctaatagctgctgcctccagatgcccagatgcctcccacacattcaggtgaccttaccttagcacccatctttcagggtctcacaccaccaggccctgagaccctgtgtctactcacctcttccttttggacgctgttattcttgcttcagaaatgatagaaccgtctttcataggagacctttctctcctctctctctctctcatgtttgttttttagcctgcttttttttttttttttttttgcactagtgtctttttatctatgtcctttccagccaaggtggccagtagtttgagccaaaggaaggtacaggggcattcttttaccaacagggaacttggtttccttgagggcyacagacaccataacagaccttgaaatgcaggcaccagtcagtgaatggaaagcaactctctgtacttgaaacatctggtcactgcatgtcctgtagataaaacatctgggagattgactgagtgccttagtttctgtccagatgttctttagacacagaccattacatgaaatcattagttgctcttggcaacacgcccaggagttctgaatcaggcatattcctacagggactgtctgtaaagagtttgaagggtgtktccatgaagatgatttatggagtttcagaaaggagtaacagagacacagttctgccaccaaccctgtatccctagactcaagatcagtagcatcttgcttaaaccaaagtgtatagtagagacctgtcattttaagataaagcctatcaggmccagttcctccctccaagttcctacctccaagcttgggctggctgaccctaggctaacagagcattgctgtccttagtggaggatgggaagaactagtaggaaaatcacttggaaattttcattgtctttattggatgtttaagtggacccagagcattcttttggacatggatgcaagcatcagcaaggatgcaggtgtcacatgtacaaagacacagtaccatcctgcccttgsggtttgggtgagtgtgccctgagtgactgtaacatgctcatagaaccaagaaaacatcaagctaattgaactctcaaaggtcatctagtccaaccccttcattatacaagtggggaacttggggcccagacagaggaagtgacttggccaaggtcaaagcaagttaatggcacagatgggactcaaaccataactcatggctcaggctaaagccttcaccattgccttgccttgcatctgcccagacagctgatccctactcctactgatgtagctttagaatcatcaggtgcctggaagggacctaggaacatggctcacctctttgctctgtgtttagaaatgggggaggccgtagtggaaccttctgtgccatctgcagtgtgtgtgagatgatccagcagcaaaacatcattgacgtgttccacatcgtgaaaacactgcgtaacaacaaatccaacatggtggagaccctggtgagtatcccaaggactgttctccaacagccagggctgactagttcccttgacctggagaaaatgacatcaaatagtaacatcactcaacacctggctgctaattgtatacctgcattctgtgcccttggtatgcactgttgtctgtcctgtgtcttccccttccaacctccccaacttttctttcttgcaggaaaatccaattactaatcctggtacacctactttgcttcactttctgcccattccttaagacagtgtcattaattcaggcctaaaggaaaggatgctggattagtagaatgtgaagtatgttttcaattcagtccaattatattccaattaatttatggyaatttttacaatagagagcatttatagtagagagtactatggaggaargtgtgataaagagagtgtgtgggcagagccccgggtgataagacctggtaccatggtggaccacygcaccatgcacgaggagctttaatataagtctttaaacctactcgaatagtggtcttagtcaaartgaggccatattaacgtgtgggtcacagaccagcagcagcatcattatctgggagcttgttagaaatgcagaatcttgagccccactccagatttactgaatcagaatgtgcattttaaaaagatttctggctgccttgtatgcacgttacagtttgagaagccctgttgtacaaaacagtaaaaaagaaagggaatgatgccagctgggcattcgaggaagcttgggtagaagcaggcatcaagcagaattttgaaggatgtccagatatgggtaattttgagttgacataatatggatatagaaaaagttttctccaaaatctgtatctctaaactaaatgcattttccctttcctttttcatctctctcgtctcctcttctccctctctgcctctgctcctctccgcctctcaggaacagtataaatttgtrtacgaggtggcactggaatatytaagctccttttagctcaatgggatggggaacctgccggagtccagaggctgctgtgaccaagcccccttttgtgtgaatggcagtaactgggctcaggagctctgaggtggcaccctgcctgactccaaggagaagactggtggccctgtgttccacggggggctctgcaccttctgaggggtctcctgttgccgtgggagatgctgctccaaaaggcccaggcttccttttcaacctaaccagccacagccaagggcccaagcagaagtacacccacaagcaaggccttggatttctggctcccagaccacctgcttttgttctgagtttgtggatctcttggcaagccaactgtgcaggtgctggggagtgggaggctcccctgccctccttctccttaggagtggaggagatgtgtgttctgctcctctacgtcatggaaaagattgaggctcttgggggtcactgctctgctgccccctgcaacctccttcaggggcctctggcaccagacatttgcagtctggaccagtgtgaccttacgatgttccctaggccacaagagaggccccccatcctcacacctaacctgcatggggcttcgcccacaaccattctgtaccccttccccagcctgggccttgaccgtccagcattcactggccggccagctgtgtccacagcagtttttgataaaggtgttctttgcttttttgtgtggtcagtgggagggggtggaactgcagggaacttctctgctcctccttgtctttgtaaaaagggaccacctccctggggcagggcttgggctgacctgtaggatgtaacccctgtgtttctttggtggtagctttctttggaagagacaaacaagataagatttgattattttccaaagtgtatgtgaaaagaaactttcttttggagggtgtaaaatcttagtctcttatgtcaaaaagaagggggcgggggagtttgagtatgtacctctaagacaaatctctcgggccttttattttttcctggcaatgtccttaaaagctcccaccctgggacagcatgccactgagcaaggagagatgggtgagcctgaagatggtccctttggtttctggggcaaatagagcaccagctttgtgcataatttggatgtccaaatttgaactccttcctaaagaaacccagcagccaccttgaaaaaggccattgtggagcccattatactttgatttaaaataggccaagagaatcaggcctggagatctagggtcttgtccaaagtgtgagtgagtcaatgagagggaaccaacatttgctaagtctctactgtatgccagggatcatgcttggcactttccataggacatttcacacagtccttagaacccccaggagagagctactgacttgttatcatctccatttgatcatctcctccaatgaggaaacccacgcaccttccttagtaatgaaatcctgggttccaaaggggcaggtaatggcaatgagacttctccgtgctgttttcttcatcttctctaagccaagcaattattttatggagggaaaataaggccagaaacttctgagcagrtaactccacaaatggaaatttagtactttcttcctgatgccagttcttctgggaagcrcagaatttcagatatattttagtaacacattcccagctccccaggaaagccagtctcatctaatttcttagtcagtaaaaacaattccctgttccttcaggctatgaatggaccagccagggaaactctcgaccttgatctctagccagtgcttaggcccaatatctgayagcctcaggtgggctgggacctaggaagctccatcttgaaggctggtctagccccagacagggcatgaggggcagagaattcaagaaggtacagctttggccctcaagagcccactgtatgctggggaaatggaaccatggtgcagtagtgtggagtggatgagtgttccatgagcctaggagcaagaaagtctcttcggcctcgggcttcctggagaaggggacgtccattcctgctgggtcttaacaagcataaaaaggaaaaaaaggaaactcaggcaaagggatccatatgtgcaatggcaaagaaatgtgaaaaggcattgggagaagcagtctgggggaggccagcccagtgcgggcacagcacaacacggggagcagcaagagatgagccagggtccaggagacagatgcccatcgcgagtacagactttgtcctattggcaacaaggagtccatggagctttagagagaygcactcagcttcgtgttggccaagactccttctgggccaatggggctgcctcttttcctttcatcagacactgtgaaaacattcccttaagcgtgcactttttaatatcacatctatttgtctgtctgctcattgttttgttgctggaactaaatatgcaatggatcatgagactcagattctatgagaaacccagggtctctgctttaccacggagcagggtcaccaacccagatctccaggcccatgaggatggaacatgaaaggagccgacaaaagttgcttccattggcatgggctctggagctgtccagaagtccagggacaccagacttgatcaaggaagggctgtcactttagaggttcaaaaggaagtgcctcaaagcaaaggcaagcaaaggaaccccacgatgaacttgctcttttcctttgatgagcctctccccaggtgtatttcagcagaccccggggacccacccccactgggcctgctggcctccctcggctccagcccaatgccccagctggccttccccagcctgcaaggagcctgtagcatggcaaatctgcctgctgtatgctattttcttagatcttggtacatccagacaggatgagggtggagggagagctatttaacacaaatcctaagatttttttctgctcaggaaggggtgaaatagctggcagatacaaaagacagtggcttttatcattttaaatggtaggaatttaargtgtgacttcagggagaaacaaacttgcaaaaaaaaaaaaaaaatctcaggccatgttggggtaacccagcaagggccagtgatgatttcccccagytcatccccttattttcccacaacccaaccattctctaaagcaggncagtgaataggtcttaggccagtgcacacaggaagaaattgaggcttatggatggggatgrcttccctaagatcccatgggacaaggatgtggcaaggcttggatgagatggggcaccrgtgcccaggaatttgaacattttcctttacccaggaaatctccggagccaacaccaccacccccagggggtctccccaccccaccccatttacagggtgagctcagcctgtcatgagcagaggaaaatattattaatgctctctgagtctttacaacaggagctcttacctcatagatgtgggctctgtttggggaagatgcaaggaagtaatgagaagcccaggaaatttctccacctgtgtttatggcctaaatagcttcaggatgtatcttagctgcactccaacattgcatcctttctggggtgaagaatctgggccaaccaggggtccttgggcctctagaaggccacagtaggcctctctttgtgggaatggaaggggacagtttgcttttagtgctggccctctctgtgggtgtggcctgcaaaggaaccaacagaccctatgctggggactctaacatgtgagctcattaaattcttccagcattctaaaggagggtttgtgattgtcaccatttactgatgaggaaactaaggctcctaggggagaaatcacttgcccacagttccacagctagtgagtgaatgaaccaggatttaaaccggttttttctcactacagagacaatatttttccaccattgtatctcacatttttcccaggaggttacccataacagaagagactagagtggaacagatacgtcagtggataaagctcaaagcaaacaacagtaagcttaaaattccttcatagtctcatgttttacgttcacaattcatgcaaaatttgcattccactttctgatttagccttgttggttttaatatgactctatgaatatttcaaaaaaaaatgtgctctgttcctcatgttgttctgttctgttcaccccgctatgacggaccctaggtcagctggtcttcagcttgaccctagaattgactctaggagcagtgaccctgctgcctcccagagccagttataggctcaagatcaagaccaactgaccttctcctaggcagctcctttggtgtgtgggtgctctgacctcactgttcatgaggggacctcaactaaggcatcttccagttgggtgctggaaggaacccattaactcacactagaatgatgaggatttgctcatctggcgtggagaaggatgagcccacaaaaccctaaagggaaaagagaagctggacacagctgtactcagcagattcctgaatgctaggctggaaagtggtgcctgttgtccaagtggagtcacatggttgctaatgtgggcaagtctgaggacacacttcatgagcagctggggtctggaaggctcctcactttaccctagccacacataattactgggtgcctacagcacctagyaccttggagggggcactattaggaaatcgagattactatggcacaattaattcctgggtaaggcatggggttgtggtggacagagctcagtctttagtttgaacgaaaacatacatacatgaaaaacatacatgaaaaaaggaccctcatcaacattagaaggggtagatttggagcactttaggcaggaaaacaggaacgcaaggccaggaaactggaacccagtgaatactcagaaccgaggatgcagatgacttatttagcaaaatggtcacttctgtgacatagctggagaaaggatgggtaacagcttgccagagccacttggaacaagggcaaatctcagtgtctggggcaaaagatgatgcatttccctctgacccatcatgtttattcatcctccactccccattgccacactagctcttgctgtaagtcctcaccaggatctacatttcctcgtcgctggtgggaaccccttagagtacatagaggtatcagtccagtaagactgctctacacaacagaagtgaggcccagggagtagcagccaggcccttatcctgttacctctgcaggagtgactgcccaacccagatccagagacattgaaggaaatgataattccttggtacctcactgccttgggacaaaatgaagaaagccacccttccttaggctgcagcttgccactcctgggctgggtaaacaggtcatcagcaccargctcaaccaggagtaacaytctggaagacatgggtgagcccaagaggaagcatgaacaggacgctgttcctaagtcatgtcaacaggttgtgctgggccaggatccccagggaaaaaaatggtcaacccaactggagggtaggttagaagaaaaaaaacataaacgtggatagtcatgtcatctcaaatccctgacttggcttccccattacttracagtctgagctccttcttagcctgtgaccagcttcaaatcacagccaagtaaaacaaggaaataggaaaagtaaatccaactagaagagacaagctgagattcagatttgtttactcctcccatgcaaagtttccctgttggaggttttccatgtatacatgtctagaagtgatagaatgcaaggccttggctttgtcttgcagggatctgcctttgaggtcatagactgaacagcagggagagaggttagtggtggagtgtggggggagctgttctagctccagtttcttctgacacatttttcaggatcatggatctgatcctccgaagcacagcagagatatctaagccatatttgtgcacatgagcagactcttctagttttttagtaaccagggatgggcttttgcatggcactgactatagagatgtcttgtagagatcaagccagtcttttgcatcccacctgcccacctccagaagagatgggaaaaggtcatcaaagggcattcaccaactgaaatccactcatgaatgttaggtctctaaaaggaggcatcaacactcacaatggtagcctccaaacctagcatcccacctatctaagagctcaggggtggtccactggggcagatacaagggaagtgcaagggctcaggatgaaagaaaatctattgggaagagttttaggggcttgatcattatggggcttccttctatatctgagaactgctctgggtggtgagatgtggactctgatccttaattggaatgttcrgagaatgagtgtctggtggccttgaagtgttggacagaaaagtatcagtataaaagcctggagctcagggtaattaatgtagttcatggttccttagtgagcaggactcttggatgtggaggagaaagggtcataggaagtaaaccaccaaaattacaaaattgagtctctgtacaattacttcagtgcctttgggcttatgaatacaaatcagtgggccttctctatgatggtccaacaaactctcagtgtccaccctgtccctgtatctcccatggaagatgaataatgtcaggtgttctttgggtcaaaggycccagggcagtctggaggcttagagggcagagtggtgtcattccatgtaaagttaggcttctgaggggtcaggcagaatatggtgtccatatcttccatagctctgcagattcttggatgaagtcaagcayagtttgctagacccaggtcactcctctgagtataactaggacccatgagtgaaacttaatagctgtaaggaagaacctgctgtctgccagagaggataagctgcccatctcagcagctgtctaaaagaaggcaggtgtctctttaaagggaagagaagcattggtgaaatggatttcaggtcacttccattccagatgggtgagatcttgtggagctgggatcatgtttgaactcattcatacctgtagagcacgaatccaagtagattgtgtttggtctgtacaggctgaagccccctgctctcccacccaagtgcccccactgagcaggccaacatgctgttgtggccacatatactgggctgatccaggctggttatcaccaaacagcaaaccatagggaacagctgctttgccatagacccaatacccatgtagatctctcatgagagcagccataactcagacccactgaccaacagggccatgagtgacagccagaaccagtgaaggtccaagtaggacacagagcagggcttttcttaccatacacattatctccagaggttatttctaccccactccctattcaaggcctgttggagcacaytgcaaaagcaaaagcacagtaactcaatttacacatgattataatcatttccagtgcacacatttcatcaccaggtggatcctgagctagcccatgtaaatccgggttaacccatattggtaatcatactcaaaagcacttttcaccctacattctactagccaatcaaagacaaagagttgtggcctctaccattgccttggcttctggacaccctcacaagctatcccaaggttcccgctcaactccagggaggctgacatcttcacatccactgggcatataatattgcatgagaccaaagtctccacactctttgcagcctcctccatgaatcccaatggcctgcacttgtacagtttgggtgtttgatagataaagcacgtatgagaagagaaaacaaaataaatcaactttttaaaaaagccagcactgtgctgtcaatgttttttttttcttttcaattctagctcagaaaagcagaaggtaaataatgtcaggtcaatgaatatcagatatattttttgactgtacattacagtgaagtgtaatctttttacacctgcaagtccatcttatttattcttgtaaatgttccctgacaatgtttgtaayatggctgtgttaaaaaatctatacaataaagctgtgaccctgagattcatgttttcctaagatattcgtactggtgtcttcctgaggttgggtagggatgaggtggggacaagttgaaggaggaggagaaaaaattatcagctaggtttctttatatttaagttaatccttacatcacaggaaatacatattattccctctttgcagacgaaaaagttgaggctcagaaacatcaagggattttccatgactgcacattgagctagtaaaagggttgagtgtaaagtggtgtttctcaagtgtggttcatagagcagtggcatgagaatcactgggaactttgttaaacatacagattcctaagcccagagaatcacaatttcagggtctgccttggtaacgagctgcctaaatgtatcagctagctatggctgcataataaacaacccaaaactcagtaacttgaaagaaaaatatttgatagcagccagctaagactctctgatctaagctgagctcagctaatctcagctaggctcattcatgtgttggctaagggctctattctaggcaaggcttggctggggcacatgagctgttacagccttgcgccttattttttcatcctcctcctgggaccaacaaggtagcctgtgcatatgctcctcatgataatagcaggagcatgagagagagaaagtccaatcacatatatattttgctaggcctttgcttgaatcatatctgcaacatccccttggacagagctagttacatggaatactcagaatcaaggggcagggattctacttcttgacatagacccctcctctcaattttccagtaaatgctgaagttggccaggcatggtggcttacacctgttatctcagcactttggaagaccaaagtgggagatcacttaggcccaggagttcaagaccagcctgggcaacataatgagaccttatctccacaaaaagttcaaacaaattagccaggcatggtggcacacacctgtagtcccagttactcaggaggctgaggtgagtggattgcctgagcctaggaagttgaggctgcagcaagctgagactgcgccactgcagtccaccctgggcaacagagtgatatcctgtctcaaaaataaaataaaataaaataaaataaaacactgctgagcttaggtatgaaaccagtggttcctgatgcacccgttaactctctaatctcagagtgcaatccatgggtcacccacaccattacaccagggaaacttctcaacgtgtagagcctgattcaataggtccaggataggagctaggattctatatgttcagcaagtgccccaggtgattataatacatgctaaaattaggcaagcactgtttttaatgctgttgttattagaggggaacagatatgagcccaaaaggaactgggacaaaccagtactcaaactgggacatgaggctgccaacctctcagttggatgcatatgtcctctattttcttctggatgagcagaagaaataactagaacctgactycttggagtttactagttcccaagttctttgtatgtgtccagatataagcctgagctggaaacacaagccgcaggggtggagcgcagggttcaccttgttctcttgcagtcttgggaaccctggcagggttcttctgcctgaggaacctagatacatggctcactaggcctcccaggccacagagtctagagaacatgtgattcccagcttgggtatgacatggggaacctggtgtccagccggctagttatcttgtcactttgtccttggtcatgttaatctcacgtagtctgcctgctacatttatgctttggccacaaatgtaatacgacactggagaaagaaaattagaaagaaggaaaaaaatctcacataactcccactttaaaaaaaaatatttgggggcatatcatctttccccaaaatggaaattgcttttaaagtgttatgataaaagtagcacatactcacttgaaaggactcaatataaaattatttaaggcaaaaggtgaaagttcccacttctcaaaggtacctgttaacatttttatgccattccagacctttctatgcataaacwtattctacgtaagtggcatcaaccagtatatactctgagacctgcttcttctcacttaacagcatacagttgtcatatttccatggaaatatgcttaaatatctcttatcttccttgacacctccatagtacccctgaacttgaagctaagctattttgggtgcttcaagtcttgggttctcacagtgatgctaaggatcaacgttagcagagagggacatcccaccctatgtgctgctgtcctggagagagactgatgatactggcacagctctctttatgtgtctgttggctgtccaggtggatcctagcctggccttcctgtgtggctagacctggagtgtgagcgcatgtcagacctaggagcaccttgattggtagctctggtttgacttaagatctttctttaattccaaaggctcaagccttccatcagaactccagggaacctagaagccctcagattcctggagacaagggatgaggtcaacaacataccatgcagaaggcaagaagagggatttgattccctctgacagggtttgggggtggcaaggagaaaagaacaggaatagaagcagaagcagctggtgagataagagaaagaaaccactctagttaatttcagaaaacttttgaccacttaatctttaggatatgcaacgagactcaacaaaggcttggcctgagtggctttctcttgaaatttaatgacaggactgagcctggactcatcattgacattcagtagagacatggcacccacagggagatgatactcacaaactgaacaactggagacagagaaaagcatgggattataaccccctggaaattaacataaactgaggaggtcatcagttctcccactctattgaataggcattggaacaaaatttaactagttattcaaggacatttggaatacatgaatagatagagacatatacagagaattacagatgcatagagaaaataaattgaatatataaatgtatgaaaaacaacatcagtatattaacagtggttatctttcatcatagggaacacaagtaatttttgttctttataattttctacattttataaatgttatattactttaatacccggaaaggccaattatataaaaagaagaggtgagaagaacataggaaaatccaggcagaacagataagatgatgccaggaacagggtcataccccaagacctgccatatacctggatcaagaggtttgaaaatgtggcactgcccatctcccacaaaaggggaacacagtcagttagtcaatgtccaaaagggaaaaaaaaatctcttgctcagaataactaaaaaacattcctgctatagagcctagaagaaatttttttcatgagtccccttaataaataatggcttcaacaacatccttcgctgacacaatggattcccctccctgaagactcatggcctcatgccatagaacaattcagtgaaagctcttcactgaaggaccaaaatgaaggggcccagctacatggttctctgcaagtcagacctaagccagatgtaggktttcagaatctttagtattatataaacaagttttctctcctctctgagtgtccatgagctggaggcttttagcccagaaccagtgaaatagctattctgagttgttgattgaatttggagtccgagtttaagagccagctgagccagaaagagaattagtatctccttttgaatgatgaagagcctaacagatacatgtgctgagatagaagatgaatctgtttctctattaaggcgaggcatggcagggccaagaagtaaacccctgctccgggttataatgaggactgactccatcccatcccactttcctttaaaatccctacaaatatgtagtcaaagctggaaacatgggaccacacctggcrgccaagctattgtgtgaatccgggaggaatttcctctgattacaagacacaagaagctgaaatgagaatcgtaatcagtggttgatgctgaatcatgttttgctgcctaaaagatgcaaagaagcctcagagaagataaagtggctcatcccgcccaggtgcctgctccagatggtctgtactcactcagaaaattggtcaatcgtccatttctatctcctgggagatgaaatgacattaagaaaaacttgtatgggcaggaaaacagcagagagaatcttgaagaaatgtatgctgaggattttggctttcaaatccatttgaagcaccccagagagaggaagggagtggtaagagcaccttgttggcatacaaaactgggtaaaacagatgcctcttgtgtaccacttcaaatattctcagcctaaccgcttatgtcatccacggccatgggaacaatttccaagcatgcttcttcagatttcatatatgggaagtccatggtgcctttcctcagacaggctctgcagctcttgtttcctgtgccacaatttctggtactattctctgagatgcccacaggaacccacttagcacttgtgagtgtgctacccagaaatgcagggaagttaacaatgaaatcgttgactgataggggcctggaggctgtgaacaaatgcttcctcctctctttcctctgaaggcagttcttaagtgtatttcatgcgacttttcaaatggtcccagaacaagcagaccctgtaagagtagccaactctataacacaccttgtaatacctctttctcgttccttccctgacttacaactcctattctcattgcttcctggaatcatatttccaaaaaaaatttcgtttaaggttttgctttcaggggaacactagctgggaaactgggcttcagctatgcacaatagcctatcatccagctgttaatctgagatgggattctgccaacacccatagagggccgccagatgtccaaccaggcttttgatctagggataaaaaatggacttgatgtaaagtgattcatgggagaagttctactcatgtcctaagctcatcctatgtgtcaagatattaatttcctgctcaggtttgggaacaggagtcctgccatctcatatttttgttgaaaatacttggtgagcctacccaatagacagtaagaaggatggtaaggggtcctgttttactaaaatcccactgagagccctagcatagggtgcaagagcaagagggtggttgaccagtggggtggagagtatgtggatctgggatccatgcatgcagagtaagcagcttgcagcaatgcttacgcccagcctatccttggcagaacatggctcctgacaaaccatgtaggcagctagctcctaatggagaaaattgtgacaggaaaacagatgggggcgtgcgttccagccaacactaaatgccgatacaaacctctcccagggttgatgaagctccttgtactagctccccgtaccagctctgcctaagctctctgccctcacaggctgtcaaatttctggcctgctaaagaaaaataacagcacatctcaactatcccttcccttttctggcccctccatgatgctctctggcagcccagaccccaactctgagcaagctcacaccttcgcttgtaagggtgaacaaacaggaaaacatcaccagacacatgaaaagatgcaggagttcaaaagcagaggttcactttgaggaatgagagaatgtgcctgcctgtgaaatcaggtctctgccaaaaaaaagaaagacattttacaatgaatctccacagatgcagaaaaacactagattttctaaacacaagaaattttttgttgttgtatccaacaaaacaaattgctgagaagtctaatcgagagaaaacacaaataaccaaaattaggagacagaaaggggatataatagtgaatatagaaattatacataattataaaaggatatcataaacaatcat

SEQ ID NO: 94131 - DNA, 365331 bp, Homo sapiens
gttgagataaggactaaaatatgccctggtctcctgcagtaccctcaggcttactaggattgggaaaccctgccctggtaaatttgaggtcagactggttctctgctcttgaatcctgttttctgttgtttaagatatttatcaagacaatatgtgcacagctgaacatagaaccttatcaggagtttttgattttgccctttgccttgtggtctttgctttgccctttgcctcgtgatatttattggcctagaagcatatgatctttgttctcctttttgccctttgaagcatgtgatctttgtgacctactccctgttcatacaccccctccccttttgaagtccttaataaaaacctgctggttttgcggctcaggtgggcatcatggacctaccggtatgtgatgtcgcccctggcggcccagctgtaaaattcctctctttgtactctttctctttatttctcagactggccgacacttagggaaaatagaaagcaccttcattgaaatactgggggtgggttcccccgatactccaaattttgttcacaggagtataccttactcaattattaaagggtgtaaatagttcaaagtaagtttccttgactctgaaaaataagggtcagcaatattctaagcaaaagtcaaaaagattgcttcagctttctgagttcagtcaatttagttcttgatttgcttgatattcatgaacatttcagctctttgtgagtcttgtacatttttccttttgttacaatctccaaagtcatcagaaattggtatttgagagcacctgttaacgttctatagctcattataaatcatcttttgaaaaggattaaaacaagacaacaattgtctgtgaataacaaaatgtccagggtagttacagttagaaacacaattgacaaagaagtttggttatctcagacattagaattttagaaatcccatacaattttggaacatatattagtattattcacaataatataacctaaagaaaactgggccgggtgcagtggctcatgcctgtaatcccagcactttgggaggctgaggagggtagatcgcctgaggtcaggagttcaagaccagcctggccaaaatggcaaaaccctgtctctactaaaatacaaaaaaattagctgggcatggtggtgggtgcctataatctcagctacttgggaggctgaggcaggaaaatcacttgaacctaggaggcggaggttgcagtaagctgagatcgtgtcactgcactccagcctggttacagagtgagactctgtctcaaaaaaaaaaaaaaaaaaaaaagaaaagaaaaaaagaaaactgaacattattttggcaatcccacatacctaaacatgtcaactaatcctgtttatatttctcttctggacactctagggtccttctggagcctctgaaaagccaggtgtcaggaaagacaattttgaaactgaagtttgatttttgggaagcctgttaaatatgttagtggtttaaaacacttgatgttatgaaatagaattccagatttccataaattatttattttgccaaaattactcagaaattttaaagaagcaaaaactttttataaccctttacaaattttgctaaagtgcagattagtgccttaagaaaactttgttgtgcttttatttcaatgctcaatttacttttgaatttagccaatgttcacacacagcatttcttttgcaagattaattttaaccttccagaacttgtttaaacctttagctttatcttacctaatttaaaacaattccctaaccctaggcaaaaatttacatttccatgccttccattaccttttactaaaaaacacattttactgttcttacacaccttgcatgtaaatctattttcagtagtttcaattatacattataatggtaactcctagcaattttaactttaatgtaaaacctggtaagttgttttaattgtgtgccaggtgcagcgaagttttgactccttccagcataattaatgacatggttagttccatatgtccccaggccttatcaattgtgaagccagcaagtcagatagttctcaaaactcaaaaagcagtttataacattaaaacatttagcaagactagtacctaacctgcataatttagtccacctatttacattttgatgacatctgttttttaccaataatctttaaggctgtttttatttctcaaagattaaagtcacatgaactgaaaggtaccacatcttttaccttccctttaaaaaatatatgatctaagcacttgtcttcctttaggccaattagagttttttttttttttttttttttttttgagacagagtcttgttctgttggccaggctggagtgcagtggtacaatctcagctcaatgcaacctctgcctcctgggttcaagggattctcctgcctcagcctcccaaatagctgggactacaggcacgtcaccacacctggctaatttttgtatttttagtagagacagggtttcaccatgttggccaagctggtctcaatctcttgactctcaaatgatctgcctgccttggcctcccaaagtgctgggattacaggcatgagccaccacacctggccttagagctccttttttttttttttttttgagatggagttttgctcctgctgcccacgctggagtgcaatctccacctcccaggtttaagtgattctcctgcctcagcctcccaagtagctgggattacaggcatgtgccaccatgcctggctaattctgtatttttagtagagatggggtttctccaagttggtcaggctggtcttgaactctcgacctcaggtgatctgcctgactcagcctcccaatgtgctgggattacaggtgtgagccaccgtgcctggcctttgagctcttttcatagacatcatgtacacaacatatatatagctacacagacaggcagaagaaaaccagtccccataagatcctttttcacaaccaaactttaaggagaatataaacagggatccttatcattcctagcctagtgaaaaagaaaaaaaacatctggtttaaaagttaactgttgatggggtgaagaaaaaaggatgcctgggggaataaaccttttattcttaggcaaatggttcctctaccagggagagaagcttatcagatggagttgagccttggccagggaaggggaagatgctgtggacatgtggcattccccagccccagctgggaggggagagggaatgaggagctgcgacttgcctatccttcccaaaaaacgaaggcaaaggccatggaaaggcccctgaccccagggagcgatgggagtgggggcatggtttccctaccctcagaagtccacgcatgaaaaggcttagaaatgacagtgaaaagttttgagtccccgtgtcactcaaccgcttctcaagccccacattgggtgccaaagctgttgtacgactttctccttagttcagctaagagctgggtcctggtcacatggccatgaaatattaggctcacagatgccttgaagggtgagaatggaatttattgggcaaaaagaaaaaaagggaaacagagactctccccaaagccagagtgcttcctgcctggtagactgaatcccaggttccacctaggaaaaggaggggccaggctcctccccactgcaaatggcgcaaatttcccaaggctccaccacagggtgcattcctcccagtgctcaggtcaaaaggagattctgccaaggaatccttcccacctggctgtcttaccagcactttgggaggctgaggtgggagggctgcttgcaggagttccagacgaaaaaagtataaaaaagttagtggggtgtgggggcctgcacctgtagtcccagctccttgggggctgaggtgagaggattgcttgagcttgggaggttgaggctccagtaaggctgccctgatcatgcccactgcactctagcctgggtgagaaagtgagaccctgtctgcaaaaacaaaagatttatctacatatcaaagtgaagaggaaggattaataaatataggtttttctcaaggaaaagtcctaggaaaagggaagacagataagatctctctcttttgccaaaagagaacgttcaatcttattttttacatgtacacactcttccttatgggcaaaatggatgtttgatgaaagactcaccaatgaagagaatctacatctgataaagaggagatcaagacatatctgggagggtgtcaggggttccaggaagcgggggaggaatcatgttggtctgtctgtgagcatctatttttcttctcacagagtagtagaaacttgggactaggagcaatataggcagaaacacacatcaggcaaggcattcctgacaggcagagagaaactgcctgctcatcgggatgccactctcctactctactctctattgtggacaaaaggtagccacagggtcctcccaattctgtggcaatgagtatggagagggcataactggatagcagaataaaaatccagtgcacattgctgccttacagccaataacagttgctcgccagtggtatgaagcttctgtgtgcctaggactgagctactgggtatagcgtgtgtgggaaggggagtcaccaaggggagtcatccccagaaggggaaggtaagatactcttccaggatcaggctcacctttcccatccttggagggggtctggggatggaaggtttttaccactttgggcatggtacacactctatcagcagaaaagggaattcatcggagattatttgggtagactgatggccttaaaggaaactgggtattatcttgttctgtcaggggaggagtttacaccttcactaacagttctgagcagatgcaacagcaggacagaccagaagtgtgacctaactcaggctgcctcagagagattgctgttggactgcctctattgatgggactcttactgagggggtccaggcattcagggggttgagcgtcccagaaagttccccaccgacgctttaaaaatgtattccctgcagccttacgttcttgcagttccaatatagcattggtgtttaaagccaaactacattataattgattcgccatcatccagctttatatttaacactttaatctggtaacaaaggaaaggctcgttaaaggacggcatttataaaaatttttcaagcacctctgcttaactcgaagggaaaataaaaggcactgtttatttggtaggccaaggagaacaacgccacgaagaggttctccactgatcaattcctacctttgtcaattataccacattaattagtaactttttttggagacatggaccctctcaaactccccagtatgctttgaaactttgatccagaaatgtacaaacaaaactctaagtgttctggaattaatttcagaagcttcatagatcctcgtaagtactcaccaaaagaaaaattccccatttctggtactccaatctcatgtccttagaattctcctaagacttgttcccttgaacaactttccctaattgcaaatcaaacctagatccggctgggacgccaagcttgagctgtggtaacgctcagaaggcctcttttcatcagtaaaatagatgccttaacggaagtggcgggcaatctacgcatggaaaggcgcttggcttccctcttttttgggtttctctaggttgtctggatgggaaaaaaatacacgcttcgtcctgcggagttcggtacgagggcaattgcacatgcgcaaaggcgaaccagtagcgtccgggcgcgtccgtggagcgggacggggcggggcggggcggtgccgagtggggcgagagaaggcccgctcctcccattcgtcgcgtccttaactctttgctatccttccgctgagcttcctcttctttccctctgacctcggaaagggggcggggctttcgggggcggaagttgcggtgcattgtgggttctcctggagctgtggagttgatcctgaatgaaagtggcgcgccgcccctgacgttacccggatcggagaggttggaattcagattacggctgcgattcgggtgtctcggaccccggtgtgcaccggaccacggggaggcggctccaaaggcgcggtgaacgttggtgagggagggcagctctgcgcagccccaagasatggctcacaacaagatcccgccgcggtggctgaactgtccccggcgcggccagccggtggcaggtaacctggactggggggcgttcgaatccccacactccaacgtgcccgggggtgggccgactgaggagctcagcttttggtggttctgtgcccattagtggtatttcaggagcgggatatgctccgtcggattacgcttcgtggatgaatgggaacatgaacgggaggggatggtcggcggatggggggcacttgttactattcctgcaaggctaactgtgcgaatgtgaaggtagacaggaggttggtggcaggaggtgaggatccaggaatacagtgggcgtactttgagtcttagtagtttgcgaacctgttagggttcaaccttcccctcgaaagaagggatgaatatcagtattgagatggaggagggttaaggagggaaggggcggttcccagcggtgaaatggggtcacattgagactgggaatctggagggtgtttttgttagttttttatttttattttcttgtgagacagggtctcttgctcgggctggggatcctcccacctcagcctcccaagtagctgggactacatgctcctgccaccgcacccggctaatttttttatttattaaagtatatatatatttataatgtatatatttgagacatagtctctctctgtcgtccaggctggagtgcagtggcgtgatctcggctcactgcctcagcctcccaagtagctgggattacaggcgcgtgccaccacacccggctaatttttgtttttagtagagacagggtttcatcgtgttgaccaggctggtctccaacgcctggcctcaagtgatccgcccgcctcggcctcccaaagtgctgggattacagccgtgagccactgtgcctggccataatttttttgtttattttttgtggagacagggtttcactgtgttgcccaggctggtcttgaactcgtggactcaagcgatgctcccacttcggcctcccaaagtgttgggattataggcgagagccaccccgcttggccgggtttttgttttttttaattatttttcttgtagtttttttcatctttattgagcttgaatacaataagctttaaagcgtacagtttgataaattttgactgtatatacacaaatatatctctttcctaggaaacaaccatgaaacccctcaaagtttcctcttgcccctttttaaatccctccttcgcctggcagccactgatctgctttctgtaattatagattggtttgcattttctagaaatttttaaataaatggaaacatatagtgagtactcttcttggggtggaaggaagtgtgtgtggcttttttcactcagcataattaatttgatactcatccagattatgcatgtatcaatagtttattccttttttattgcagagtagtagtttattgttctgggtataccacaatttgtttacctgttcatctattgatggtcatttgggttatttccagtttttagctattacaaataaacctgctgtgaacattcatgtacaattctttgtgtggacatatactttcatttctcttgtgtaagtctctaggagaggaatggctgcatcatatggtaggtgtatgttttaagaattttaagaaactgccaacctcttttccaaagtggtaacacttgatagtcccaccatcaatgtattatacagaagaaattcaaaggacttaaaaactagcaaaaaatttggacacttcacaaaataagttatatgaatagccaaaaagctatgatggcgtggtggtatgtgcctgtaatcccagctactcgggaggccgaggcaggggaatcacttgaacccaggagacggaggttgcagtgagctgagattgcaccactgcactccagcatgggtgacagagtgagactccatctcaaaaaaaaaaaaaagtaatttgtacttatcgtgtaatttattagtaagggttctctagagggacagaactaataggaaatatatgtacatatatatatatacacacacacacatacatacacacacacacatacagacgtaaaggggagtttattaactgttaactcacacgatcacaaggtcccacaataggttgtcagcaaactgaggagcaaggagagtcagtctgagtcccaaaatggaagaacttggaatccagtgtttgagggcaggaagcgtccaccacaggacaaagatgtaggctgggaggctaagccggtcaagtcttttcacatttttctgcctgctttatattctagccatgctggcagctgattagatggtgcccacccagattaagggtgggtttgcttttcccagcccactgattcaaatgttaatctcctttgcaacaccctctacacccaggatcaatattttgcatccttcaatccaatcgagttgacactcagtattaaccatcacagtaatttctttgatattttgcatattgaggaaaatgttatggctgctcaaacttatatgttgtaaatgttaggattcactttactagtactagaagttcataattttcctgaatcagaaagaaaatggtactaactacatataatttgtttctctgtgaagtcactttctctgatgaaaccagacttgcaatgagagagagctcttggagacagggccaagctttattttctgaagaactgttttttcctccttctgagttaatagatttcaggtgaatacttggaagaaaacaaacttataatttcttttcctttttcctttttttcttttcttttcttttcttttttgtatttttagtagagatggggtttcaccatgttggccaggctggtctccaactgctgacctcgggtgatccgcctgccttggcctcccaaagtgttggcattacaggtgtgagctaccgcacccagccctccctagtttcttaaagatatatcattcaacataaaattatttcatatctgctatgtaaagagcttactaggaactgtgggaatgtaaatatgagacacagccaggtgcattggcacatacttgtggtcccaggtactcaggatagtgtgatggtgatagtgatggtgattttgaagtcattttatttagcaaatatttaaatgtctactttgtgctagtcctgggtgctagggagatggctaagatatattacccttaaaaagcagagtctcatgggagtagcaaaccatccattttaagcacagttctgttgtaaaaaatgtagcaatgactctattgtggtatatgatgggaatcagaggtaataaacctaattctttgaggttgaggaagaagagatgggaaggaagaaggagatcaggtgagacttcccagagaaggtcatacatgaattatcttcagtaaatagaagttttctagataaatagttggcagggggtgttattgaaagtttctgttaggataggatgatgatgggagagataatagactgaaaaagtgtctttgttctggaagatgtaagtgaggttaagaggttggagaatagcctgatcatacaggcaagtagggtgtgataaggtatcctaatatttatatgctttaaattttcagtggcatacaattgcagttttttttttcagcatcgagatgagattatttgaatccaagttaaaagcttactttgacttttctgtgtttaatgaattgatggagaaaagagtggaaatggagagactaattaggaacttgttgtagtccaggtgaaagacaatagtgatagtttaaaagtgacagatgaagagtagaaggctaatttgagagatattaagaagggaaaatggacagaacttgatgtcgtatttagaatgagggaaagagggtcaaaatttagtctcaaatgtctggcttatgcacatgagatagttgatattattagggcttactgagagagaagcaggttggaggagatattaagatcctgattgctcaaatagagatctttagtaaagatctttttaaaaaacatttttatgttatttcagtagtttttgggggacaggtggtttttggttacatggataagtacttcagtgatgatttctgagattttggtgcacctgtcactcaaggagtgtacactgtagtagtcttttatccctcatcccccctctccacacttccccctgagtacccaaagtccattatatcattgttatgtctttgcattctcatagcttagctcccacttacaagtgagaacacaggatatttgggtttccattcctgagttacttcacttagaatgatggggtccaactccatctaggttgccatgaatgccattatttcattcctttttatggctgagtagtattccatggtatatatacatatcacattttctttatccactcattggttcttgggcatttaagctggttccacatttttgcaattgcaaattgtgctgctgtaaacatgcctgtgcaagtggctttttcagataatgacttattttcttctgggtagatacccagtagtgggattgctggatcaaatgrtagttcttctagttcttcaaggaatcaccatactgttttccmtagtggttgtaataatttacattcccaccagcagtgtaaaagtgttaccttttccccacattcatgccaacatctaatattttttgatattttaattatggccattcttgcaggagtaaggtggtatctcattgtagttttaatttgcatttccttgatagtgatgttgaacatttttcatatgcttcttggccaactgtatatcttcttttgtctgttcatgtcctttgtccactttttgatgggattatttgtttttttcttgctcatttgtttcagttccttgtagattctggatattagttctttgtcagatgcatagtttgcgaagattttctcccactctgtgggttgtctgtttactctgctgattatttcttttgctgtgcagaagctttttagtttaattaggttccatctatttatttttgtttttgttgcatttgcttttgggttcttggtcacgaactctgcctaagtcaatgtctagaagagttttttccaatgttatcttctagaatttttatggtttcagatcttacttaagtttgagttgatccatctccagttgactttgtataaggtgagagatgagtttcattcttctacgcgtagcttgttagttatcccaggaccatttgttgaatagggtgtcctttccccactttatgcttttgtttgctttgtcaaagatcagttggctgtaagtgtttggctttctttctgggttctctattctgttccatgggtctgtgtgcctatttttataccagtactatgctgttttggttactatagtcttgtagtataatttgaagttgggtaatgtgatgcctttacatttgttcttttttgtttgcttaccttggctatttgggctcttttttggttcaatgaattttaggattgctttttctggttctgtgaagaatgatgatggtactttgatgggaattgcattgaatctaaagattgcttttggcagtatgatcattttcatagtattgattatacccatctatgagcatgggatgtgtttccatttgtttgtgtcatctgtgatttatttcagtagtgttttgtagttttccttttagagatctttcacctccttggttaggtatattcctaagtattctattgttattattttttttatgcagctgttgtaaaagggattgagttcttgatttgattctcagcttggccattgttggtgcatagcagtgctactgatttgtgtacgttgattttgtatcctgaaactttaaagaattcatttgtcagatttgggagctttttggatgagtctttagggtttcctatgtatacaatcatatcatcagtgaacagtgacagtgtgacttcctctttaccaatttggatgccctttatttctttctcttgcctgattgctctggtgaggacttccagtactatgttaaatagaagtggtgaaagtagcatccttgtcttgttccagttcccagggggaatgctttcaacctttccccattcagtatagtgttggtcatgtgtttgtcatagrtgccttttattatgttgaggtatggctctattaccttgaggtacgtcccttctgtgccagttttgctgaaggttttaatcatgaagggatactggattttgtcaaatactttttctgtatctattgagatgatcatgtgatttttgtttttaattctgtttatgtgacgtatcacatttatttttattttatttagttatttttgagacagagtcttgctctgtcacccagtctggagtgcggtggcaccatctcagctcattgcaacctctgcctcccgggttcaagtgattctcctgcctcagcctcctgagtagctgggactacctgccaccacgtctggctaatttttgtatttttaatagaagcggggtttcaccacgttggccaggctggtcttgaactcctgacctcaaatgattcacccacctcggcctcctgaagtgctgggattacaggcaagagccaccacgcctggccaacatttattgacttgtgtatggtaaaccatctctgcatctctggtatgaaactcacttgatcatggtgtattacctttttgatatgcttttggatttggttagctggcattttgttgaggatttttgcatctatgttcatcagggatattggtctctagttttctttattgttatattgtttcctggttttggtattagagtgatactggcttcatagaatgatttagggaggattccctttctctgtcttttggaatagtttcagtaagattggtagcaattcttctttgactggtagaattcagctgtgaatccatctggtcctgcacttaaaatttttaaattttaatttaattaatttatttttgttttcttggacttttttcttggcagtttttttatgactgtttcagtcttgctacttgttattagtctgttcagagtttctctttcttcctgatttaatctaggagggttgtatatttccaggaatttatccatctcctctagattttctagtttgtgcatataaagtattcatagtactattgaatgatcttttatatttttgttgtatcggttgtaatatctcctgttttgtttctagttgaacttacttgaatcttcttcttttcttggttaatcttgctaatggtctatcaattgtgtttatattttcaaagaaccagcttttttttttttttttttttttttgagacagagtctcgctctgtcacccaggctggagtgcagtgatgccatcttggctcactgcaacctctgcctcctaggttcaagtgattctcctgcctcagcctcccaagtagctgggactacaggtggcccgccaccacacccggctaatttttttgtatttttagtagagatgggatttcaccatgttggtcaggctcaaactcctgacctcaaatgatctgcctcccttggccttccaaagtgctgggattacagacgtgagccactgcaccacatccagaaccagtgttttgttaatcttttgtggatgtttggtattttttgtttgtttgttacagtttagttctgctctgatgtttgttacttcttttcttctgctgggtttgggttcagtttattcttgtttctctagttccttgaagtgtgaccttagattttctgtttgtgctccttcagatgttttggtgtgggttttttttttttttttttgagatgagtctcactctgtcacctgggctggagtgcagtggtacgatcttggctcactgcaacctccgcctcttctgttcaagcgattctgctgcctcagcctcctgagcagctaggattacaggcgcccgccaccatgcctggctaattttttgtatttttagtagagacaggatttcaccatgttggccaggctggtctcgaactcctgaccttgtgatttgcccgccttggcctcccaaagtgctaggattgcaggcatgagccaccacgcctggtgatgtaggtatttaatgctatgaactttcctcttagcactgcttttgctgtgtctcagaggttttgataggttgtgtcactgttatcattcagttcaaaaaatttttaaatttccatctttatttcattgttgacccaaagattattcaagagcagaaattttaatttccatgtatttgtatagttttaatttttatttatttattttttctgagatggagtcttgctctgtcacccaggctggaatgcaatggtacgatctcagctcattgcaacctctgcctcccaggttcaaacaattctcctgcctcagcctccctagtagctgggattacaagcccgtgccaccatgtatttttagtacatggctggctaatttttgtatttttagtagaggcatggttttatcatgttggccaggctggtcttgaactcctgacctcaggtgatccacccacctcagcttcctaaagtgttgggattacaggcatgagccaccacgcctggtcgtgtatttgtatagctttgagggttccttttggagctaattttcagttttattccactgtggtatgagaggatactagatagaatttcaattatcttaaatttattgagactaaatatctgttaagtccatttgttctagggtatatttaactctattctttttttgttgactttctctcttgatgacctgtctagtgctgtcagtggagtattgaagtcccccactattgttgtgttgctgtgtatttcatttcttaggtctctagtagtaattgctttacaaattttggagctccagggttaggtgcatatataggattgtgatattttcctgttggacgaatcctttttttcattatataatgtccttctctgtctttttgaactgttattcctttaaagtttgttttgtctgacataagaatagctattcctgcccgcttttgatttccagttgtgtagaatatctttttctacccctttaccttaagtttatgtgagtccttatgcattaggtgagtctcttgaaggcagcagatacttggtttgtgggttgttatccattctgccattctgtgtcttttaaaaggagcatttgggccatttctattcaatgttaatacagtattgagataaggtactgttctattcataatgctagttgttgcctaaatacctttttttaaaaaaattctgttatcgttttataggccctgtgaaatttatgctttaaggatgttctattttggtgtattttgaggttttatttcaaggtttagaactccttttagcatttcttgtagtgtgtctttcatttcttgtagtggccaattctctcagcatttgtttatctgagaaagactatctctccttcatttatgaagcctagttttgctgaatacaaaattcttggctgacagttattttgtttcaggaaactaaagatgggaccccaatcccttctggcttgtaaggtttctgctgagaaatcagctgttaatctgttaggttttcccttataggttatctgaggctattgtgtcacagctcttaagtttctgtccttcatcttgactttagataacctgataactatgtgcctaggtaatgatctttttgtgatgaatttcctaggtgttctttgaacttcttgtatttggatgtctagatctctagcaaggccagggaacttttcctcaattatttcctcaaataagtttttcaaacttttatgtttctcttcttcctcaggaacaccagttattcttagggttggctgtttaacataatcccacatttcttggaggctttgttcatttttaaaattttttttctttgtttttgtctgattgggttaatttgaaagctttgtcttcgagctctgaagtactttcttytacttgttctagtctattattaaaattttccagtgcattttgtatttctctaagtgtgtctttcatttccagaatttgtgattgttttttctttatgatctctatttctctctggagaatttttcatccatatcttgtattttttaaaatttctttaagttgattttcaccttgttctggtatctccttgaatagctgaataatcaaccttctgaattctttatctggcaattcagaaatttcttcctggtttggatccattgctggggagctagtatgatttttggggcgttttatagaaccctgttttatcatattaccagaatcacttttctggttccttctcgtttgagtagactgtttcagtggaaaggtctgaaactcaaggcgtctgttcagattcttttgtcccacaggctgatcccttgatgttgtgctctctcccttcctctagggatggggcttggggcttcctgagagctggattggtgtgattgttattgctcttctggttctagtcacactgtggagttaccaggccctaaggctggtgctgaagaatgtctgcagagtcctgtgatgtaatccatcttcaggtgtcccagccattgataccagcacctgctctggtaggggtggcagggcagtaagtagactctgtgagagtccttggttgtagatatatttaatgtgtcggctttctcaaatgctggttatgctagtagtgaagttgtcatgtgaacagactcaggacctctggttagccaggatgttgcaggcagtggtatattagctgttattttatctttcctgggagcaggattattttgtcatgagttgctgtaatggcctgagttagttggctttcagccaggaggtggtgctttcaagagagcactagctgtggtgctagttgggggatctaagtttgtcttaagttggccagggttagtattctggtttctcaggcaataggtggggcataaagctcccaagaatttctgtcttttrtgttcagcaaccagggcaggtagagaaataccatcaggtaggggaaggattaggtggatatgggctcagactctccttgggtggggcttgctgtagccactgtaggggatggggggtggttcttgggccaacaggttatgttccagagaggattatggctgcctctgctgtgtcatatagtttgccagggaagtgggggatagctggtaatgaaaggcttcacccagctcccatgcagttggtgaggctggtcttacttctgtggtgcaccccctcactcctcagaccttgcccctgaatgtaagtttccccactgagaaagcgagcatggctttcaggccctacccctccctgtctgcctccctgtctgcccactgggcagcttttgtgctcatatctgcagcagttcccgttcattccctggattctgcttaagaaaattcatgcctggtcaaaattattatgagtttcatttggaagcttttttccccccatgaccctccctaattctgctgtctgctttccccgagggcccctgtgagatgtagtcaggaatggcttccctgggcttgagctggagactgggagtgcctacaaggctcttcctgctgctgcttctacttttatatttcactcggctctctaaatccatttcagctgtaggtaagattaaatccttctcctgtgatctggattttcagattccccaatggggaatgtgtgttcagaggcaggttttatcccccctctcacactttgggagctcatggtttttcgcctgtctcgtggaatttacagcactgtstggcttctttcaacggatctgtttggctgtggcaagttcttgaaatcagagagcaatgaagtttgctacatagattgactcttcatgaaagatttctctgtagcattttagccatggtagaactttctttagccatggtagaactttcttcaggggtggagtcaattctccccaaccctgctgctgctttatcaatcaagtttatgtaatattctaaatcctttgttgtcacttcagcaatattcacatcttaactggggctagattccatatcaggaaaccactttgctcatttgtaagaagcaactcctcatctgttaaagttttatcatgagattgcagcaatttggtcacgtcttcaggctccactttaaaaaatgtttgtattggccaggtgcggtggctcacacctataatcctagcactctgggaggccgaggcaggcggatcacctgaggtcaggagttcaaaaccagcctagccaacatggtgaaactgcatctctactaaaagtataaaaattagctgggcatggtggcaggcacctgtaaacccagctactcatgaggctgaggcaggagaatcactcgaacccgggagatggagattgcagtgagccaaggtcgcgccactgtatttcagcctgagtgacagagtaagaccctgtctcaaaaaaaaaaaaaaaccaaaaacagttatttatttatatttttttgagacagtatctcactgtgtcctccaggttggaatgcaatggcatgatcatggctcactgccgcctcgaactcctgggttcaagygattctcccatccccgcctcctgagtagctgggactacaggtgtgtgctactatgcctggctaactttcaggctccacttctaattctagttcttttgctatttccactacatctgcagttacttattccactgaagtcttgaactcctcaaagtcatccatgagggttataataaacatttcaaattctgttgatattttgactttctcctatgaatcatgaatattcttaatggcatctagaatggtgaatcctttccagaaagtttttgatttattttgcccagattcatcagaggaattactgtatatggcagttataaccttatgaaatgtatttcttaaataataagaccttttttagggaacccactctgtaaagacaaacaaaaataatataggacttgaaaattgaaactatcccttgatccatgggctgctatgttagtaggcatggaaccaacattaatctccctgtacatttccatcagagttcttgggtgcctaggtgcatagtcagtgagcagtaatattttggaaggaatctttttttctgagcagtaagtctcaacagtggggttcaaaaaattcagtaaaacattctgtaaacagatgggatgtcatccaggcttttgttgttcgttgatagagcacagacagagtagatttagcataattcttaagggccctagtattttcagaatggtaaacgagcactggcttcaacttaaagttaccagctcstaacaagaaagtcagcctgtcctttgaagctttgaatctaggcattgacttctctctagctatgaaagtcctagataccattttcttctaatagaaggctgttttgtctacactgaaatcctgctgtttagtggagccatgttcatcaattatcttagctatatcttctggataatttgctgcagcttccataacagcactttaccttgtacctttatgttagagagatggcttctttccttaaaccttgtgaatcaacctctgctagcttcagatttttcttctgcagcttccttacctctctcagccttcatagaattgaagggagttgctgccttggtcaagattaggctttggcttaaatggaaatgttgtggctggtttgatctattcagaccactgaaattttctccatatcaacaataagactatttcacttttggccaggcatggtggctcacgtctgtaatcccagcactttgggaggccgaggtgggtggatcacgaggtcaggagttcgagaccagcctggccaatatggtgaaaccccgtctctactaaaaatacaaaaaaattagccgggcatggtggtgctcacctgtagtcccagctacaggggctgaggcaggagaatcgtttgaacctgggaggtggatagaggttgtagtgagccgaggttgtgctactgactccagcctgggcaacagagcaagactctgtctcaaaaaaaaaaaaaaaaaaaaagactgattattttgcttttttatcatttgtgtgttcactggagtagcacttgtaacagcctccaagagcttttcattttctttttttttttttttttttcattttattttattttattttttatttttattttttttaatttatttttttattgataattcttgggtgtttctcacagagggggatttggcagggtcatgggacaatagtggagggaaggtcagcagataaacaagtgaacaaaggtctctggttttcctaggcagaggaccctgcggccttccgcagtgtttgtgtccctgattacttgagattagggattggtgatgactcttaacgagcatgctgccttcaagcatctgtttaacaaagcacatcttgcaccgcccttaatccatttaaccctgagtggacacagcacatgtttcagagagcacagggttgggggtaaggtcacagatcaacaggatcccaaggcagaggaatttttcttagtgcagaacaaaatgaaaagtctcccatgtctacttctttctacacagacacggcaaccatccgatttctcaatcttttccccacctttcccgcctttctattccacaaagccgccattgtcatcctggcccgttctcaatgagctgttgggcacacctcccagacggggtggtggccgggcagaggggctactcacttcccagtaggggcggctgggcagaggcgcccctcacctcccggacggggcggccggccgggcggggggctgacccccccacctccctcccggacggggcggctggccgggcagaggggctcctcacttcccagtaggggcggccgggcagaggcgcccctcacctcccggacggggcggctggccgggcgggggggctgacccccccccacctccctcccggacggggcggctggccaggcggggggctgacacccccacctccctcccggatggggcggctggccgggcagaggggctcctcacttcccagtaggggcggctgggcagaggcgcccctcacctcccggacggggcggctggccgggcgggggggctgacccccccccacctccctcccggacggggcggctggccgggcagaggggctcctcacttcccagtaggggcggccgggcagaggcgcccctcacctcccggacgggcggctggctgggcggggggctgaccccccacctccctcccggatcgggcggctggccgggcggggggctgactccccccacctccctcccggacggggtggctgccgggcggagacgctcctcacttcccagatggggtggctgccgggcggagaggctcctcacttctcagacagggcagctgccgggcggaggggctcctcacttctcagacggggtggttgccaggcagagggtctcctcacttctcagacggggcggccgggcagagacgctcctcacctcccagacggggtctcggccgggcagaggcgctcctcacatcccagatggggcggcggggcagaggcgctccccacatctcagaatatgggcggccgggcagagacgctcctcacttcccagtaggggcggccgggcccgaggcgcccctcacctcccggacggggcggctggccgggcgggggggctgacccccccacctccctcccggatcgggcggctggccgggcggggggctgactccccccacctccctcccggacggggtggctgccgggcggagacgctcctcacttcccagatggggtggctgccgggcggagaggctcctcacttctcagacagggcagctgccgggcggaggggctcctcacttctcagacggggtggttgccaggcagagggtctcctcacttctcagacggggcggccgggcagagacgctcctcacctcccagacggggtctcggccgggcagaggcgctcctcacatcccagatggggcggcggggcagaggcgctccccacatctcagaatatgggcggccgggcagagacgctcctcacttcctagatgtgatggcggctgggaagaggcgctcctcacttcctagatgggatggcggccgggcggagacgctcctcactttccagactgggcagccaggcagaggggctcctcacatcccagacgatgggcggccaggcagagacactcctcacttcccagacggggtggcggccgggcagaggctgcaatctcggcactttgggaggccaaggcaggcggctgggaggtgtaggttgtagtgagccgagatcacgccactgcactccagcctgggcaccattgagcactgagtgaacgagactccgtctgcaatcccggcacctcgggaggccgaggttggcggatcactcgcggttaggggctggagaccggcccggccaacacagcgaaaccccatctccaccaaaaccagtcaggcgtggcggcgcgtgcctgcaatcgcaggcattcggcagactgaggcaggagaatcaggcagggaggttgcagtgagccgagatggcagcagtacagtccagcttcggctccgcatgagagggagaccgtggggagagggagagggagggagagagagggagagggagagggagagggagagggagagctgctgtcgagcttttcattttcattcacaacttggctaactggtgcaagaggcctagcttttggcatatctgggctttcaatgtaccttcttcactgaacttaatcatttctagtttttgatttaaatgagagacatatgattcttcatttcacttgaacacttagaggccattgtagggttattaattggcctaatttcaatattattgtgtctcaggaaatagggaggctccaggagagggagagagacggaggaatggctgctcagtggagcagtgagaacacatacagcatttatttattaagtttgccatcttatgggtgttgttcatggcactccaaaacaattacagttgtaacatcaaagatcactgatcatagatcactgtaacaaatataataataataaaaaagcttgaactattgtggaaattaccaaaatgtggcacagacacaaaatgagtacatactgttggataaattacttgatagacttgatagacaaaaggttgccacagactttcaatttattaaaaaatgcagtatctgtgaattacagtaaagcaaagtatgcctgtaatactagtttctctcataaacaactgcccaaaactcaggagttccaatcaaactrtatttcttgctcatatcggaatgtgttgtatcaggcaactttcccaggctactcttctctgattagcaactcgctagagtctttccatctttgatgctgtcatcttaaacatgtgacttctaaagttgctatgaaaggggaggagcaggcatgggtgatctctcagggggttttatggccaggcttggtagtcgtatagctaactttggcccgtatcccattggccagaatccagatacatggccctcactcaactacaagagaaactgagaaagctagtctttcattgtgtcctggaagaagaaagtaaattgactgtgatgaacagatagtgtcatttctaccatggcaatagataaaacttctcccaggcagagaccgtagagagagtagagaaggtccacagtggaacccatagaaacctgacatttagacgttggttaaagaaaaaagagggaacaaaggagttgaggacgaatagctagaaattgatggaggtgttaggtgggtgattgaaactaacaagagtttgggtgtcatgtaaggcaggagagtttttcaagaagaaagaagttgtcagatacatgaaatgctgctgaaatgttaagatactagaaaagttggtaaaatctgttggtgactgtgacaaatattttcagtgggaatgtgagatcagaagccagattagagtggattaatgagctacttggttgcaagtctcttagagagttgtagtggattgctgaggaatatgtgtagatggctctgagacctgtctaagaggctaattgctacctttcctacctttcggatagagtggccaaaagaatggggatagcgtggccaaaaggaatgatcagaagtgacttgagaatggccagctgacctgagaaggaggcaggggttggaacattgaagatgtaggactatcttcatcagcccgtctaccaaggccgtggatggaccttagtcatatcagcagaagctgctgggatggaaactaacaatgcccaaagatcagatgcaatacagttcagtttactggaagcaagaggggaaaaagatggtgtacaaaatagcagttgcccccctttcccccaatgccaggttctctacctttgaggaatgtagtcacattcaggaggagaatcctgatttgactgtgggctatcttgaatgggagctcaaaaactaaattatgcacagttatagagaagtaaagtctacactcttgctcacacatgtatacataaatgaattggaggtaatgaagtaaagataggagtatgtgtattaaactttttaaaaagtttggttatgaagaggagtaaaaatgaagcataagttgggggataagggagagtttaggrcttatttaaatgctgatggaaatgagccagcagatgtctgagatgctgaagatgttgggggtgggggttgggagaggaagaaaggattgattggtggcccttgaaaggcaagatggtaaggaaatcccgagcagaagggaggatttttaatgggaggaggagtatgggctgagatacagaaaggtttatagattaactgcaaaggcaaggcaagtttctgcctaaaggtggagaggcattgttgaatagcagtttcattcatggactctacatccgtagtcttcatttgaatcactgtttttaccatttattagtggtgtgacatgtggcaagttacttaatcgctcttgctttgttctcatctgtaaaacgaggaataataacaatacttattgttaggagtaaatgaatgaattatgtacagtattttaaacagtgtctagcatgtggtaaacatacacaattagctttaattattatggcttcttttgtttttttcttttcagtgaagtctaacttaaagttgtcagttgaaaaggggatgttttaggaatgaggaaaagatgtaaaatatttatcataaaggagagctaatggtgtgtggtaggattgcctttgatattggtgattatgaagtatagtgtcacccatcttttgtgctgtgagatttgctctaggaagcctcagctacatatgtgtaggcacaaagaagtcaggtggttaagttcattgaggtctggatttttctcaggtgartgtgactgggtaatgggggcagagcaaggaggttaagggtatttacaggggactaattatgttgatccactgtgggctctgatgttggataagaaggaaagggaaccctgaaagagctgatggaaataggattggacttctgaggcagtagtaagagggagagaaagtctgatgggatgaatcttcttatttatttatttattatgtttattgctcatgatttatattttcctaatagaatataaacactatgagggcagggcttttctgttttttgtttgtgtgtgtgttttttttttccttttcactaatgtaatccgtgcgcctagaacaatgcctggtacatagtacatacccactatatatctgttaaactaaatgaagtaaaagaaacctaaatcagatgttggtggaggtggtgagaagtggtcagattctggatgtattttgaaggtggagctacgggatttgctgatggattggatgttgggtgtgagaaaaggagaataggcaaggataacctaaaaggttttggtcttgagctgctaaaagaatgatgttactatttgctgagatagggaagaccatgaagggagcaggttttagagtttgagtattaagagatgagatttggatatcaaatctgagacatctgttagacataaagtagaggttcagtaggcagttgatatccatctagagttaagggagtgatttgaactggaaatataaatttgtaagtcattagcacattgatggcttttaaagccatgagactagatgagacaccaagggagtgaatgaaaatataaaagaggtccaaggattgagtcctgagacaaaacatagaggagtcagggtgagagggggagccactaaagtagactgagaaggagaggccagagagctagaaggaaaaccaggaggatataatagtattctggaatttaggtgaaaaaagtggttcttttgtcaaaaagtgaccagttgttttatgttgctgagagcttaaggtgagaactgagagttgaccatttgatttagcaatgtggaggttatgggtgactttgattttgtagaaaacaaaatcttaaaaaattattttttcatgaaatttagcttaaagcctttggacagatgttaagacttcacttaggcagataatattgtttttattgtgtttgaaaatgtaaggccaggctcagtggctcatgcctataatcccagcattttgggaggccgaggtaggcgaattgcttgagcttaggaattcgagaccagcctgggcaacatggcaaaacctcatccctacaaaaaacacaaaaaattagctgagtgtggtggtgtgcgtctgtagtcccagctactggggggctgaggtggaaggattgcttgagcccaggaggttgaggctgcaggggctgacatcacgccactgcactccagcctgggcaacagagtgacaccctgtctcaaaaataatacgcatacatatatcagttaaaatagatgttaaaaaaattggttagaggtgacttcctctatgctatactgtcattcagaaaaaaaggtcaaaaaaagtcagtctttctagctgaaataaccactgatagttgtttgaaggatgattttggttagcatcctctcagaatgatatcatattctagcatggtctttatcctgagatatagaataaagcctacaactttttagtatcaggttggagaaagttccaacctgataataaaaaccatatagggcatataatcccagcactttgggaggctgaggtgggtggatcgcttgagcccaggagtttgagactagcctggacaacatagtgagacctgacaacgtgctccccccagcaaaaaaattagctggttatggtggtgtgcacctgcagtcccagctacttgggaggcttaggcaggaagattgcttatgtttttaagagttttaaattaataacttttttaatgtagtggtgtagaacttagataatggaagttctattcactggtaatttttcttttgctgttatatttgattgtcaatttttataatttttttgtccttggctgaggcaggagaatggcatgaacctgggaggtggagcttgcagtgagccgagattgcgccactgcacttcagcctgggctacagagcgagactccgtctcaaaaaaaaaaaaaaaagatgtagggtagtatctttgaaaagtatagtttaaattgagagtactttatgaacacttgcatttttagattgcttttccatttaaaatgttttaagaggctgggtgcggtggctcacgcctgtaattccagcactttggaaggccgaggtgggtggattgcttgagcccaggagtttgagaccagcctgggcaatgtggtgaaaccctgtctctactaaaaacacaaaaattagctgggcttggtggtacacacctgtaatcctagctacttgggagactgaggcaaggtaattgcttgaactcaggaggcagaggtttcaatgagctgagattgcaccactgcactctatcctgggggacagagcgacacttggtctcaaaaaaaaaggttttaagaaggtgatatttgagaattgttaattatagaattttaatctgaaacatttccttttatggaaatkattacctatctgtgttgtttaggaagattcttacctctgaagacaatgttaggaccaagatatgatagtcaagttgctgaagaaaatcggttccatcccagcatgctctcaaattacctaaagagcctaaaggtaagaaacaaaatttatttttgtcactgatttaatatactttgttcagtcttgttcttcaggtggcttttaaaaaaatcttattattttaaaataattaatagactcaagggaagttgcagtaattgtacatagaattctgtgaacccttctcccagcttctcacaatggtgtcattttatataattgtagtacaatatcacaagcaggaaattgacattgatacagtactgttaactgattgcagatcttatttacttttgatatgcatttgtgtgtgtgtgtagttcagtacagtttgatctcatgtgtaaattcatggtagtgattatagaactgctgcatctccacagaggaattccctcatgctacctctttatggtcaaactctctcctcaccccgtccctgtactcgccagagtagaaaaacaaaaatgtgtagtttttccatttaagagaatgcccacctgacatcccagcccccagcaaaacttactatagcctccactaacaaccacaccctgagctaccaaggaaactgactgtgtttacagttgaagaaaccatacagagactacactactgcatgcatccagaatcataaccaaagtgctttacccgaccaacaccacagatatagcttcaggaaaaagtccttccctccaaaagctaattccaaaaattgggactggggctgggtgccatggctcatgcctgtaatcccaacactttgggatgctgaggcaggtggatcacttgaggataagtgtttgagaccagcctggccaacatggcaaaaacctgtctctactaaaaatacaaaaattagccaggcattgtggtgtgtgcttgtaattccagcatactcgggaggctgaggcacaagaatcgcttgaacctgggaagcggaggttgcagtgagccaagatcacataccagtgcactccaacccaggcaacagagtgagactctgtctcaaaaaaaaagaaaagaaaaaaaaaaaagaaaaactggggctgggatggtggctcatgcctgtaatcccagcactttgggagactgaggcaggaggattgcttgaggccaggagtttgagaccagtgtgggcagcatagggagaccctgtctctacaaaaaattaaaaaaaaaaattagccgggcatggtggtrtgtgcctgtagtcccagctacttgggaggctgaggtgggaggatcacttgaacccaggaggttgaggctgtagtgagccatgattacccactgcagcctgggcgatagtgtgaccgtgtctcaaaaaaaaaggagaagtgagtgttacaccagatgtgcagatatcaatgtaaggacatggcaaacatgaaagagcaagaaatatgccatctccaaaggaacacaataatccttcagcagcagataaaaaattcataatccttcagcagcataataaaaaaattcatgaaatggtggacagataattcaaaattttgatactaaggaagctctgtgtaagaaagaagagaatactgaaaagcaatacagaatactgaaaagcaatacaaatcagaaaaacaattcagggtatgaataataagtttaccagagatagatatcagaaattcaaacaaattcaggaaatgaagaattcattgaatgaaatagaaaatagatcaaagcttcaataatagactagatcaggcagaagaaagaatctcagaacttgaagacaggtctttggaagtaacctagtaagacaaaaataaagataaaatgctaaaaaagaatgagcaaagccttcttgagatataggacaccagaaagtggccaaatattcaaatttttggtgttccagaagatgaagagagaacaaaagggttagaaaacctatttaatgaaataatagattaaaactttctaagtttaacaagaggtttagacatccaagaggatcaaagatcccacaaaagataatatctaaaaaggtcttctccacaacgcgttatagtcaaactgttaaaagtcaaagagaaaattcaaaaaacattaagagtgtctagtcatttataagagagctcccattagactaatagtggacttcacaggaaaaaccttataggccaagcgagagtagaggatatattcaaagttctgaaagaaaacgcctaccacccaaggataccatacccagcaaagttattctttcttcataaatgaaggagaaataaagtctttcccagacaagcaaaagctgagggaattcaccacaactggactggtcctgtaagaaatgcgttagacagtcctgtacctgaaattgaaagactagtaaccaccatcatgaaaacacaaaaatataaataaaaaccactgacagagcaaacacatcaacaatgaagggggaaaaactcaaatgttaccactacacaataccaccaaaccacaaagatgaaacaataagagagaaagaaaggacaaagaatatacaaaacaaccagaaattaataaaatgacaggaataagccttcacatattaataataaccttgaatgtaagtggattacactttccatttaaaagatgtaaactggccgaatggatatagaaacacgacttatccatatgctgcctacaagaaactcatctcaactgtaaagacacacatagactgaaagtaaagggatggaaaaagtgttccatgcamatggaaaccaaaggtgagcaggagtagctaaacttatatcagataaaacagactttaagtcaaaaacagtaaaaggagatcaagaaggtcattatataatgataaaaggatcagtttggcaagaggatataacaattctaaacatatatgcactcaacatcagagtacccagatatataaagcaaatattattatatctaaatggagatacagtctcccgtataatagtagttggagacttcagcaccccactgtcatcattagacagattgtcaagacagaaaattaacaaacattggatttaaagtgcacattagactaaatggacctaacagacatttacagaacatttcatccagtagctatagaatacacatttttcttgtgaggaaatggaacaatctctaggatagaccatatgttaggacacaaaacaagccttaacaaataaaaaagtcaaaatcatatcacataccttcttagaccacaatggtagaaaagctagaagtcaataataagggactttggaaattgtacaaatacatggaaattaaacatgctcctgaatgaccatttggtcaaggaagaaattaaggtggaaataaacctcttgaaacacatgaaaattgaaacacaacataccaaaacctaagaagtacagcaaagcagtgctaagaaggaagtttatagcaataattgcctacatcaaaaatgtagaaggattcagataaataatgatgcaccacaaggaactagaaaggcaagaacaaaccaaaaatttgtagaaggaaagaaataataaagatcagagcagaactaaacaaaatagacactaaaaaaaaaaatacaaagaatcaacaaaatgaaaagttggtttttttgaaaggataaaccaaatcaataaatccattgctagaccaaccaagaaaaacaagacccaagtaaactaaatcagaaatgagaaagagaatattacagttgataccacagaaatacaaaagatcatcagagactattttttttttttgagatggagttttgctcttgttgcctaggctggagtgcaatggtgggatctcagttcactgtgacctccactcccaggttcaagtgattcttctacttcagcctcctgagtagctgggattacaggcatgtgccactgcgcctggctaattttttgtattttttagttgagatggggtttcttcatggtggtcagactggtctcggaactcctgacctcacgtgatctgcccgcttcggcctcttaaagtgttgggattacaggcgtgagccaccgtgcctggcccatcaaagactattatgaacaagtatacactaactggaaaacctggcagaggtggataagttcctagatatatgcaacctaccaagattgaatcaggaagaaatagaaaagctgagcagaccaataacaggtagggagatttaatcagtaatgaaacatttcccaacaaaaagtctaggaccggatgccttcaccaccaaattctaccaaacttttaaggaagaactaacaccaatcctcaaataatcctgaaaagattgaagaggagggaattctaactcattctgtaaagctagcattatgtttataccaaaaccacaacaaaaagagaaaacaggccagtatctctgatgcaatgatggttcagcatatgcaaatcaataaatatgatacattacatcaatagaatgaaggacaaacaccatgtgatcatctcaatagagtcagacaaagcatttgataagaatcaacatcccttcatgataaaaactctcaacaaactaggcatagaggaaacataactcaacataataaagaccatatatgacaagcccacagctaacgtcatactaattggggaaaagctttcagcttttgccctgagaattagaacaagacaaggatgtccacttattcatcatggtattggaagtactatctagagcagccaggcaagagaaagaaataaaaggcacccaaattggaaaaaaagtcaaactgtccctcattgctgatgatataatcttaaatctagaaaaacttaatgattccaccagaaaactctgagatctgatgagaaattcagtaaaggatacagaatcaacatacaggctggacagtgggtcacacctttgaccccaaagtgctttgggaggctaaggtgggaggtttgctttaggctaagagttcaagaacagactggaccccaaagtgagacccccatctctacaaaatattttttaaaaatgtaaaagttatccaggcacaatggtgtgttcttctagttccacctacacaggaggctgaagtgggaggatcacttgagcccaggtgttccaggcagtggtgagccatgattgagccactgcacttcaacctgggcaaaagaatgagaccctgtctttgaaagaaatacacaaaaaaagaaatcaacatacaaaaatcagtagtgtttctgtatgctgatactgaactagctgagaaagaaatcaagaaggcaatcccatttataatagctacaaaaatagtaaaatactcaggaataaatttaaccaaggaagtgaaagatctctgcaaggaaaactagaacagtgatgaaggaaattgaatggaacacaaacaaatagaaagacctccatgcccatggattggaataattaatattgttaaaatgaccatactttccaaagcaatctgcatattcagtgcaatccctataaaataccaatgacattttttatagaaatagaaaaaactcctaactttttaattttattaaaaaaaactttttttaaagatggggtttcactgtgttgcctaggctggtcttgaactcctgagctcaagcagttctcccaccttggcctcccaatgtgcyaggattacatgcatgagacactgcaccccacctgaatcctaacatttttatggaacctgaaatgagcctgaataaccaaagcaatcttgagcaaaaggaacaaagctgtgggcatcacactactttacagtgtattacaaggctatagtaaccaaaacagcatggcattggtgtaaaaacagactaatggaacagaatagagaatccagaaataaatgcatgcatttacagccaactgatttagacaaaggcaccaagaacatacattggggacaggacactctttaataaatggtgctgggaaaattggatatccatatacagaagaataaaactggacctttatctctcaccatatacaaaatcaaatcaagatggattaaagactttaaatgtaagacctgaaagcagaaaacagtagttttgagatgaaaacatagggaaaacaccgtgggacattggttcagtaacaattttatggctaagacctcaaaaacacaactcaaacaacaatagacaaatgggatgatatgaaactggaaagcttctggactgggtacagtggcttacacctgtaatcccagcactttgggaggccaaggtgggaggattgcttgaggccaggaattggagaacagcctgtgcaacagagtgagaccttatttcttggtggcacatacctgtggtcccagctacttgggaggctgaggcaggatgactgcttgagcccagtaggtcaaggctgcagtgattcatattcacaccactgtactccagcctgggcaacgagtgagactctgtttcaaaaaataaaataaaaaagcttctgcacagcaaaggaaacaacagagtgaaataacaacctactgaataggagaatatatttgcaaactattcttctgagggattagtatccagaatatacaaagaactggaaacaacaggaaaaaaatcccattaaaaagtgggcaaagatgtgaatagacatttctcaaaagaggacatacaaatggccaacagatatatgaaaaaatgctgaaaaaaagctcaacattactaatcatcaggargatgcaaatccaaaccacaatgaaatatcatcttgcaccagttagaatggctatttatgactaggtacagtggctcatgtctgtaatcctagcactttgggaagctgagatggatgggaggattacttgaggccaggagtttgagaccagccttgataacataacgagacaccatctttaaaaaaattcaaaaaattagccaggcatgaggtatgtgcctgccatcttacctactcaggagactgaggtggagggatcccttaaccccagaagattgaagttacagtggtgagctatgattgtgctactgcactccagcctgggtggcagagcaaaaccctgtctctctctcaaaaaaacaaaacaaaactattataaagacaaaaaccaacagatgctggcaaggatgtggagaaaagagaactcatatgctgttggttggaacgtaaattagtacagccaccatggaaaacagtatggaaatttctcagaaaactaaaagtagaactgctrtacgatctagcagtttcactactgagtatttatccaaaggaacagaaataattttatcaaagggtggatgaatggataaagaaaatgtggcatatatacacaatggaatactatgcagccatgaagaaaaaatgaaatcatcattttgcagcacatgggtggaacttgagtttattatgttaaccaaaataagccagacacagaaagacaaattccacagtttcactcctgtgggagccaaaaaagttgatttcatatctgtagtcctagaacttaggaggctgagatgaaaggatcacttaaacccaagagtttgaggttacagtgagctatgattgtgctactacattccagccggggcaacagagtgagactctatctcttaaaaaaaaaaaactgatctcatggacatagagagtagaatgatagacgatagataccagagggtgggaagggtgtgtgggcaggaggagcatggtgaagggaggttggttagtgcaaacatatagttagatataatgtataaattcttatttttggtagcagggtaaggtgactgttgttagcaatgatgtattgtgtatttccaagtagctagaagagagaacttgaaatactcttaacacatagaaatgataaatattcaaggtgatggatactccagataccctgatttcatcattacacattacatgcatgtaataaaatatcacatataccccataatacataaaatatagcatatcaattaaagaaagtgcagattgtttctcttgcctttttttttcctgtggggacccaagggggaaagagggagggagtagaaactcaaggattaaagtggagaaagggtggcttttggaggaaagttggggtgctgataggagagaaaataaagatgaataccaggcaggaaaatttggggattgaaacaaccatcaacctatgtggtataaattgtcttcttttttatattagagtatatgcttcagaatgaggtggaagatgtatgaatttactattacttttttttagcctcagtttaggtgtgcgtttctaagtgagactatcttgctggctgattgtgattctaggttttaaagatttttcatactgaagggccctgaatgcaaatcaacttcttcagctcaacagaagtaataatggtttttgttccaatccagaaagaaaaattggctataatctgttgggggaaccagcccccaatatttcaacgtaggttcttttctattttccctaaatgtcggccggtctgagaaataaagggaaagagtacaaaagagagaaattttaaagctgggtgtccaggggagacacatgtcagcaggttccgtgatgccccctgagccgcaaaaccagcaagtttttattagcgattttcaaaggggagggagtgtacgaatagggtgtgggtcacagggatcacatgcttcatagggcaataaaagatcacaaggcagaaggtcagggtgagatcacaaggtcagggcgaaactagaattactaaggaagttccctgtcccactgtgcacacgttgtcaccgataaacatcttaacagggttcaagagcagagaaccggtctgactagaatttgccaggctggaatttcctaatcctagcaagcctgggggtgtgcaggagactagggtgtgtttcatcccttatctgcaactgcagaccctcctagagcggccattttagaggcctactcctgggaatacattcttttcccagggctgttaattattaatattccttactggggagagaattcagtgatatttctcttacctgtttttggcaataagggaaatatggctctgtcctgcctggctcccaggcagttagacccaatggtcatctcccttgttccctgaacattgctgttatcctgttctttttttcaaggtgcccagatctcacgctgttcaaacacacatgcttcatgaaaaatctgtgcagttaacacaatcatcacagggtcctgaggccacatacatcctcagcttacgaagatgatgggattaagagattaaagtaaagacaggcataggaattttacaatttatrttcttctgccatggcttcagccggtccctctgttaggggtccctgacttcccgcaacaatggttgacttattgagatgggattaagcctccagtaatatgcatatggccatgtatactgttcttcattggttacttaaggaatttatgagagaattttgactgtacatacttttttaccctatgtgttagaatttaactgcccaaggtgtgattcttaggcatcacatggtacctaaaaatcatagtgatttttgtcattttagaaatagacaatacgttcacttacttcaaaaatccacaaaaaaaggttggtatcatgaagtctccctctcacttttgctctctatctgcctagtccctcaccacataccacacaggttccactgtttttagattttttaatacatcctttcagaatttctttatgtgtatgtaagcaactaaaaatacagattgctgtgttctcccctgcacactcaaggtagcacattatatatgctggtctgaaacttgcatttccagcttaatagtatactctgaagatcttcatatattagcacatagaacttcttgttcttttttttttttttttttttttacagctttatagtattccattaaagtatgtacaggttgagcatccctcatccaaaaatataaaatctgaatcttttttagcacctacatgatgcccaaaggaaatgcttattggaacattacaggttttggattttcatattaggattgctcaacctgtaagtataatgcaaatattgaaaaatctgaaatcttgaacacttcaagtcccaagcatttcagtttagggaatcttcttactactttacttggatggtttctttatggaactggaaaatgtgtgctgacattttctgaaatttaccagcatggggtcatttttactgcttttgtgtgtcttcattgcattttcccccttgtattgcttctgcttccctgtaatctgccccatcttctccagactccttagctcttgggtagatgagagataggtctgccactttatggtgagctctttcttaccggaaatgtatttttattggcattttcctaaaatctgctgctcctgggtctgcttctcttttcttcctttccatatagcttctgtagtgttcttaattttttggcagaacttagacattttttatgaatgtgtggattttatatgcgttcgttttacagaaaatgaaacttttttttaaacaatttaccttgtttttatatgatactgaaagaataggagaggaaaatttatttaattttttaatctttttccccccaaacacatggtttttcaagcgatcctcttgccgtggcctcccaaagtgccaagattacaggcgtgagccactgtgtctggccaaatttcccgtactaccatcttcttaataagattgtctctatttttaaccttgtttcttttcaaaaaatgtaacttgaggcttcagtatattttcagaaaatagaagagttgttaataacaaagaaagggacatatatataaaatatatataataagatacatgttttatatgtatatatgtatatatgtttatgtatatatgtatatacatatatgtatatgtatatatgtatgtacgtatatgtatatgtatgtatacgtgtatatatgtatacacgtatatgtatatacgtatatgtatatatgtatatgtatacatatgcatatacatgtatatgtatatatgcatatatatgcatatatgtgtatacatatgcatatgtatatatgtatacatgtatatgcacatatgcatgtatacatatgtatatacgtgtgtatatgcatatgtatacatatgtatatacgtgtatatatgcatatgtatacatatgtatatatgtgtgtatgtatatatgcatatgtatacatatgtatatgtgtgtatatgtatatgtgtgtatatgtatgtatatatatatacacatcatatatatgatataaatggattgtctcatcttttaagcctgggatataaaatggtgtagtcaatagatattaacagaattattggtggtggctgcttggaaggctggggtgggtgatttgtgccgagagcttgagttgtggtatacttcagatagatgccattcctgctctagcctcttgtctaataaatcacaggtgcagaggtatatgcagcaaacactagagaaaactctagcattttctcttttgcatagacttttgtgatgttggcagtagaatttgttttgcttatattcctgttctttccttagtttgggagttaatttattttatcaagtgcctgcttagttttagtgtcttgaataagactttgataagtgatacttttattatcaattgttcaggggcaaagtacatacagaatctccctcaatgtaaatgaatgaactgtagtattgccatttagtctacttatttgggaacaaattaagttactagtaaatttgccctttcatttttttttttttttaggttaaaatgggcttgttggtggacctgacaaatacttcaaggttctatgaccgaaatgacatagaaaaagaaggaatcaaatatataaaacttcartgtaaagggtaagttatatattaagattctttaatattgaaacctttcatcacaatttgtaatctcttttttcaaaaaaactttttctatattactagacatggtgagtgccctaccactgagaatactgagacctttattcgtctgtgtgagcggtttaatgaaagaaatccacctgaacttataggtatgtttggctttactttgccactgttgaatattttattttgcagttaggtttctgttttcttgtttgcaaataagttgatatgaaagttttttctgttttaaataatgaccaagtagtgtttattaaaatgagagattgacttgtgaattatgtaataaatgtattttcataatttttacatttttctagataaagccctgatttcctctcttcaggtgtcctgttgggaaagtctatcctaaacactacatatttattttttatacttctacattttataattttacattttatactatattattctgaaacttcattcttttttattcaggatttctgagagcaatgtatggtgatgtaattgtagttcatttttgcttctatatagtattccattatacaaatacaccacagtttatactcttgttgatgcacaattccttcatcagatttttattgattgctactctatctataccaggcaccagctcgtggaacacatcagtgaacaaaatagaaaaaaacatcctgctcttacagagctcatattctagtgtgggctggaggctgagggaaggagggcaggcaataacaaatttaataagtaaattttcataaaatggcagttactgaaaatgacttttgagttattttcaggtttgttgttgttgttgttttgcttttataaacaatgctgctaggagtggtcttctagaatttttaaggtttggttttaaatttaatttttttttaatgaaaaattattttttgagacaaagtcttgctgtatcgcccgggccggagtgcagtgctgcgatcttggctcactgcagccttgaactcctgggctcaagtgatcctctcttctcagcttcctgagtagctgggattacaggcacacaccactacccccagctatttatttttatttttattttttgtagagacagggtctcactatgttgcccaggcttggtttgaactgctggtgtcaagtgatcctcttgccacggcctctcaaaatgctgagattacaggcatgagccactgtgcctggccaactttgcttttctgttatttctgttggtatatggtttaaattgaggatgcaatgtaaagtttccttttctttctttttttttttttttgagatggaatcccactctgttgcccaggctggagtgcagtggagtgatctcggctcactgcaacctctgcctcccaggttcaagcgattctcccacctcagccccctgagtagctgggattacaggcatgcactaccacaccctgctaatttttgtatttttttttttttgagatggagttttgctcttgttcccctggctggagtgcaatggcacactgtcagctcactgcaacctctgcctcctgggttcaagcaattctcctgcctcagcctcctgagtagctgggattacaggcatgtgccaccatgcccggctaattatgtatttttagtagagacagggtttctccatgttggtcaggatggtcttgaactcccaacctcaggtgatctgcccgcctcagcctcccaaagtgctgggattacaggtgtgagccaccgtgccgggcttaatttttgtatttttagtagagatggggtttcaccatattgactgggctggtcttggactcctggcctcgggtgatctgcctgcctacctcggcctcccaaagtgctgggattacaggcgtgaaccaccatgcctgcccaattaaatgttttctacataaccaaccatttgtttcagcacagtttattgagtagttctttctcttcttagggctagatgatgtaaattcatatatctactgtttgaaaatatttcctattcatctcattttaattttttggtaatattttaaaactttttttcatcaaatttttttgtgtcttgtttgattttaagtagctaatgtttttccttatttagataattaacggaaaaactagtagtaagaaaatttggggatatattgagaacgtaagataaaaaagaaaacatcagcaactttcctggaaacaagcaataattagttagaaaatataatcagaaaatagtcccattaatcttaacaatattggctatcacatattgaacatttcctccctgctagtctttgtgtaaaccatgtcacacacattgtctcattttcttttcatagcaattatattaggtagatagtattgttatgcccttaaactgagacttggaaaagttaagactgctgaagggtcactcacacagccagtaagggctagagtgtggattatatcctaagcaatctgagttgcatgttcacacttgaaactacctctctcttctataacagaagtacaaaacaccaaggaatttttactaataaatgtagatggtctttatgaagaaaatatatttaaatattaaaataaacatgaagaaatggagagacgttacttgtttccacattaatttcaaagttttaatgttgttctaaccaaaatcccaatgaaagttaggcagaattactttgaaattaatttgtaaaatccccacctctattaagtcactgaatattaccgagcacagaaaaaaatagtttggcaaatcagacatgcaagttatgagcaagaaaaatttgaaaaacaagagtaatgaggagatttttctttccagtcattaaatcatatggtaaagcaatggaactgatagcactagttcctggtggtaaaggagatgtttttaaattagagaggaaaggtgtgatttttcaccaaatggtgttccattagtcaaccacataataagtgaattttaggtgtattaaatatttttaaaaggaccaaaaagaatataggagaaaatagtaaatatttatttaattctggagtaaacaaagaaggatattccatgtatatcaccaaagacagaatccataaatgagtatttttyttttaggagtgctcctggactgcctgtatcagaaccacttgaagatacttgttagaaatgtatgttttagggcctatcctggacctacgtaatcaaaatgtctaaggatgaatgttaggaatccagatttttttttaagagacagggtcttgctatgttgcccacttggagtgcagtgtctatttataggcatgattatagcacactacagcctcgaactcctgtcctcaattgatcctcctgccttggcctcctgagttgctgggactacgtgcaccactgcacttttgccaggaatctagattttcaaaagaaaagtattaggtggcttttatgcagacttaaatttgagaactgctgtcagaatttaaagtatggtggctattaatgatgatagtaacagctagttgttttttttttttttttatgaggtaaggtcttgccgtattgcccaggctagagtgcagtggtgtgacttcggctcactgcaacctctgtctgcagggctcaagtgatcctcccacctcagcctcccgagtagctgggaccataggcgtgcgcaccaccacaccctgctaatttttgtattttttgtagagacactgtttcaccatgttgcctaggctggtcttgaactcctgggttcaagtgatctacccaccttggcctcccaaagtgctgggattacaggcgtgaacccttatttattaataagctagtattaataaatgcttattatttgttcagtggacttggggaactatagataaggaaagtgagtctcagagaagttaagtacttcgcccatggtcatgcatctaataagtagttgagccaggttttttctttttttttcttgtcactgctatactaacaaggataagccaggtttttaatccagtttctggctttaaagttgaaatctgtaattagttgctgtaattagtttctagttggccacataaaagagaaaaatttttgtcttaaaaaaaaacacaacaggtgggtatagtggctcaccattgttatctcagcactttgggaggctaagatgggaggatcacttgaagccaggggtttgagaccatcctgagtaacaaagtgagaccctgtctctgtaaataaaaaaattagccaagtgcagcagtgtactcctgtagtcccagctacttaagaggctgaagtgggaggactgcttgagcccaggagtttgaggctatagtgaggtatgatcacacctgcactccagcttgggcaatagagtgagaatctgtctctaaaaaaaaaaaaaaattggagaggagaatgtttgagggcaaagaaaaaaataaaacataaaacaacaacaacaaaagacacaacagaagggaggcaaaaagatgttggacaaattggggtctggcttggtggcacatgcctgtaatcccagctacttgagaggctgaggcagaaggattgcttgagcccaggagtttgacactggtctgggcaacatagcaagaattctgtctcaaaaaaagattttgacaaatttggaaaaatatctgaagcatatgtgacataaaaagttaataatcttatttatgaagatatcttatacaccagtaagtgaaagaggcattccttaatagaaaattatggaaaacaatgaaagagcaatttacagaatatgaaatacaagaagccaagaaacatgaaaaaaatttttctcacttgctaatgagatacaaattaaagtacatgctggtagctgcactccacatcaaattggcaaagattaaaaaaattatatttctgagagctcctaggggactttgccctgcattacctgggaggggtgtcagttcagttctgggttgaacaaggcccttgcacatggcatgttgggggaccagcctaaagttcttgtcacctcctcatgcgaagccagccagcactatcctggatggagccccccagcattgaggtggcccttggccacccctcctcagggcctccaggataacttgagtacccctcccggtggcttccccttcctctccctggggctgccaggggcacgttgctctgtgccatggactgaaaccagctcctggtgacagaatgacctgtttgttggaaatgccttgttgccagagaaaggaatcttggaacaaaactattttaattgtgaactggccatagaacacctgtttttttttaaatcaacttattaagttggagcactataatagctcttgctgatttagctacgatatgtttgttgaacacataatgctatgttttatgaggaaaagggatcgtaaggaagagtaatgttgcacctaacattaggtgggtaaaagtggccttgtgtttgtgtctgtttctacacagagcctttgggttttgttctcttcatcaggtaaatgtttgttgcataccctgctgcacagagaacctccctgcgtctgtttctctgctcctctgtggctgactcaataaacttttccttcttggaaaaaaaaattataatgtctgttagtgtcaaggattggataaaatgggtgcattcatacacttttgagtgttaattggtatagtctctacagagggctatgtggagagagaacatggtggtatttctcaagatccttaaaagtgtttctcttgactcatcaagactacgaacttattttaaggaagtagtcagaratggacataaagagttatgtgaaaggaatttcaccacagcttcccttggtaacaaaaaaacaacctggaaacaacaatcatcaatggtcagtaaaatcattaagtaaaatacaaaatggaaaamtttataacagaagaaatgagcagccaccacttgaacccacttatgttagtaccactaaaagtgggacagccaaacattatgtgcttgctgatgtggtatgaaagaaaatacacagtaccatctataaaatattcttacctaaagtcttaaaagtgaatctaattatgtctctggatttaactatcaatttacaagacatatgggagataagagaacaagctaattgaaaccatgaggatgcaatcagataaatccagaatgtggaacatttcatagaacagtggctaggcttttccatcatattgattgcatttaaaagagcgaatcagggacacttgagatacctaacaaaaaatgcagtttgtaggtattgttggatcctggtttgaaacattaactttatcccagtactttgggaggccgaggcgggtggatcacgaggtcaggagatcaagaccatcctgactaacatggtgaaaccctgtttctaataaaaaaatacaaaaaattagctgggcgtggtggcggacgcctgtagtcccagctactygggaggctgaggcaggagaatagcatgaacccgggaggtggagcttgcagtgagccgagattgcgccactgcactccagcctgggtgacagagcgagactccatctcaaaaaaaaaaatttttttttaaggtaattgaggaaatctaaaaacaaactaggttctagatgacgttaaggaatttataactcttcttttggtataattattgcatggtaatcatatgaaacccagagtccttattagagatgtgtattgaaacatttttagtgacatgacatgtctgtgacttgctctaaaatgtagtttaaggtcattaaaatgctaattactctgatttgatctttatacattgtagacatgtattgaaatatcacactctaccccataaatatgtatttatatatttataatacagttattatgtataaattaaaaataatagtaagagctgggcccagtggcacatgcctgtagtcccagctacttgggagctaaggtggaaagactgcttgagcctgggagttgaagtccagcctggacaacatagccagacctggtctctaaaaaattatttaatataataataataaaggcaaaaaaaaaattaatgtggttgttcctcagactcctcaggggattggttctaggatccccctcagataccaaaatcctctgatgctcagtgctcaagtgccttgtataaaatggcatagtatttgcatatgacctatgaacatcctgccgttttctttgaatcacctctaggtattacttataatacctaatacaatgtaagttctatgtgaacagttactatattgtatttttaaatttgtattattttttactgtattttttattgagttttttcccaaatatttttaatacagatataggaaggccaatttactccaaaaatattattaagggtggaggatgaaaaaaaatcagcaaaatgataattaccaaagagggatgatggatacatgaggtttcatttttctattctcactgctttgggtatgtctgcaaatttccataataaaaaaaaaatttgagagtactgccccagagaagctaacagtatggtaaaaattgaaaacatctggttctaagggtttcagataagggactatgaagctgtagttactgctaaggattagaaaaggtttcaagcttctgtgtgtttcaagaactttatatttccatgaagcctacagcattagcccacagcctcaccaattatcaactgataactgaatcagttgtcaactgtaattgataaattaacaattatatcagctaattcaaagattactttttttttttttaaagaccaggtctcactatgtcacccaggctgggatttttttttaaaaccaagacagctttgaaaagaaacctgagtctaacctttgccacatcacaaatgtttactactggtcacaaatattgatcagcaagagtttgtgcaaggctgataaaaattccttctctgaaactaaaaataaatgaaagtactataaaagcaggacagtattttcagatcctaagactacttaagcttgattctttagtgctttttatttagaaaggtgttatcagcaatcagttctgagactagtttctgttattgtctctacagtaatactataagaaataactggcaatacatcctgtgctccaaaatttggcaggcccaaagcaaatgtttccaattcaatccacatgaacagaatcactgccgggaatataaaacaaaatatatatatatcactaggttctataaattttataacctgtaaacactcaaaacaattagaagtttttcttatcagttcttctaagaatacaactgcacaatttataacaaggatgaatttgttttcctaaacctggagtatgaatctttctaaaatcatgacatctaatgccagaggttaaaattgcttgactgccctcctttgaattcattaagcatatttaatgtttacccctataatggcttctctcaaatgagaaaacacttctgtgagttgtttttacttattcagataaaggcctcagtattaccttaagctgtgtaggttctagtcatatacctcaatatatgtgtatgtatgtgtgactgttatatatattcatataaatgtatgaatatatatacacacatccttaacatatttcatgtatatctcataatattgttctgttaaataatagctgcatactgtaccatataaataacctgcttttttcaaaacaacaaatacagtatagtaactgttcacatagcacttacattgcattaggtattataagtaatacctagaggtgattcaaagaaaacggcaggatgttcataggtcatatgcaaatactatgccattttatacaaggcacttgagcactgagcatcggaggattttggtatctgagggggatcccagaaccaatcccctgaggagtctgaggaacaactgcattaattttttttgcctttattgtattatattaaataattttttagagaccaggtctggctatgttgttcaggctggacttcaacttcatcccacaaattgtaacaattaaaattgtctctagacattacaaaatgtcccctggggggcaaaatcttccccagttgagaactactgaatcctcggtgcagtggctcacgcctgtaatcccaacactttgggaggccgaggcgggtggatcacctgaggtcagagtttgagaccagcctgaccaccatggtgaaaccctgtctctactaaaaatacaaaattagccaggcgtggtggcgcatgcctgtaatcccaggtactcaggaggctgaggtagaggttgtagtgagccgagattgctccattgcactccagcctgggcaaaaagaacaaaactccgtctcaaaaaaaaaaaaaaaaaaaaaaaaaaagaactactgacctaattagactgatcaaataattaggatttttagcattaaaaaatttatctagctagtgagatagaaataaaattgtgggccaggtgtggtggctcatgcctacaatcccagaagaccaaggccaaggatctcttgagcccaggagttcaagaccagccttggcaacatagagagaccctgtctataccccccacaccctccaaaatagtgtatgttgagatcaggctttatttaaaaagatacattgtcaccagcccctttataaactgccccaacatgtatagctatagctaatctctctgtctatttgttggggagtttctttccctagtttgattgtaaatgccatatacatttatttcattatattagcttgcctggaaaaatttgaatagaagttgccttgaaatagttaattgtgagctaatatttagttaaaaactgtggcttacttaccactagatggacccattctcatgatgaagaaaactgaaaattgctttaaacaaaaactgaagacgtatctaagcttgtagtatacctaattaatggattttttaatatcaaatacataatctcccacatttttctatagtggtttgttttgatggttttgtaactttataaccctatctataaatgttttgatgtataactgaaccattagactaagactttttgtatttgcatataaagaatattaaaaggaaaatggtactttcctagattacatatcttcacatgacatattagctaattggcaattattattacatttcctattcataaaaatatttaatcttgcaagagtaaaaattggatacaaaaacagtagcttaggtgagaaacatcgaaagttgaaatatttgttgcttgaattggtctgaaatagaagatagtaaggaaatttacatgttgggttaagatacatgaatacaaaaatgtgtttatagtgcacatctttgtgtggcttttttgaagcactttttcttacaaagcaatggagataatggaatttatagattttcttggtcatagctatttatttctaagtgatgtcttcagttcaaggctgatctctttgttttttattttcttctttcagaaacttaatttcacttatatcgtttctattattgtcaagctttgtggtttaactaggttcttgtcctgagcctgtaaacatacctaaacttgttaaataatcccctcccgctgaaaaaaaccccgtacccttctttctgttttgcattccctcttccctttctcagctgactttttaaaagaatctatacttgaatccattttttcctatccactttgttgcagtctggagtcctccctcagcactgttttttgtttgtttgctttttaagactgtgtctcactcagtcatccaggctggagtgcagtggtgcaatcatagctcactgcatcctcgacctcctggtctcgagcaatcttcccacctcaacctcccgagtagctggtactacaggcacttgccaccatgcctggctattttttaaattttattttttgtagagacagggtcatactgtgttgtccaggctggtcttgaactcctggcctcaagtgatattcccgcctcggcctcctaaagtgcagggattacaggcatgagccactgcacctggctagcactcttaatcaaatagtgattttccattctaatcattatgtgacatctaagcactcataacttagaaaatttcctttacttggcatacatgaccctgtgtttttgttctttgaagcccatcatggttcattctcagtcttttttttgagatggtgtctcgctctgtcgcccaggctagagtgcagtggcatgatctcagctcactgcaatctctgcctcctgggctcacgcgattctcctgccgcagcctcccgagtagctgggattacaggcaaccgccaccaaccccagttaatttttctatttttagtagagatgaggtttctccatgttggccaggctgattttgaactcctggcctcaagtgatccgccaccctcagcctcccaaagtgctggggtggggattacaggccagagctataatcagccgtgggagtggtttttctaaactctgataattttattgccatgcttaaaattctttactatatctccattgcctttataatctttagtatgtttcacaggtttttttaggattttgaccctttcattttctccaactgcatttggcatttcttaccacagctcatattctagccattctgatttatttatagtttgccatatgtgcttttttgattaatatatttacatttgcacagattgttcctactgtctgcagttccattgtataaatatccttttttattgagagttgttcaatgactaaggtttttattctaaatattaatggtcattttattataccaggaatgtagaaattggtgatttggctcaattgatagttgttttcaaaaaaattttaaaagtagcatgttttgtggtgggcaggcctatgcaaacctattctcaaagtccaaggaagcaaagaaaccaaagaaagagactgacaaatccggtttcttagaaagatatatttaatagggacttaaaaagaaaccagtcctgcttgtcaggtggcagtgagataagatggtggatccccaccattactcccaaggccagggcttataaaccacaggaaacaggtgattcagaagggttaagtagaacaagtaagtacaatcacatcaaggttgtttttacctttgggcaggatttatagttaggacatgctcttacacaaagaacagtagataaactagaaatcttagaggccttcccagaactggggttaatcagaagtcaacataggcagattagcatccaagatggagttgctttggcctccacatagtaaaaaatttttttggaaagaactcctaccataatatacaaatgagattaaagtgatttttttggcatatatttttaaatgtatcaaatgtataacctgggtttttgataaagttcattgctgagaacaaggccatattgatgaacacaaatatttggattatgttattaatacaaactacagacttataccagcatctcactttagcatctagctaaaaaaacaacatattgagatataattttatataaaacagcattcatttaaattgtacactctgatgatttattttaatttttgagacagtgtctcactctcacccaggcaggaatgtagtgacgccatcacagctcacagccccctccacctcctggactcaagcgatcctctcctctcagcctctttagtagctgggactacaggcacacaccaccatgcatggcgaatttttgtattttttctagagacagggtttcaccatgttgcccaggctggtcctgaacttctgggctcaagtgatctacccgccttggcctccaagtgctgggatcacaggcatgagccacctgcctggaagaatctgaggtttgatagatgtagatactggtaaaaccacagtatgagggttccagttcctctacatcctcaggaacacttgatacggtcactcttttcaattttagctattttaatgaatgtatactaggatctcattgtggttttaactcgcattttcctgataattgatgatgttaagcaacttatgtgcttcgtggtcttacatattttgttttgtaaagttcagatcttttgcccaggtttaaaaaatactgtgttatcttattgaactgtaacagttttaaaaaaaaatttttatttgtatcagcaaatattgcctgacaaaatagttctttatatattccagatataagtcctttgccagatatatgggttgcaaatattttctgtggctttccttttgcttttttaatttaaatttaaattttaggttcagtgggtaacatgagcaggttgttataagggtatattgtgtgaggcaggagtttgggcttctgttggttttattacacagatagtgaacatagtacccaatagggagtttttcagcccttgcccttgttcctctcttcctcctattggagtccccagtgtttgttcctgtctttatgtctgtgtgtacccaaaatttagctccagcttataagtgagaacatgtgataggtggttttctgtttctgcgttaattctcttgggataatggcctccagctgcatccatgttactgcragggatgtgatttcattcttttttatggctgcatagtattctatggtatatatgtactgcattttatttacctagtccaccattgatggacacctaggttaattccatgtctttgctattgtaaatagtgctgtggtaaacatacaagtgcgggtatctttttggtagaatgatttgtgttcctttgggtatatttccaataatgggattgtgggtcaaatggtagttctatttttagttctttgtgaaatctccaaattgctttccacagtgactaaactaacttacattccccccaacagtgtataagcattcccttttctctgcagcctctccagcatctgttattctttgactttttagtaataaccattctgactggtatgagayggtatctcattgtggtttttatttgcatgtccctggtaattgatggtgagcattttttcattcttgttgggccacttgtatgtcctcttttgataactgtctgttcatgtccttttcccactttttaatgggtttatttgttttttgcttgttgaattaagttccttgtagattctggatattagtcctttttcagatacatagtctgtgaatattttctcccattctgtaggttgtctgtttactctgttgatagtttattttgctgtgcagaagctctttagcttaattatgtcccacttgtcaatttttgtttttgaggacttagacataaattctatgcctaggctgctgtccataaggctatttcctaggttttcttccaggatttttatagtttgcagtcttacatttaagtctttaagccatcttgagctttttttttgtatatggtgataaataggggtccagtttaattcttctgcatatggttagccagttttcctagcacactttatcgaatagggagcccttttcccattgcttatttttgtgactttgttgaagatcgrttagttgtaggtatgtggctttatttctgggttctctattctgttgcatttgtctgtgtgtcttttttttgtaggagtaccatgctcttttggttactgtagccttattagcatagtttgcggttggttgtaatatgatgccttcagctttgtcctttttgcttaggattgctgtgtctatttgggttctttttttggttccatattttataatagttttttttcttctgtgaaagaaaaatgctgttggtaatttgacaggaatggggttgaatctgcagattgctttggacaatatggacattttaacgatattgattctttcaatccatgagcatggaattttttttatttgtttgtgttgtctgtgatttctgtcatcagtgttttgtagttctcctagtacagatctttcacctccttggttgggtgtattcctaggtattttatttttttgtgtggctgttgtaaatggaatcgtgtttttcatttggctctcaggttgaacatcattggtttatagaaatgctattgatttttgtatgtagattttgtgttctgaaaatttactgaaatagagaacatatgatgtcctctcttcctatttggatgccttttatttctttcttttgcctgattgctcttgctagcacttctagtactatgctggataggagtggcgagagtgggcatccttgtctggttccttttcttaaggggaatggttccagcttttgtctgttcagtattatgttggctgtgggtttagcatagatggttcttattattttgaggtatgttcttcaatgcgtagtttgtttaggattattatcatgcaggaatgttggattttgtcaaatgcttgttttgcagccattgagatgatcatgtggtttttgttttgaattctgtttatgtgttaaatcacacttactgattttcgtatgttgaaccaacattgcaacccaggaacaaagtttgcttgaagcagtgaattagctttttgatgtggtgctggatttggtttgctagtatttttttgaggatttttgtgtctatgtttatcagggatattggcctacagtatttttttttgttgtgtttttgccagattttggtatcacaatatgttggttttgtagaatgagttaggaaggggtcccttctcttcaatttttggggattgtttcagtaggattggtaccagctcttctttgtatctctggtagaattgggctgggaatccatctggtctagggcttttttttttttgttttttttttttgtttttttttgagacagagcttcactctactggccaggctggagtgcagtgctgcaatcttagcccactgcaacctctgcctcctgtgttcaagcaattctcatgcctcagcctcccgattagctgggattacaggcgtgtgccaccatgcctggctaattttttgtgtttttaatagagatggggttttgccatgttggcctgtctggtcttgaattcctggcctcagtgatctgcctgcctcagcctcctaaagtgttgggattataggtgtgagccactgtgcctgactagggcttttttggggttggtaggttttttataactggttcaatttcagagttcattattagcttgtccagggtttcagtttcttccttcttcagttgtgaagttgtgtgtttccaggaatttattcattttctctagattttctagtttgtgtgcatagaggtattcagaatagtctctgaggatcttttgtatttctgtgtggttggtcgtaatgtcacctttgtcatttcagattgtgcttatttggatcttccctctttttttttctttgttaatccagccaatggcctgtcaatcttgtttatcctttccaagaaacaacttttcatttcactatatggttttctttacatggctttttgggtctcaacttctttttgctctgctctgattttaggtatttcttttctcctgctaattttgggatttgtttgtttttgtttttctagttcctttagatgcgatattagatagtttgagatctatcttcttttcatttctttttatttttggtggcagggtctcactctgtcagccaggctagaggtcagtagcacgatcatagctcacagcagcctcaagctccagggctcaaacagtcttcctgccctagcctgagtagctaggattacaggtgcatgccaccatgcttggctgattttcagcatttttttttttttggtagagatggggtcctgctttattgcccaggctggtcttgaactcttgggctcaggtgatcctcctgccttggcctcccaaaatgctgggattacaggtatgagccaccatgcccaggcctttctgtcttcttcttcttctttttattttattttttgaggtagggtcttactttatcacccaggatggaattcagaggcacaatctctgctcactgcagcctcgacctcctgggttcaagcaatcctcccacctcagcactccccaagtagctgggactacagcaatttatttattttattttttgaaattttttgtagagacaggagtcttgctatgttgcccaggctggtttcgaactctagacctcaagccatctgcttggcctctcagagggcaagaagtacaggcatgagccactgcctccagccatttctatcttcttgatgtaggtaggcatttagtgctgtgaattttccttttaacactaattttgctgcatatcagagattttggtgtattttacctctgctttcatttgtttcaaagaatttttgttttctttcttaatttcgttgtttgcccaaaagtcatccaggaggaagttgtttcgtttccatgtaattgtgtggttttgagtgtttatcttggtattgatttctatttttatttcactgtggtccaagcacatacttggcatgattaagattaaaaaaaaatttattgagacttgctttagtacccatctggaagttcttgttttatgaatctgcgtgctacaatattgggtgtatatacatttaggatagttaagtcttcttgttgaattgaactttttatcacgtaatgatcctctttgtccttttttattgctgttggtttaaagtttatttatctgaaacaagaatagcaacccctgctcttttttgtttttcatttgcatgatagatctttctccatccctttactttgaggctgggggtatgagttagtttcctgaagatagcagaaggatgggtctttttttatttttttcatttttaaattcaacttgccaccctgtgtcttttaagtggagtgtttagactgtttacattcaaggttaatgatacgtgagatttttttcctgcggtggtgctgttggctggttgctttgtagccttgattgtgtagttgttttatagggtctgtgggctgtgtacttacgtgtatttttgtggtagcagatactgtttttgtttccatgtttagaactcccataagcatctcttgtaaggccagtctagtggtaacagattcccttagcaattgctaatcctgcaaagattttatttctccttcgcttatgaagcttaatttggtgggatatggaattcttggctggaatttctcctaggatgctaaatataggcctccagtctcttctggcttataagatttctactgagaagtctgctgttagcctgatgaggttccctttataggtgatatgactctttttctagttgtctttaagattttttcttttacatagaccttggaaagtctgatgactctgccttgatgatggtcgttttgtatagtaccgtacaggggttttctgagtttcttatattagcatgttgacctgtctagcaactttggagacatttttgtggattatatcctcaaatatgtctttcatggtgcttactctttcttctcaggaatatcgtgggttgtaggtttggtcactttatgtaatcctattatttctcagaggctttgttcatttgttgaagattctttttctttatttttgtctgactcagttgcttcaaaggattggtcttcaagctctgagattctttcctctgcttggtttagtctgttgttaagcatctcttataaggccggttgttaagatttttaattgtattttgaaattcctgtggtgaattgaatttcagattggttcttccttagtatagctatgttatattccaaatcttggattgtttttctgacttccttggattggatttcaaccttctcttgggtcttgttgagcttccttgccatccatattctgaattctgtgtctataatttcagacattacgttctggttgggatccattgctagggagtatatgcaatcctttggaaataacaaaacactctaactttttgaattgccagagttcttgcactgattacttctcatctgagggaactggtccttctttttgtttttgaatttgctgttgattgaatgggttttttttttttaaatattcttttttcccttgagagtttgatggtggtaaatgttgtgtatagtcagttggcttcatttctgggtgctttcagagggccaaggctctgtatgagttccttggttgtagataggtttctatgagggtttcacaggctttgcatgttgaagcagtgtattttgttttgctgtgtaattcaagctgcagttggtgcttaaatataagggcagataggctcttacacagctgcgcatgctccctttgtatttcattgtgtcctcagcagtgctctggagagaggacgcagggtaagagatgactttctctcatagtctgttcttaagccttggtggtatccccctcagctactggcactgtctcacgtttcctttgctctgtgtggggctttggtgggcttctcttcctgctcgcttagatatgattcaagccaagggttaggccaccaggagacctgaaactccttagggacctaccagtcccctgtgcttgtcagtaagagtgggttgtggggtatgtctgcaggtggtctggtaatgcagtgggtcaagcaagggtggtagatcctcaggcagggaagtggcaccgtatgtgtgtgtagccagtatagtgaccatggcccgggtttgcagcccagccgatggctgtgtggccctcacaacttgcactcccctgacctggttggtctctgtctgatgtctgtctcaggagcaggcgcaaccagactggccaggcttgtctcaaaagccctgcgtgcccagttcgttgagccatttcagatgctccaagccacggagcttcctggggaagaaaccttggctggctgtcaggccacacccatcctggactggtcttctgaagagaggttgcttagtttccatgccacactcttctctgtattctgagagtgaaggctcctttcctgcccaagctcaggccacagagcttaactcaatacccctgggcagtgtgcttgagtcctggggaagtgggaccaggcctgcacatttgtcctctggccccttaggatcagccagcaggctgccagcagaacactcaggcagggaagtggaggctgttctgtgggcactgtcttgcaggagcagccaggcaggcagtctttgaagagttggcaggcaaaggggcatgtggatcagatacactatggtcctatggcagtggcagtcttactctcttcgccctgcagatagcaggacctgcagccactcagtacaagctggagagccttggaggatgggccctatggtggtgttttgctgcagctgcaccgtggtctgtggggctcatggctagaatcttgtagctaggatcccagaggaccatggtgggagtgtggtgccccagggttcctttactcagccctcccttaggtccacactggaactgggggccagtcctggtgcctagttactccaagcagtctacgtcgcttcttccctcttcaaacactgtgtctgctttgcctctctattggctttcagtgttttctctcaaaagatctgttcaaagttgcaggattttgtattgtcaagttttggtggttcaaagtgtggtggcttacttgatattttggttccttttcatggaagaggcgtttttcagctgtaggtagttggccgtcttgcctagaactcttttttatattcttaatgatgtctttcaaagagcaaacccttgctattttgaaatagtctaatttatcagtatttttcttcattttatgctttttgtgttttatctaagaaactttttctactctaagcttgcaaagatttactcctgtattttcttctagaagttttgtaaatctagctagtttatttctatatttgatcttagttgcactgtatcagtatgatctatatatacagagaagaataatttgtagaaggtaatattagaaagatacaggctgggcattgtggctcatgcctgtaatcccagacttggggaggctgaagtgagaggattgcttgatcccatgagtttgagaccagcctgagcaacataatgagaccctgtctttaccatagaaaaaaattagctggggatggtggtgtgagcctgtagttccagctactctggaggttgaggtgggaggatcacttgagcccaggaggtcaaggctgtggaacctgatcatgctactgaactccagcctggttgacagaatgagatcctgtctctaaaaaaaaaaaaaaaaaaaagatacagcttaaatattaggatatcctttaattaaatagaaataacaggaaaagcttcattttgaagactgtaggagagtcagcaatattgtcatgttttaattactattttcaaactagttatattcgtctcttctcacataaagatactactcgagaatgggtaatttatgaaggaaggaaatttaatggactcacagttgtgcatgcctggggaggcctcagaaaacttacaatcatggtggaaggggaaacaggcacgtcttaagtggtgagaaaagagagagggcatgtgaaggaggaactgtcaaacacttacaatcttagtggtgagaagagagagagagggcatgtgaaggaggaactgtcaaacacttacaaaaccatcagatctcatgagaactcactcactatcacaagaacagcatgggggaaaccacctccatgattcagtcacctcccaccagatctctccctcatggggattgtggggattacaaattgagatgagatttggacggggacacagagccaaaccatatcagtagttaaaatgatcttgaatatgttctgagaaagagtttaagaaaataaattttctttcctagctggtttctttcttttaaaaatttatttagaaagattataacctaacttgaaaatacagttagttggtttctagagagcttcaaggtaacttaatttttattgtactatatatctatcagttaattattttctgtagctagtcacttttgttgattatatttaattagtatcaggccccatatgaatttatatttctattagtttatttgctctgttctagcttctggattttagaaaataggatttgactattttgcaaatatatgccattgatcatgaagaggaccgttttttttctactagagaaatttaaagtttgagggtcagaaggatcttgtgtgtatgtgttttatgtgtccttttgagttgtgtgtttgatgaaaatacctccttatttaaaatgcttggaatcttctagctttaggagaacttgttaaacagtagagacagttttacatcaataaacctatatattacacttaaacttctagctagttataaattagattctaagcaattcaaactgacaagttttcaagttataagggtgtttcaagttaaaaaattaaaaaatgtaattattttataaactagctgaaatgttttgattgcaggttggaattttaaagtaaatgtggcctctgcagtgatttgttaattttaaccaaagctactttattttctaggtgttcattgtactcatggcttcaatcgcactggtttcctcatatgtgcctttttggtggagaaaatggattggaggtatttgtatcttgttataatggaagatgtattttgtaataaaaaattttattgatattttagttgcagaattttgtattgtcaagtttttggtgaactcatgattaatgtaatttgaactgcttttcattttagatatggttaatctttatactaccattacttggtgtgtgtgtgtatgtgtgtatgtgtatatatgtatgytttgttttgttctttgagacaaggtttcctctgtcatccaggctggagtgtagtggtgtgatcatggctcattgcagcattcacctcttgggatcaagcaatcctcccgcctcagcctctcaagtagctgggaccacaagtatgtgccacccatgcctggctaattttttcttttttgtctagtgaggaggtctccatatgttacccaggctgatcttgaattcctgggctaaagttatcttccacccttggcctcccaaaatgttgggattacaggcatgagccaccacacccagccaggtgttttgcattaaccagcaaatcactttgagtgcttatgaatttcataaactgtatattcactttttcagatttttttcacctcttacagaattatcagagacagattcttccaatattttgtattttagtatttttgggagagtgttactccatttaagccaatcaacatgtctttattgagcatctgttatttttgaagtgtgtttttagatcctgagagattacgactttagtacccaatattcttaagagaatatattactaactgaattttcttgttgactgagggagcatcattatttatgtttacaaagattttcacatagtaggtccttttttgaatataatcagttgaagtacacatatgattttgaattttgcagtatgcattgttggtggttctgtactgcatgtactttctagctctgaccattcagatgctctccacaatgatctcagtttcctatgtcagatttagcctatgcttatcctctctttgatgatctagactcttagtgcctggatctgttgaaagttcctgtaaaatcaatatgcttttactttgctcacattgttgtttttttgactgatgttttgctgcagagtcagacctcaaccttcaagactaaattcttcacagaccctatctaggtctctactatatactcatagcaatttatttttagaatttcagaattttctgaataccttatattaaaaccttttcagaatgaatgtgtcccttaatagattgaatgacttgagggtgaggattgtgatttgcccattttataaacttctgttgtactttatatggagccttgaatataataagtgagtttttgataagcctgcataaatagaggatagcgaggaaatygcatggtgtttgtttcctatagtatcgaagcagcagttgctacttttgcccaagccagaccaccaggaatctacaagggtgattatttgaaggaactttttcgtcggtatggtgacatagaggaagcaccacccccacctctattgccagattggtgttttgaggatgatgaagacgaagatgaggatgaggatggaaagaaggaatcagaacccgggtcaagtgcttcttttggcaaaaggagaaaagaacggttaaaactggtaatgtttaaaaatattataataggttttttttttcctttttctgcaagcttattgagatttataaaaatggaatattggccatgtttctttagctaggtttgtcagatgattcatcctagccctttctaaaaaaaaaattttttttttttggagagaaagttttgctctgttgcccaggctggagtgcagtggcagccttgaccttctgggctcaagtgatcctcccacctcagcctcctgagtagctgggactgtagacatgtgccaacacgactggctaatttttaatttttacattttctgtagagaaggttctcactttgttgaccagtctggatttgaactcctgagctcaaagtgatcctcctaccttggcatcccaaagtgttgggattactggcattagccactgtgcttggcctttaaaggttcttaatagccacgagtctgtcttttcaaagagaaaaattgcagttacgtaaatttttcctgtttttgtttcttatgtctttagatattagataatatctaaaagaacttttagatattagattgagaacttactatttctttacaaagtattgtgagatttcaactaaatacctagtgaatatttttactaatgctttacaaaattgtcacataattaaaataactttacatatgaattctgcatccccctccctgggtgatgctttcatggtttccataaaattaaatcaagaagactctcacttctctagccaacctttaataatcttctagaaataaaagagctaaccataaatatgaggagttatcttcttttactggaggataggggaactgttgagaggaaaagtattggttgtacttgtacacacacaagtatatgatataggccaaagggaaaagttagggaaagtatggaggtaattgtgttaatgaaattattaattaaggttcctagtatattatggttgagtggtatataccacgactcatttattagtaggcatggttcacaggcaaggaagtaaatgctttgttagtttatgtaaaccatgtaagttatttttggcttaaaaatttttttttgtttgtaaaacaatgttttaattgcatttacacattttaaatttcaagactataaggacactgaaaagtgtaaattgcttcgaaacatagaaattatttcaaaagtaatttattattttattctgatttattatttcctggatttagatatctgaaattactgagtcacatacctagaaaaataacaatcacattctaaggaaacttcaataagcagcatagcataaaatataggttttgtttgtttgtttttggagacagggactcaactctgttgctcaggcaggagtgtggtggcatgattatggctcactagtggcagcccagccttgacctccctgggttcagtgatccttctacctcaacctcctgagttgctgggactactacagtgtatctcttacaagcaccatgttgctgggttttatttattcaggcaacagtttttgccttatcatttagtccatgtacatttcatgtaaagattagattcaaattgtcttactctttttttgtgccactagtggtatgttcctttcttgccttctttatggttgcttttattcttctattaccccaacccattgcttgttgaccatacattcctttacttttcttttattagttactcaagatttcatggccaggtgcggtggctcacgcctgtaatcccagccctttgggaggccgaggtgggtggatcgtgaggtcaggagatcaagaccatcctggctaacatgtgaaaccccgtctctactaaaaatacaaaaaattagctgggcgtggtggcgggtgcctgtagtcccagctactcgggaggccgaggcaggagaatggcttgaaccccagaggcagaggttgcagtgagccaagattgcgccactgtacccagcctgggtaacagagtgagactttgtctcaaaaaaaaaaaaaaaaaaaaaaaagatttcactatacatctttttaaaggctggtatatattagtacttttgtcactttttagacaatgcaaaaatcttatttgtttatttttgagacagggtcttactctgtcagtcaagctggagtgcagtggcttgttcatagctcattgcagctttagatccctggggtcaagggatcctcccacctaagcctcccaagtatctgtgattacaggtctgtgccaccataccctgctaattttattattttttttgtagagacaatgtcttgctattttggcagggatagtcttcaactcctggcctaaagtaatcttcctgccttagcctcccaaagtagtaggattataggtgtgagctgagccactgcgcttggccaagaattttacaatcttttattccatttacttattcctatcttttttggtattgtgttttttaattctatgtgtatcttaaaccccatgatgagaccttttatttttatttttatttttttttaaagagataggatctcactctgtcatccaggctggagtgcagtggtgtgattgtagctcactgtactttgaacttctgggctcaagctatcctctcatcgcagcctcctgagtagctgtgactacaggtgtgtgccaccatgcccggccatggcatttttatacagctattattggttaggtatacccacatatttaccctttctgctgctctttctttcatgtatttttgkggttccattttggatagttttccttctaactgaagagcttcctgtattatttccttccatgtgggtatgctgttgcacattcttttagtatttgtgtgaaattgtctttttcgacatcattttgaagaatgttttttctgagtataaaaatcagggtggttagctgggcgcagtggctcacgcctgaaatcccagcactgaggcgggcgaatcacgaggtcaggagttcgagaccagcctggacaacatggtgaaaccccgtctctactaaaaatacaaaaaaattagctcggcctagtggcaggcgcctgtaatcccggctacttgggaggctgaggcaggagaatggcttgaacccgggaggcggaggttgcagtgagctgagatcgcgccactgcactccagcctggtcgacagagtgagactccatctcaaaaaaaaaaaaaaaaaaaaaaaaaaaaagatcagggtgcttgacagttattttttttctagcactttgagtgtttcattccagaatttatttctgttgagaagttagctaccttgttgcttctttgaaggtaatttcttattgtttttgattttcagcagttttaccatgatatttctacttgtggttttctttgtatttatcctgcgtggtgtatgtaggaattcttaaatatatagttggagtttttttcctaatttgttttagacaatttttggctgttatctttttaagtattgtttcagatctatttgttctttcttctggagctcaacctaataccagtaggcctttaaatttttttttttttcttttttcttttctggagacagtctagctctgtcaccaaggctggagtgcagtgttgcgatcttggctcactgcaagctctgcctcccgggttcaagcgattctcctgcctcagcctcccaagtagctaggattacaggtgtgcaccaccacacccagctaatttttgtatttttagtagagacagggtttcaccatgttggccaagttggtctcaaactcctgacctcaggtgatccacctgcctctgcctaccagagagctagcattataggcgtgagccatcgtgcctggcctaaaattttttttttttttaaaaactgtttcctgtgttcttttttatattctttatctttttgtttatttttttagtttggatattttcttgttttttttttttattctttttatttattttttttgagacagagtctctctctgtggcccaagctggagtgcagtggtgcaatctcagctcattgcaacctctgcctcctgggttcagacgattcttctgcctcagcctcctgagtagctgggactattggcacctgccactacgcctggccaatttttgtatttttagtagagatggggtttcaccatgttggccaggcttgtgtggatctcctgacctcaggtgacccacctgcctcaacctccgaaagtgctgggattacaggcatcagcctactttggatattttcttctgacctatcttggcatttactaatgtcctcattaagctttgtctaagctgctgttaaactcatccattgactacttaattttaattattttactttcactcctggaatttccatttgattttttaaaaaatgattttcagttctcttctggaattcttcatcttgtcatttcagtttttgaaaatattaaaaccagtttttaaaaagtcaaataaaaagtaaaactaatatgtcggtctcctgtggatctttttttaagttttttttctcgtgtccttttgatatctagtcaattatagtttttttttttttgcatatttgagtatttttgattgaatactagacattgtttatgaaaaattatgtaaataatttgaggctctggtcatgttatctttctttagagaggatttacttttgcttctacagagaattaggagcagaatatcttaattaaggattgagctgttagaaactagactttagttttggggcagtggtctatttttgctctgctcttattcctatagcctgtgaggatcttcattgaaagtgtggggaattaaattggactccttccacttgaagacctgtaactccagcttttatttcccattgctgtgatattactgaaatttctgttcagcttcttagtgtcttagctaccatttttgaaacagtgcctctagaggagagtactagaaaggaaaagctgtagaagatgtctagctcacctctctggcctcccttcctcctgagtttttggcccttcaagtccttattgcctttctaattctctgaggtcttcaaatgaattctttaacattgtccagcttttttttttgtggctacaaagttagtctaattaggctgggtgcagttgctcacacctgtaatctcagcactttgggaggccgaggcggaaggattgcttgagctcaggagtttgagactagcctgggcaacgtagtgagacctcgtatctacaaaaaattaaaaaattagccaggtgtggtggtgtgcacttgtagtctcagctacttatgaggctgaggtggggtggattgcttgagcctgggaggttgagactgcagtcagtgagctgtgatcatgtcactgcattcacctgcacttcaacctaggtgacagagtgataggctgtctcaaaaaaaaaaagccgaaaccttctttctctctttttggagaaagcaattagtcttgatttctgttatgagttggtgatttttgagaatatttgtgcttatacctccaaaggccgaattaggaaaaaaaaaaagttctaaaaccttatgccttttggtagttttttcttttttcaaaccataattagtaaatcctaaaattattaaatattttactcatataagtaatatattaaagatgaaagaacattaatctttagtttattaaagaaagtttgaaaacgaaagaaaacttataatccttcaactttcatactaccattggtattgttgtctttttagaataatttttccctatttacttatttatttagctttaaaacatacacagatgacttaaagatgagtttttttttttttgtaaaatataaatgcaaacatctaggagtatatagagttaaaaggcaaaatatttcttcattcccaagccatttgctctgtactttttggttatttctttgcatatgcacagaaaacatagtatagaagaataacttagtgtagaagaatatatactggggagatacatatatataatatatatatatacacacacacacacagtatatatactaaaaattatatattgtaaaaattaagtcctatataaaagtaatactagatatactaagaaaggaaaaattaaaaatttttctatttgagaaagcaaatagaacctttctttagaagacaagagaggctatcaatccataaaataatagcaggctattaagaagaggaacaaattagagatcttggaaatgataagattaaaaaaccacttagtatgtgggatgagtagcagaatgaaattatcaagctagaggatctagctatgaaatccttccagcatgcagcatgaaaagacaaaagaaatgtaaaatatgagaaatagtttagaattaacttaaagggagcaatttaacagtatgatttcatggagaggacaaaattcaataaggacggaaagtatttatctgaggattattttctgtggtgcagtagggctgggtcagactggtaattttaagaagctaatggaaggcgagaaagtggagactgagttgtgttaggggttccctgtaccaccctcacttctggagatttattagaataactcaggactcagcatatggttgtactcataactcagatttatacagcaacgtactaaggatatacagctcaatcataagagacaaagacaagtagagtctsgggggagttaatgtgtaggctttcttgtgctctctttttctcatgaggggtcatcctgagctcactcttcctgcagcaatgtatttgtgatgtttctgtccatggaagctcattacactctcactgctcaagatttttattgatggccggtcatgtaggcactctgtgcttagcatgtagcaaaattccaggattccaggaggaaaaaaatttattcagcataaactgtatttttgggacaagtaatctaggtttggtgagccatccttatcagttgactgagaacactccaaaagtcaagttctcaggtgccattcaggagccaactttgcaagcactagtgttaggttaacccttttctgcacactactataaactattcattcaagtggcttggttatgataaaaaaaggagcagaagggtaattgatgcagacatagtcagaaaaggctttttagtatgggataaattcaagcatatttattagtgtggataaggagctagtgaagtcaatgaagttgaaagtaaagatttggggaataatgatagagaaatctctgaggaagtgcaagggaatggaggtcaaatgcagtttttggagtaataggtcttcagcaataggagggaaatatctttcttagtactggagatgtaattgagattgtgattttttcctcagtaagtttcagctgcctatgtatgagagtggaaaagactaacggtaggttgactcaaggctggagaaattcagtttgggtgtgatgaagaacaagagggtaaggggcactgaggctgtcagaggaaaaataattgaagtaatcagccataggttctaggctgaataggaagtaaggtcaggatgagggtgctgttagaatatgtaaaggagaaatgaagggactgttagtcttggtgaaattgaaaagtgagcagagtgacagtaaaagagtttatagtgacatgttagttttagaatgctgtcggcactcaatcaatgtgagttgtattgaatcaaaaggtagagtggtttgaaatgattgtggtagtgccatggagcaggatgttccagttggacaaagatgagggtcattgtaaatgagatgacctattgtaaaggttgtacaacaggtcgagttatttcaatggatgttgatgttaccaatataatgatagaggttagaatagtcagaaagaccaactttttttgatgaatgtagggcaatatctttcaatacacaaaggatagagggttttactagtttagactctctgactgtaaacagcagaaaataacttaaactggcttaaatattaagggtacttattcatgagtaaattagtggaactcaggcactggaatgtgccagattttaggacaatattggaacctggacctggaaagttacttagaacctagtttctgctctttcttcttaatatygcatctctgcttttgtccctttatttgtatcagtcttctcattgtctctgtctctcaagattggctcttcctgattcctgattttcctgggagatcattaactgtctcgaagcttctaaggtaacctgttataattttagccacatgcagagactaactgcttgtctcggaatcccaattccaaattaccaggagagagaatctgatggcttcagattgagttaggggttattcgtgctcccatcaactttggctggagtaggatgttatcttgtaatgtcatgtaaaatagctattaggccccatctttgtgggttgggagggcagcccttaaagagagttgttatgccagtacccacagtggatttctgctttactacagctgagtggtatagctgaaaggaattagtgtaaacacaagagggccttttgaaagagattaggaaagcagtgaggaggtatagaacagtagtttaaattactgccatggatcttgggctgtgggagaataagtagctttaagatgacatgatctgtctagggagagctagcttttagttgagacacggtacggggtgttcaagaaaatggttgaggtgatggggaaggttatttatgaaaaaggaattccagggtttacattggaactctttgggaaggtgattattgataagatgaaccaaggaaaaggggctttaaagcagtgagtacaaaaccatcagagaagaaaggggactgaagagttgaattgtggatggtgtcaactgtagttgacctatggttgacagggatgagaagcacagatataattacttattacatttatggttggaaaagctttcatttttcttttatttccatctgaggttgaagatagttaacagaggcaatctaagagtgactattttatagatcacatctcttgacataatgaaggtatttttggtttgagactttatttttgttaagtacagtcttttctgattcttatattgatataactatgtattcaagtaatggactccttgtaattaattctgatagttctctttgggtttataactgtggcacatgtccgatgctgtgcttggccccttacattcctaagacaccttctttattcatcttttgagtacatgtgttactaagttggaagagtatgacttacaggtatgttgcttactccttgaactgatgtctgagatcatttctttgaatacaacgatgaatgtattttcctcattatgaaaatatgcctgttgtacgtatattcttgtatacattttctctttacacacacacacacacacacacacacacacacacacacacagagctctctctcacataaattgcctccatcttctgtaatatttactaaatttctgtctaaaggatcactcatttctgttgtgatagccatgcagattttaattttaaggctagctgactctgtttatgaaatatatttctataaacatacttttttaactttcgatttttctttattttcacaaacagaaataatttgttgaaaagtgaaaataaatgtcagtgactttaatactcaattatagtatgttcacaataattccagaccgaagacattgctatttaaaatttatttttaaaattaattatttattttttatttttataaatagagatgggtctcactgtgttgcccaagctggtcttgaactctggggctcaagcagtcctcctgactcagcctcccaaagtgccgggattactggcatgagtcaccacatctggccactgtttagaattagtgatctttccattataaagatttaactattttatgctgaagtggccatattttcaaggagtgaaaccatctcatacataacaatgaaggtagtcagctgtagacttggaatgagatcacatatggggatgatatccttctagttagcctagtactgctgtactggtctgtgtgtacatgcggtccttcaactcaggccttgcaaggcatgccggctgtgccatgtttgtaaatggggcagaggaagctacaacaatggaaaactaagctgtttatgttaggtacagctattaaaacaaggtagggatgaggctaggcccttaacttccctaaggcatacttttctagctaccttctgccctgtgtctggcacctacatcctggatgattgttctcttttatccattgtggatttttaaaataaaataaatatgaaaagcatcttgatctcttgtttgtgagaggtgatgccctgagatttagcttcaggaatatgtcatggctcatgcttcccatatttcccagggagggaaatacaggattttctaacactggttaaaaatgcaaattcaagatttggaagggctgatataatgaaataatgagcagtatcagcacgtgcaaagcttgtttaaaagattttattttctcccctcttagaccttttgcacatttagaatcttgaaacagtttctagatctctaacatgaaaatgaagatgggtattttcaggttgctttcagctctaggtagaaataaccagaattggcttacattaaagaaactgcatctagaaataaataaaaaaattagtggtctttcttggagttatataattttgaataatataaaaatggtattttgtcagaactattgtagtaacattaaatagcaaattatgttagcctaaagttaccaaggatgatttgtgtatgaagtgtatcatacttttttttattggacttctacctttctttttacttatttgttgtggaagaaaatagaggaagttaaaaaagaagttgatgcatggtaggaaagattaaggaagaagaacaataaatggatgacagacatttactaggtgattggggttaacttttataaccagactcagtagttgttagatctgtactgatgctcagtatttattggctctgttaaattaaaaatattcagctttttcaaccccatagaaatgttattaaaatatttctgtggtaatattgtgggaaagtgcttggttgaatgtgatcatattttctatgtgttagtcctttttattatatgttaaaaatataaatagtgtttgtgtttttagtagtaacttaggttaatttggcctttgcttttattttgcccatttcagaagttaatgtaaatttcttaactttgcataggaaatccacgttgataaatgaagctagagactttctttgtgtaaaacttaaaaagaacatctcatgctgttaataccatcagaattaggatgcttaatattgaactctctaaaaagaagtgttcttttttaattagcataagaaacaattttttaaggatattgaaattatctgagcactcaataagtaaatatgttacaaacctcatctatctggttgagctttcttttaaaaatactctttttttcctttagctgttgtacttaatgataaaaatggttttaaacagaaatgccattggctagtacagagaaataatggtataatagtagagggatggtactctttgatccttgggcttatgaaattcctaaattttggttatttaaggaaagcaaagtagaagacagataagtacaaaaagtgcttcaaaattagggacaaaaagtaggactagtgtctgctggaaggactcaggattcttccagatttgacaagaatgtatgtggatgaagtattaattgttctttttttcttttctcaagtggctcagattgccaggtctttgccagaaggttgaacgttgtagcttgtagactaacttttttattgcctaattacattaacagctagaattgttttatagatttttcttaagactgatgccagtccctttatggaccttaaaagaactgtagcatacatctagactattttttttaggtttaaaaatttccagaagggttccttatttgtttgatattctctgtctgctttacttcgctgtgatatttcaaaatatgtagttctgagttaaaaaatttagattaaaaattccatgatgagtaatattttgttctattagtatgttaatatatccaatgactgtggcttagccactttgcctacactcttactctggtttacaaagatagaggttttggtgtttatccccttaaagtccatacttcattcatagtaacacagctcctttccccttctctccattggtggttggtatagtgtaggcctgttcaaattctgtcttttaccacttgatttacataaaatctttgtgccttatttactcatctttgaaataaatacagtacagtctattttttcagtgttgtaaggattagagagaatgtttgcaagatgccagacattctgcttggatctcaataaatggtagataaattattattactgttatgatttgagaagtgcctatagagtacatacgtatattgaagaaaaccatgtgctggatttaggaaaactagtgtacaatcttaggggagtttatacagcagaccgtttctgttagatatattgacttgctaagatttgtgagaacaaactaatttatctctcagtctcttctttgtaaatgaatttgaactctaataaaatatttttctttcccttatttttcwtattttttttttaaagggcgctattttcttggaaggtgttactgttaaaggtgtaactcaagtaacaacacaaccaaagttaggagaggtacagcagaagtgtcatcaattctgtggctgggaagggtaataaatatttttaaatttttaaataaaatttrctcttattttacaacacttaatacaagcattgacatatcttcttggctccttgaagttagtatgtttgcaatagaatactttaaaggtgtcagatttcgttcaagacaatcaatgcaataaccagacagttgagtcaaaattagatgactcacatattttcctaaagtaatagaaaattcttgttttcactgtctagtatttgtttcgtgtctttgactctactgctactgattaatgtttgagctagtctctcaatttgataagagggaagaggtgaaatttggatctgcctcattttccagtttttctgtaatcagaagtctaggaaaatcagctttaaatataagcagtgaatgccatgacttgaaaatatctttcagacatttcgtagtggattcaggagagcatacattgctcttatctgttgctctcaggtcttggcctrtggtcatttctgctgatcattggtatctgtggcagagaactgtaatacagttgaatgtaaggaaaaaggattattgttaattcctaatataaattcctaatgaaaagaacttttattactgttacataaatactagataaatcatctagaagtagttttaactaaaatatgaaaacaatgaagaaataagatcggttttaatgttgtgttaaaccttaatcttgacctacacccttggttttaatgttgtgttaagccttaatcttgacccatatttctcctgttttgtcacttctgggtatcttttgaggagaaagttgccaaccttgcagttatgtcaagttggcagtctcacgttggggaaatatggggtctagaatatcatgtaaagtaattaagccaagatttaaacttcttcctgaagtacaagacttgtaaacatacctgctttactatttagatcatatatactaatattttaaaattagctcagtgattataccatagcagtggtaatttagaactctgttaacttgcattctaaaatgtcaagaaaatgataatcttttattagtatttttgtgaaagcggatgttattccagctgacattaatctcatcatagggagaacattgtgataaatgtgtgattcatttgagattggtttaagacatgtattgctttgtatggrtaccagccacgatagtaatactgtgttcttctttaaggtctggattccctggagcacagcctgtttccatggacaagcaaaatattaaacttttagacctgaagccatacaaagtaagctggaaagcagatggtactcggtaagttagacttctaaaaaaattacacaaataaccctaatgcttgaagaatattgttttattgttagaaaagtttacactcttgagagtgtgaatttctaatgtgaatagcaaaataaatgtttcaaaaattatatatttttggttttgctagtgttctaagctgtatagcacaagttatctctcattctgctaaatttttggtttcagagcttrgctagtttaacataaatctataactagatgttaagtttgaaagtgtttttctcttaatgatatggtttttggtatgtctgctgcccactgccttgttttttaatgatattggacatgttgaggttaatagataaattgccagtttgtaatctaaaaatgatgaactctctctgattcattctgtattctcctttgaataatttgccttattctctttatatactcgcaaggttgttgcattattacaacaaagcttaatttcaaattttatatttctaagttttaagatttttttaatttgagacaggatcttgctctgtcacccaggcggcagtgccttagcacgatcaaggctcactgcagccttgaactcctgggctcgagtaatcctcccacctcagtctcctgaatagtagcttagcctcctgagtagctgggattatgggaatgtgccaccctgcctggctattttttaaattttttgtaaggatgaagtctccttatgttgcccaggctggtcaagatattagtagaaattttattcttcctcagcaacattttatttttttcttttgtaatccatatttttttgcatctattacagttttgctatatgtatgtattcatttagcaagttgaaataattattttaacagatattaacatagaagtcattaactatttcataataaaatgttttggaataactggcagtacatatatattagcttttaagtgttattttgaagatgacagattctatttaatttttatgagttttggaaagtcttaagtggcagttatactctttgtatcatgccatctccatctmcatttaacatgtagttaccttaaaagatatatatggagaaaagaagtggagcagatacaacctattttcattattaggtgactataatgatattttaacattatatgctttctagaatgtttaagtattttattatatttgatttttattgggaatatttaaaaatattttcattcattttaattgtctgcctctgttggaaacaatttttcccctcagtttagcattttttagcttttttagggtattttataggtaagacatattcatttgacaaaattcagaaaataacattaaaaaagaagaaaataaaaaagaaattttatcacctagagattatcactactgtccttatggtattgacctttttctctgggttatatggcaggtgtggtttttattattattattattttttgagacgggttttcactcttgttgtccaggctgaagtgcaatggcacgatctcggctcaccacaacctccgcctgccaggttcaagcgattctgctgcctcagcctcccaagtagctgggtttatggcatgtgccaccacacctggcttattttgtatttttagtagagacagggtttctccatgttggtcaggctggtctcgaactccctatctcaggtgatccacctgccttggtctcccaaagtgctgggattacaggtgtgagccaccgtgcctggcctgtggtttttattattaatgctttgtgtactaattcaagtagttaaataacaagtatttgatatttatatgtttatttgttcatattattttgaacttccttaatgaactagccttaaaaattaataataatgtataatgcaaaattgaaacagtgtagaaatgaaaaaatgtgccttgtgtgcttgcagcagttatacaaagaaagatatagatccataaacagaatttggatcatttacccattctgcacccttccctgtggatatgtgtttttgatggataaatgaaaattagcctttctgcttattttcagaatattaaaattatatttatttaatatgttgggttagattatgttcagaatctattaaattggtagtaaggatgttaaggatgttgttgagacatacattttaatagatacgtaaaaatgtcttaacaaatgtcttacttctgtgggtggagaaagagtggaaaacgtgaggtcaaggtgtctatctctaggctttacactacgaaatgaactggggatttgggattgaggcatacatttaacctcttaggagtttcatattttaggtactcttttttttttctgttgaaatttattttattatcttatttttttgagacagggtcctcactctgttgcctaggctagagtgcagtggcacagtgattgctcactgcaaccttgacctcctgggctcaagtcattctcccacctcagcctccagagtcgctgggattacagacatgcaccactatggccagctaatttttaaaattttctgtagagatgtgatcttgccatgttgcccaggctggtcttgagctcctgggctgtagtgatcctcctgccttggcttcccaaagtgttaggattacaggcatgagccaccacatctggccttatatactctttactttctgcattgctttcttcacagtatcatggtaagctttgggcaaaataataaagcctgcaaaatttgtctcttgtttctgccatccaacttttgttgattttgttcctcctctgtagttgtgtacccctttctctgtgtgttggtattgttagacccctagatgattggctaaagtaattttttatgaagtaattggttaagatgtttttgattgctaatggaaatatctaatttctcctagaaccaggctccaccaaaaacaaaaggaaaaccctgagtatttattgaatacctactctgttttaggatacttttttctgggagagaaaaaattttgcaaggtgtttctgggccagtgtaaaatctatcttttgcgcactaggatttaagtacagtagcatggaagagggactttctgtgattgaataaggtgaaaagagcctgaggaggctgtagaatggtcttagaggctatgaaataagagtaactgattaatagctatgagtcctggactccatcgtcgttaaagctatgtcaggatacagtgtaggatttctttttattatccttatttcataatttaatggcaatttattatatctcgtaacaatatttaaaccaaggatctctgaaattgagtgtaataggaaacctggatatagttaacagtaaaaggtattgtgtaagaattttgcattagcctgaccaaggcctgagggcctggagataacagtaagtagagtggctttttttttttttttttttttttaaagaaattgtgttttgctatgttgctcaggatggtctcaaactcctggcctcaagtgattcttccctgttggcctcctgaagtactgggattataagtgtgagccattgaaccctgcctggagtggttttgacaggaaactttaatggatttgaaaacattgtagaatagggaatatttctgaaatgtaaagccaggtaatagaaacagaaatatgaaagttattgaaaatgaaacagtgagaaatttatattagttgtaataggtgaattgatggagactaagccactgtaatctcagaaacagatgaaatgaaagtttgtttgatggaagaattaattgtgtttcgtgtatttcaataaactcatacttttaaaaatgagatgtctttagtttttatagttctgagtacttttggttgcagtttttgatctctaataattaagcatttaaaaaatcttctaatttggaattatgtcagacttagtaagtcttccaaaaatagtacaaagaatttccatgtgcccttaaccagattcctcaaatgttaacatcttatattattacagtacaatggccaaaatcaagacattaacattgatgtattgattattgacgttattcagatttcaccaaaagtgtcaatattatgccctgtttctggtccaggatccagtccaggatcacgtgtttcattaggttgccatgtctcttcttttttctgcaataattctttttttttttgagacggagtctcgctgttgcccaggctggagtacagtggcgcgatctctgcttactgcaggctccgcccgctgggttcacgccattctcctgcctcagcctcccgagcagctgggactacaggcgcccaccacctcgccaggctaatttttttgtatttttagtagagacggagtttcaacgtgttagccaggatggtctcgatctcctgacgtcrtgatccgcctgcctcggcctcccaaagtgctgggattacaggtgtgagccaccgcgcccggcctctgcaataattctttaggctttctttcataactttgacacttttgaatagcattggccagttatcttgtagcttgtctctcagattgagtttgtttgatgtttcctcatgattcaagttgggcatgcttgcaagaacatcacagtagtaatattcttcatgtcatttcaggaggcacataatgttgaattctcctattagtgatgatgttaactttgatctcttgatttagttggtgtgtgccagattgatgaagttatttctgtttattattttatttttggtttgtactttatttattgataaaggcatgtctgccatgataaagttatttttcctttgtacttaagaagctgtgagggagatactctgagatcatgtaaatatcctatttcttatacttttcgccattatttttaacattcattaatgattcttacctgaaacagttaccactgttatgtttgctaagtggaatagtggaattcagctcttaggaagaactttcccttctttctcatttctttattttcttgctttttttattcctatcagtgtggactcatagacacgtattatattctgtgggttataatctgttttagtaattattttattgctccaaatgtctcatttgaccgttgagagccccatcaagtgactcctgtcttttgacatctctccctcattttttgagtactttcttgtttctggcacccctagatgttgtggacttaccttgtacttttcctaccccagccctggaatcaactgtttctctaaggagtggtatttagaaaccaatttttgtgcacaagttgggctcattagtactgggatgtcatttcttctaggccctctcagaagatagagctaggaaatatgtgtgtgtgtgtgtgtgtgtgagtatatacataaatacacacctatatctatttcagtatctgtctgtatgtatgtgtatgcatacatttttttttcaaaatcacgagttcgtactgatacttccaaatctaatgcactgccataggatttattgaattttttctcattttctatttgtaactcctctctctgatagggagacacttggttttcattatccataatatttactataatacacataaagtagttttggaattgctatccaaagccactgtgagaaatccatttgaatagagtgtaatatttgtgaacagttggtctgactttagccttagggtatataaagtgtactgtgttccaaagttacttaattattttctctcttcctgccaaaccctttagtgtagatagttttcatttgtaatacaattagtttcatttgtttctgcttatattctgagtttgccctcatcctttgttgattttaatttttcatttttctgagtgtgtgaaactctactatgattcagagtatgctctgagaaatgttactttctcctatcccttttaaccctttccctttctcttatcttttcattctgttcctacccacccccttaaataatcagcctcatcattttctgatttacccttcttgcatttctttttgtacagatgagcagatgcacttttctttttcccctttcttttaggaaagataccatacactttagaattagatagtcttttcaccttgctttttccacttaacagtatgttctagaaaccactgcatttcacttcagatattctcattctttttttacagctgcattgtacccattgtgtgagtagtttattcaacgactctcctatatagagatatttagattgtttccagtattttgtaattacaaatgatgctgtgatgaataactgtgagctgactttccctccatattgttgaaagtctaacctcagggtcaatttctagaaagaaggattgctgagttgaaggctgggtgtatatgaagtttagttagataccacgagtttctgctccaaaagggtagtgccagattgtattcccacaggcagtttgtgagaatgcctgtaccaccacagccttgctaacagaatgtgttggcaaattttttcaccaatctggttagtgagaaatggtatttcattctagttttaattctgaatggagtcaaacatcctctcatatgtttaagggctatacttatcttttttgtgaattatctgtccttgtttcttttctgttgtcttttgactttgttcatgtttttttgccatacaaaattttattatttttatgaagtcaagtttattaatttttattgcctcttgattttgatttatagttagaaagcctttccttatactgagattgaagaagaattctctcatatttcttctaatatttgtatggtttgatttttttaatctggaagactttttaaattataggcaatctaacatttctacaaatttaaaaactccttttattgtcattgttattattattactttgctgtgaagaattaatgcataaattcattttgagtgaaggctgtcttctaaggttggaactgagtcatgctgatccacttggaagtatgtcatcctgatagtgaccaccttgcctgtgtactgggtgttaatatacagaaggcttattttaaatgtactattcagcagtgtgttttgttatttctttgcagtatgttttataataatggaaggcttttgagatgagaaatatatggttttggtaggagttgaggtcaaaaggaaggcctagtatctctaattctgatccacagggttctaacttaactttgcaaagtaagacatggatttacaactgttttatatagtgcatgctgtgcacctacttcccaaatgcacttcgatttttttttttttttttttttttttgtcataaagagtctgggctccttcctgttcttctctctacaactcagcctgtacctgagtggtactagctattcttatattgcttttctatggaggaaaacacagtcttctagagctgaaatcttaagaatgttttgggaagattagagagcttctttagaaaaagtttccaggcatttaatcatacttagtatcttagttcatttgtgcggctatagcaggatacctcagattgggtaatttataaacaacagaaatttatttttcatagttctggaggctaggaagttcagaatcaagatgctagcaggttcagtatttggtgaaggttgctctttgtttccaaaatgatgccttgttgctgcatcttcccatggctgaaggggcgaatgctttgtgctcaaatggtggaagagcaaaagggcctggctagttaccaccagctcttttgtaagatcactaatcccatgcatgagggcagagcccttgtggcctaatcacctcctaaaggttccatctctcagtactgttgcactggarattaagtttcaccatgaattttcaaaccgtagcacttggttatattttaacttgttgaatttttgaatttttaaattttatttaactttttcctgagctttgaaaattatttcttgttacattccccaccactaagactttagtaatacactaaattatagtttctgtttcttggattcctctgtgtgtcaggtactgtgctaggttctggggaaacagcagtgagcagtgtggatactgtccctatctcatagaacttgcagataactatttaactaataataaattatttgtggataattgattaacagcttggcacaaattcaatttagagcttcagcacatatctcatagccagataaattcccagttgattaaataagtgtaaataaaatttattttctgagaaaacaagatagcagaataaattaggttaggtatacctctggcacatgtttcctcagcattctttggatatttaggtagttggaycttgggtttaggagaagaatatggattgaaagtacagatttgggagacaatagtatgtgatagtaaagacagggatgtggacaggctgttgagtagaggaagcaatggtgactgagagtaggggaggtgggagaaaaccaggagaaatatctgtcattcaagctaagggaaagtaaaaatgtctccaaagaaaggttaaatcttatagagaattagtaatctaaggagtgaaaagtgtctgttgaatttagcaacaagatatttgggattgggttgggatgttctcagtttttgtatagtatagagtagggcagtgggagtaggttgaaagtgatgacacttttcctttaaacatttcctctctttcttcctttggctgttgttaacaaatgtctctcctgagggagattccaagacagcaaagagaacattattaagagttagtgaaagtaccttatttcatccaagagacaggtatggcagggctttttatctgtcagtgtctgcctgcctgcctgtctgtctcacattgaaattcaaatgtgagataattggcaaaaattgttcattaacttgtgtatttggaataaaaatgaagttggacttttcctatcagatagtgggactttcgatttggctgaggttttgctagtgagagttggtcaaatgagttttacatagcaagcatttttgtgtagattaaatcagccaaaactgcagttttgggattttgatgaaaatagacttcaagcatttgataaaataaaatcattttatttagccataatattggtgaaggtgtattgaaatataacactccctctgccccctgcccccactttcagagttaaacaaaatgattctcaatgaaagacttgcagttacacttgatagtcgctttactatgtctttatgcctccttgattagattgtccttcaattttgttgaaagctgccaaataatcaaagtgtattttaaaggaactcgttgaatttctgacattccctaaaatacatttaacttttttcttaatatttcttttgtcttgagtactcttgtttcattattttcatggctttccccaggaggggggagtcagttctacttgagtgtaaatataataccaggaaaagtgatataatgttactacagttacagttggaattgaactgtcttgtaattgtgaaatctgctttttcacacatattctgggaaaagatagaattttataataggatttatctgtgtacttagtttattagcagattttgtaatgcaattaaataaattgtcttcaaaataattcaacatcaattgaaagtgatgaagacttagaactatataaaaattttagaattaattttcatgccttttattttaattctttctgctgagagtttgagtactataaatttaatttcaactattattgaatcagtaggtaaaaaccaaatggttttaataagtactgttgtaaaacaaatagtaaagtaaaagataataactcagattatgctcgacacaggaaaaatgtaaggctgtgggaataatgtaacagaccaacaaaagggctggtgctatggttgcaatttttacatatgtatctatatctgtatttatatcttttgacttacatatttatataatacacacacatatacaagcataccctgcttcaagaaaaactgaatataaaaggtaaatttgggacttgctttataaggaaaattattgcagggaataaaaaagccacttaggcatttatggaaatgtaatttatattcagctttttataacacatctgtttaagtaggtgaggtacatttgtataatacttcttgaaggaaattatagacaggtttattttcctgcatcctggtctgggaatttcctccctccctcccttccttcccttcttcctttcattcattcattcattcattcattcattcattcagaaattatattggaaacttatttacccctagggctctgtgttaggtgctgcatggattaggactgcttaagacagaatcctcagctttaagtttttcctgtaatccagctttaagttttcgttctaaactttttctgtgaaggacgtagtagtaaatattttatcatttgtgggttgtgtggtctctgtctcagataaaaagcagccatatccccctgattttacataaaccaaatgatgtatttcaataacatttggtgggtgtatttcaataaaattttatttacaaattagcaggtcacatttggcttttggatcatagtttgacaacccatcattgaatacattctccttaaaagacagtctttacatcttaaatgttctttctttgtaagaaagtgtaaaaagtgagcttaaggtagggaaacatatttaatataaagattttttaaaatttgcttttttaaagttttgaagtaagatttcttcccattaattgtaagttcatgctaagccattggtactttgacaagattttttatgtaatttactaaatgtatacatttgaaagacaaattttttttttctcatgaaaatcgtgtcctatgcctttgttagagcagggtgctcaatgtgtggtcatactacatgtgccctaacaaatacacttcgtgacttgtgaatagcgtgttgtagaaatagttgttgtgtggataaactgcagtatgtttaggcagcttctgtatttgctgctgtaacagtatttatttatttatttatgtagagacggagtctcactctgacacccaggctggagtgcaatggcgtggtctcagctcactgcaacctctgcctcctgggttcaagtgattctcctgcctcagcctcctgagtagctgggactacaggcgcatgccaccacacctgtctattttttgcatttttagtagagacagggtttcactatgttgccaggctggtgtcaaactccttacctcgtgatctgctcgcctcagcctctcaaagtgctgggattacaggcatgagccaccgcgcctggtctctaaaggtttttatacagaaacatgcagttaccccaggtggttaatagcttgcttgggtcccttgatatgtatctcattaataatgtttgtagtgtatgtttatgctaatgactggagccgaatgttcagacaggtatagtgtggataaggtaatgagatgctagactagaaaagttttacatgctgaggagaatattaaagaggtttcagatgtctctggaataattttcagtgaactacaaacaaaaaagtatatcttatttaggaacagaatgagtcaaattatgatcaattaggtattgtgtatactgctttcatttagatttgttcacttagctctttataaatttctttttggctctagttttcttctgaaagcaaagcaaatagctcctgatatgtaacataagaactagagatgaaatgaatattggaattaaataagaatttatctcctatcttattatttacaaacaaatatcagttatagccatgacatcatatctagtattcaggaattcagcagtaaataaagttatgtctgggaaggacttttacttttttaattgttctggggaaacttagagtttttgtggaggtgtctgagggaccagactccacaaaagtaaaatatttgtttcaaatcatgtaagtagatagtggcaaaatcagcatcattctgtattctagtacttgggcttttataattaggttttggctgggcgtggtggctcatgcctataatcccagcactttgggaggccgaggtgggtggatcacttcaggtcaggagttcgagaccagcctaaccaacatggcaaaaacctgtgtctactaaaaaatagaaaaattagccaggtgtggtggcttgcatctgtaatcctagctacctgggaggctgagacacgagaaacgtttggacccgggaggcggaggttgcagtgagccgagattgtaccactacacttcagcctgggctacggagaaagatcctgtctcaaaaataaataaataaataaataaataaataaataaacaaatgaaattaggtttaaggtagtttttcctcataataatggaaattatactaactatactaattttaggactcagttaatgtttagtgtcatacctctggtgataaccaaaactcttagagagaatgtaagccagatctcgtcatttaaagaccccagccctgtttttaatagtagtttcatcagaactatagttagggatccaggccagtttccttgcaactggatgggacacaataaagctcctgtgtttcttttttatcacggggaagtgagactaccagagaatatttagaggtcaactcagaaacactgtttattgatctgaagctacgtttgatggtatcttgtggtaaattggtttaaaaagaaggactctttgactccctccccaagcctaaatctttctttaagtccccctatatgaaacagataaaagcagtaatgctttggttgctgcaaattgaggaaagcatatggggttgcattctggtgtggcgtctgaggttaccatggaactttttagggcagcatttccagttgcgctaccatcataggaaacttttattaaaaaaaaattcagagattcaaattcattaagcctggattggttctgagaaaatgcatttttgaaaagcaccccgattacttgtgatttttaacctgatttgggagccgctatctgtagtgcctcatggaacaaaatttaaaaatcagtgacccaattcaaagtagtatttagccagctattgagttaagaacatayctgagaatttctctgttagttggtggagacccacataaaatgcttattatacagcactcaatgcatattagttattgttgttataactgaagactgttttgaaaaccattattacatgagaaccaacattgatttcccagagttcactcagaattcttttagggtgtggtatagttattgcacaagaagaaaattaagcaaaggcaaaacaatctaacattttaaaaccaaatctttgaaatacccattggttagtagtcacatctttaggatttactaaaggataaaaaggtcccttaaatagcagtttctttaatcaaatcctaagtatgagagttactactagttaatagagatactgwctttgaaatggtatttaaaaataaaaaccaaccaaatttattacctattaccaaaatctgctagagaactcttagagctgagcagatacagataaaactttgattgcaaacataggtgcaaccctaactcagaattttyagttggccaggttctgggggcagcaaacatgtgaagctttgaaagattaaaacaaatgaatttttcgttaatattttcmaacattttttcccctatatagagctgggctactggacccaaacaaatgagaaacaaggaatacaggataaagagattgaatttgtctctttgttcattcatgtagttaacaaatatttattgaacatttaccatatgccagagattgtgctagctatgataggcttagcaggtaattagaactaaactatatgatgatgatgatgattgttttttgagacagggtctcactgttttgcctaggctggagtggagtggcacactcatgcctcactgcagcctcgacctcccacctcagcctccagagtagctgggactataggcgcgtgccgccacacccaactaatttttgtcttttttttgttgttgagatagggtttccccgtgttgtccaggctggtctcaaactcctgggctaaagtgatctgcctgccttggcctcccaaagtgttgggattacaggcctgagccacaatactcaggcatgattatttttgtatgctgctttttatcttaacatgagtatatttcattgttataacatgtatttttaaaatgacttaattgctgccaagaaaaaatagttcaccctcgattataggggcatttagactccagtttttttgttgctataaataactgtactgatcttcttatacccatctttgcataaattttgacaaaaatagtattacttagatatagtatggaaacctttgaagtccttgatataccttgctagaggttgtagtgatacactccgaacagcagtgcttgagtgtacatccttggcaatttggggtagtttcacttaatataagtaatgtagccaagttgacaattggaaaatgaatttttttcttaaaagattttattgatgtaaaaattaaaggaaaatgaattttaaaattgctttgattagcagttttttttgaatactagtgtggttgcacaagttcattctgtattttggctatagcaacagttataacaagtaatacttgttgaacacttaatgtgtattaggcattgttctgagtactttacatagaacatttatctcatttaatactcacaacgctgtaagatagcattgtgaataagtagctttttcaaggtcacagacacagttattgtaagtagcaggactgagatttgaatgcaagtgatctggccccagagcccagaatcctttttgccaggtcatgtcctcattattttttcaatattttgatagttatttttactgttttatgctaatagatgaatttttctgtcttaaaatatattttttctgataatgtcttctgtcttcctcataaaacattaaaaagaaattaaaaagttctccctgtgagaacttttatcccaccccttgggataatcaatattaagagttggatgtttggtttctcgagacattataccttcatcttcttacctgctgttttctttccttactttctgatcctccatataatgggatatgatataggctgttctcttataaataaataatagaaaaactctattatttttttttcaaattgctttgtgatggtaattcaaattgcattgctcctttcacttaatgggataataaatatatttgcagacaatatttactgctttaatagataactgttaagctactgtaagctttagaaggtctcaaagacaatacaagacactagaggaaagtaaaagtacaattcctactctcagcaggaaaatgaagtacaatttaagatgtagtaagagatataacaaaactatgtatagtaccagacaactaagtaagagatactaaagagctaataaagagcattacttgatactgtatatgaaatatgactgcttgttttgattttaagagtgtgatattgggtgttcatagatggatttttaaattttatataggaaataagtaagatatatttagtattgaatattgatatttagtattgagtagtgctgctgaccagatggaagaacatttgctttgacccatctcagcagtagagcttatctgttagatgaggtgttaactggattttcatattttttttttttacgattctgtgatactttcttaactcattatttgctcacatactcttattcattatgtgtgattatggaagtggcaaatgctggcttggataaaaaaggggaaaaaactttatcctctttgtgaatctgtgaaaaattgtttgaaataattatagttgatttttctagaatgcatgctttatacaaaagaaaactgaaagtaatcagcgagtcagggacaaatgtaaaataaaacttttgggaaaattcttttgatcttttcttttcatgaagatggattactttataaaaattaaaaygttgtttacatgcctctgtgataggtagtgctgcccagaatacgttaagtggcttttaaattttattccatatcaaggtaaatctttagagcaataaatgtggcataccctgatggaagatcacttaaaagaatgctgtattttacatatttaacttgtattgctacagagttctgaaaagcataacctgttacataaatggtaattaatgcaaatgagtatatcatttgattttacactttgaagtctaatgaagacactgtacattctcattatgagagctacttaatctgaaagtaactaattaaaataaccaagagaggcttcttatatacagaactggttgattcatgagatttatttactagtattggaaccaattacctgatctgtgctacgaataataagtttgcagtgtcctgttattttgcaagcttttcaaattctcttaattaggtcaagatcaatgagtatgtctatatcttactaaacctatcttattattaatggtagtagttgaaactttttctaacttggacttgataagcattttagtaaaaatttcttttttgccttgtgattctggtcttataatgaaaaaatgataatgtcttaaaaatgtgtttccccattataaaagtcatttgtattcattgtagaaaagttagaaaatgaagataaggaacaggacaaacacgaaaaacatatgtaatttcaccagttagagatggttgctgcttacattttggtgtgtatgcttttagacttttccctctgtctatatatattttttgtttcattgactaaatgaaaaacatattcattccacaattttttaagtgtctgttatgtgccaagtaccaggttctcttattttcttcctttctttttgttgaattacttattctggtaattatgcttttgtcaatagtacatacattcttgttctctgcctgtaccttttcatgacaamttgttcttggtttatggttgtgatagcttcttgaatctctatgagaatactagttaaaagcatatttaaagttatctttctcttccttgaatcatctttcttctttatgtttctagtttcttcaaatgtgtggtgatccttggttggctgtgcatttgaaacgaggcagagaagctgcttggaagctccatgaatgtgggctgggtttgtcaatttctgacctttgctttatgataagcagttgtgcttaggtgctcttccctcactacccatttggttcagtttcttttactttctttcttttttttttctgttcaccctcccaccctgtttcagtttctttagagaagagctctctgatttttcttttcttttgcttgaggaataacctgtgtgttgtgtgtatgagttgtgagaatttaattgttgtacatagctaaaaataaccaatccctccttttcagtccatatgtcactgtagtcatcctgtgcacttgatgtttctgggtctggatcttctttggggttttgtaaaataggcacctccatctgtgaatcctgctacctctgtgcatgcttctcagcacttttcagtacttctccgtctatttcttgtcaaccagaaatttattgaaatagtgcatctgctgatgctcttttctccttcccttcattatcttcattgttatagccatttctaataaattaccctaaaattaccccaaaatataacagtttaaaattcaaatatttactgtctcatcgtttcttgggagcagtgtggttgggtgagtcttttttgtttttcttaaatccatagcctcaagcatttatcccttgttacaagcaatccaatgatactctaagttattttggaaagtacagttaagttattgatgactatagtcaccctattgtgctatcaaatagtaggtcttattcatttattctttttttttgtacctattaagctgggtgattatggttcaatgtcgtctatcagattgcagtcaagctgttggccagggctgttgtcatttcaagggtccacttccaagctcatgtgtatggttgatggcaggcctcagttcctcagctggctgttggcatgagacctccatttcttaccagtggggaggaaaaactttcctgtacccacttaggttcaatagttaggggcctacaaattaaactgacaaaacatagattagcaagagaaaaaacaaagtttatatgtgtatggaagcacataaaagaagtggcttacaagatggttgaagttagtattcctaacttaatgggactatgcctaaagtttgtattcctaacttaatgtctcaagtttgtatgtctaatttaatggtggaaagggaaggtggagaataggcttcagtgtaagaaaaaaaatggaattctttaggaaggataagtggatttttagaggaacaaataggaggtaagaaatgtttgtttttatgggggggaatggtcttttccatcttcttcgtggccataaactcctggagaggggatttatgatagttttactctcagtcttctttctgggagtgaagccacctagaagaaaggatttatggtagcttaattcccggaagtttctgcttttagtcagataaggaaagctctgaacagccacctttctgcatttgttgactctcaaatgtcttctggttaaaataatcttcataccagctctggggttccgagtgggttctcacagctgcctgagtgtcctcaccatatggcagccagctttacttatagcaaatgatctaagagaacacccaagataaaagtagtagtctgtttataatctaatctaatctagcccaagaggtgacatacaatccacttctgccatattctatttgttgtaacrtataagtctagcccaaacttaaaggaggggaattaagctccatctcttgaggttaagagtgtcaaataattttgtggactttcaggacatatttttcaggaccatatagctttatacttaaaaaaaaaaaaactctgctattatttcagtagtgtcttgggaagaatcattctattgtatggaacattccattgtataagtgcatcatactttgaaaatttctgtgtggttgtaaatttagcttgttttgaaagttttgcttttataagaataccatgataatattattctaaataacttttttgaatgagtaattattcatctgatagcttattataggagtttattgctatggtctgtatactctagaatacatttatggaaatatgcatacattttctttggagcaaaatcctccagtatatttattattgtagcagtttttgtagtaaaaactacaaacagcattttctgaaataattaatgtattttaatgatttattgaatagatctgaacaattgtcacttttgatttcattttgggatcttatgacttcgctagatggcagcagaggaccaggtttaattcagactgcttttgtgaagcagtagaattctaatggtatccagtgcattggacatctattttataatacaacccagaatattagctggggattattaagaatttagtaaggattagtgggatcatatatacagcattactgaaagcatagccattttgacaatgttggtatgttcttttgtgcattgcatctgaattattatatttgcaaatgaccttaaagtgccattttggaccttttttggtaaaaacaatgtagccgtattaaagtccctagaagtgttttttctgtatcaggaaactgagacattcttaagttgaaatctcagaagggaagaatgatatgaagattctcttttatcccatttggatttttttttttttttttgctcttaattgtgttgggagcaaaggagtctaatagaaaaacatgatgttggaatgtagctcttttatttataggcagtgaaatttatgttcataggatagaaaagttatttgacttgtatgtggtatatgaggaacagtaatttttatatatgtgccctaatgatatattttggggaaaaaattctataaccatatgttttaaaatcatatataggatttttattttctggaggaactacatttggtttttgcatgtttgatggtaatttgcttctcaaaaggcagtaacatgtgaactaggtaaagaaatcagaaaatgagcaattctgacagtgcttttaaattgtgaagtctgatttgaagattatataggtggcccatcttagtatagtatcactctggctttcagcccagatttaatgttgctgctatttttgctggcaggtgagcttccttggactcattttattttagtaacatttttgaatttagaaatttaatttttaaaatacttttgcatgggcagaaaactaaattttgtctccctatgaattatctagaatggcatttaggtcttttacatcttatgtcagcctgatagaatgtaaactactggctagagttgcaggatataatatataactagaacaaatcaaattgctgcataaattacagcctttaagcagctgaactttgagactgctctatgatgtggccttggtagttgccttaatgttatgagtccataatatatttatttttatagtctcagtagtattagctgttgaaattggtgcttctaggatttctcctggtacttttatgtgaacttgaacaaagactagtagcaaccagttaatttctaatagtttgattcattaagaattacttactagtgttaaaaggaaaataaaaatggaggtcacagtttagatagatcccaaggccaactgcctataaccctgtaacccaaactcaagtcattctgattcccctgaaacactatctctacttataaaagaaccacaaagcatgaggtttacatctttgccagcatgattcagtgaaattaaaccaatcagctatagacaaatataaacagctccacttgcattagaataatgttagtgtctaatggccagtcacgaaaaaggtcaaaatactttctcctttataaactgctataactcctgtgaggaagcttcttatgacttgaagtttcagatctcaatctgtactttttgcatgacagtgagctttaaaatttttcctaacttgatctaattttatgtttgataccagtaaatggagaaattacaactctcttaaaacatttggtgcacttagatacggttttgttatttagatttttcctttgtgcatgaagcaatattaaataaaatcaagcatcatcatgttgtacatcttctacatgtgtttttaattctctttcttaaaaataccttaattgtgttattagcacatttctaaatttaaaataatgggtgatctttatagtaaaatatttatggtaaagtataatgcctgtgttaaaagtaaatttatttcaagtttcttgtagattattaaaatccctttcagtaaaatttttttctgaaaatgttcattgttctatagaaataacatgagagtatgaaaaagatggtgcttgctttaaaggaaattcctaatttctgacaagttttaaatggctgctgttttgactacacactcagagctgccaaatacaatattttgatatgtggtcaatttcaatggcagtaaagttttaaaaggaaaaagagtttgtgtgtatttaagaaaagaaaattgaagatgtggttcatgccctaaaataggtcaaaatctaatgaacaatatgaagtataattgcatataaatgacatgacatagactctaataatgtgggagttcttaggaggatgatgagtgaaggatgagtaacaggggtgaggggagcaatgtgaagaaagtcatgaggtagaaacagcctgagctggaccgacctgattaataattgatataaatccacaatctttgtaagctcttacagttaaggcagttaggtgcttatgagaaaattgttacactggtggctgcataaaccctttgtttatattttgaagcatgtcagagttttaatgattgctaagccataagcttctgatttaaactttgactatgatgtcaactcccactccttgaattgttcttaggaggctattaaaatgggagatcctttatctcaatcttcttgaagtttaggaccacctgatttgctgagtcagttggttagccccatagcctttgaggccttaaaagagctgtttttttttttttggaaatcaggtaaagagtgtggtaagagactattttccatagtgatacagaaggcagggaaatgaacactctgaggaatagttgctgtrgcagtggaagaggaagcacttcacctacttatgtgactggaggaagaaaaaggttgtgatggcacagaaagctaagcctaaggggctttcccagccggaggcacaggaaaaccctatagtaattctctcccagtcatccttcccaacactttatttcccattttcagtataattaaaagactgttaggtgaaccttttttgggacttagtgaaaattttactcaaagtagcttacttttagcattcattcaatgagtctagccaatagtgaatttcaaaggttgcataatataaaatgtgaaaattagaagactgattagaattaacttgtgatcatacttagtttttcttttcttcttcttctagtactctttgctctttttaatcctagttaggatcaaaacaagcacatttctatagctaagaagagaaaatctattgaatataacttttggacagattcttcagtgaaaactttttttttcagattaaaagaatttttaaaattcttttgctttttttggacatctgctgtcaggctttccattttcattctctctctctctttttcttttttgagatggagtctttctctgttgcccaggttagagtgcagtgccatgatctcggctcactgcaacctctgccccccaggttcaagcgattcttgtgcctcggcctcttgagtagctgagactacaggtgtgtgccaccatgcctagctaatttttgtatttttagtagagatggggattcaccatgttggccgggctggtctcaaactcctgacctcaggtaatctgcctgccttggcttcccaaagtgctgggattacaggtgtgagccaccatgcctggccctggcttttctattttcttttgcaatttgagtgttaagggtggcttgaggttatttagtctagtgcttctcacaattctatgtgtatgtgaatcacctggaaatcttgttaaaatgctaattctgattcagaaagtctaggctggggcccaagattctgcatttttgacaagtttccaggagatgctaatgctattggtccagggaccacattgtaagtagcaagaattgactccgttttctcaggttatagatgaggatatcaaagctagagagaccaagtggtttttacaaggtcccatacctagttagtaagggtggacttttaatttttaatccgataaagtcatatttttcagcataaggaaatacttaaaaccaagagaaatcttcctcttcccctaaatagatggcagctcatttgttaaaccaactttattcaatttgaatctttaagatgtgtcttaagattttctcttccatccttattgcttttgaagatttgaagaaaaataaataaatggatacattgatttatttgaatgtgtctgtatccagttattagagtccttactttctggactttagatgatcaggaaacaggtttaagtgaccttaggagatagtaaaatatattatattcaaatctagtttttgaggtagaagcttcttgctatggtagggtaaatcatgtttttatttaaagtgactgttaatgtacactttgttttcagacatttacaaactggaggaggtaatgtaactagttttttgtgtctttggtagtgcctgtatgaatactttttgctcttgtctgtgaatctagtctggtttttcttgtgccttaggaaattttaggattgtcgcagcactggaggtggggtataaacgtgtgtaagtgcatgctacttgggagatatgggactacataagaaccctttcaacccttgataattccataattctctaattctttgaagattggtgaaaaggaggaggaagcatattctatcccacggaagtggcagttaatgagatgcatgttgcccttagcaaatgaatttagtcctaacttgacaattcttttcaaaaagtgaaagatatgctttgataatttgctcgttgcacttccccaaactgttagttgattttataaatttgtagagggtggagactttatcagtcaatttttattgttatgacagttattatatttctttttggtagataaaggaaacatgaacccaagtagatttaattataattttatttaagttatcattttactaatctttattttaatgagatagattgtgggaccaaaacatggtcaatgataattttccattgtgtattatagctttcgggtttattgtgtatgtaccattattgttagtaaatcttaagaaattcttttggtatattgggatatttcaggctctgggtttgtttttatcattctaatgtttagaaaacaagctcttagacagattgagacctacctgattcaagtttttaaaatatgaattctctgttttgagttatcgctcattcagtgcagcgtctgattttacaaaatttactttggttatacctattcatagaaaaatgaattaaggaactattttactatagttgttgactgcctttgtgtaaatatgtttatatgtttgggtgtgtggtctgtgggtaacctttaccaagagttacctgtgattcatttctctatgtttcaaaatttctgtgttcacttatctctttctcttctgtgttcaaaagggatggcttcctgtttcctgtttatagggttcttaaactaatcctttctgttttattcagggttttgttttatcattaaccccaactctaactcttctttggattgtgtaaagtagtactagtagcagctgtagttgtagtggtagtagtggtagtcgtagtactaatgatatctagctttaattaagtacttaattaagtactctgtgccttggacataataacaatagctgatactatattactgtgtattaatcactgttctagtatcttttatatattaactcatttaattcttttctttaatttttaaaattgtggtaaattacacataacataaaatttacattttaaccatttaaaaatatgcagttcagtggtattaagtacattcatattgtgtgcaactgtcaccaacatctatcttcagaactctttgattttgtataactgaaattctatactcattaaacagtaacttcctattctccccatgccccctggcaaccactgttctccattctgtctctgattttgattactctaggtacttcatagggaatgatacagtgtttgtccagttgtgactggctaatttcacttagcataatgccctcaagtttcatatgctgtagcatatatcacaatttccttccttttaaaggctgaatatctttccattttatgtatatgctgcattttgcttattcatccctccatggatacttggattgcttcagtggtttagctattgtgaataaggctgctgtggacatgaatgcagtaactcatttaattcttaaaactgtcttaggacagtttaaaacttctggtgaggaaacagacacttagtcaagtaacttgtgcaaagttacataattagtaagagctggtatgggatgaatggttcttaaccactatagtagagtgccatataattttctatgctggtaccttctcttttgcctacagatatcttcacccctctttgctatatgttaacatgtaattaatggtatgtagtacaaatacttttaatgctaatgttggcaaatgaacagttcattttatttattagtgtttgttgcatttcaactatacttcaacccaattacaaaatgaagttgaaactccttaagctggattttaacactcctacttgctccctgtatgcttctctttcaccatgatgtgatcatttattatatgtagtagctatataattcctggacaaattggagtgatagagtgctttgactaggacctgttaattggagtatgggagatttcatgggagttttgaataggaatttgaagatatgtattttgagacaggctggtgtagtagtatagctacatgggcttagaaacagacatatacaaattcctgagcagtggaggatggcaaaatgagaggagaataagcaagttgcaactgtgaagttaaagcatatagttaggagttggaccttcataatattggatgagatttttggttccagtctgcctgcttgatttttagggatctagatagcaagcactattgagtctggaattacaggctctggaacttggatttttcatcagagcccataattatagcagtcataccattgacagtttgcaaattaattttttaaaattgttgagtagtttggaaaaaatttgctccttccttacacttggtatttaatatgtcattaattttgtggaataagagagaggaatctagaaactgacactgggccccatgccctgccaaactctgtcatagtgttgctttttaaattgacagatttacacaagactctaaatcttgatggttgaagggactttcttgaaacagactttgaagacgattaataatctgttaatagaaataagcacacacggtactttgataaggcttgagattttttgattctttatggtaggtatctctacgtcttcaaaatttacttgtgatgaattaactaaaattaaaatgaaagttacagtcttttgactgtcgacttttctatagacataatttacccagtactgttcattaagattaaactgtttagataaacaggacatagtaaaaaatttgtggtagaagccacatataaactaaagatggctatgcttatgtagaagacatttaaatgttggcaaattgtccaaatcttcagtggcatgctgctggcctgccgtttaatatacaattaacattctaagatcaaagactagttagattaatttgacaattaaattggtgaagaagtgaataggctttgcaatttaaaattaaataatacatgttgtctgcttaattactgttgtgttcatgtaagtgatcacataatagaagggagctgtgggcttaaagtgaatttaagaccataaagccataatcagtcacatctgtttcatgactttaagttgatgtggtacgagtgtgaaagaagagctcattctttgaagaggcctgctgtacttacagaatcaataagtcaaaacaaaaataactgtagggttagaatctcttatattgccgaatgaaaattttgatagtttttggtaaagagattatgttagagctatgttgtcatttcactgactgttagcagcagtaaaaagtcaaaaaatggttagacagtgttactgtgtgtgtgtgttcttttaaatttgttaatgtgaaactgaggatcttaatatgagtccattgaatttctgggaagatgacataaggtaaagtcctcaagactgccccctcttcagacacagttgcaagtcttagcctccagaacttctgaccagctagcttcaatttggagttctcacaaccccctctttggattcaattaatttgctaaagcaactcacagaattcagggaaacttacgtttactggtttattttaaaggatattacaaggaatacagatgaagagatgcataggatgaagcatggggaaaagagtgcagagctttcacgtccaccctggatgtgccaccctccagtaacgtccacgtgttctgctgtctggaagctccccaaaccctgtccttggtcttttgtggaggcttcattatgtaggcgtgagggagtaaaccattgaccattggtgatcaacttaatcttcagcccgttctccttcctagaagatgtggggtggtgttgaaagtcccaacactctaatcttgccatgttctttcctagtccccatcccgaagctacctagagctgccaaccatcagtcaactcattaatatacaagaaagcatcattttggtgtttctgaggattttaggatttgtatgccaggaaacggttgaagaacaaatatatgtatatttcacaatatcacagatgcaaacaaatgatgtttaaattatctggtctttttctgagattcattaagtttagattgtatttctatggaattatagtataaatcataattaggtgcctaaactagcctctaaagcttattcctaaggtagctaaattacttattatgtatatatactatgaaaaatgacaaaatgtactgtttcaacactggtaattaagcaaactgccattgtaacataagaagtttatgaaaactattttgaataatttaaaaactttggggaaaactggattttataagataaggagatagagactattatataaggaggttgtgaaaggggttttgacactgattctttattgtctagatggattaaacaacttattactttaaattttgctttatacagaagtgtcactagctttgatcagagttttcgttggttcatgaatggaactaagttaaaggaggtgagaaggagaaatacgttttttctttttaaaaagttgtaaaatatacttaagatttcttatttaaaaaaaagagttgaaagaaacaggaaaaaatgggttaaagaagacatgggtatatcttgcaaaagaggttatcagaggcagaatttactgagcagtgaggtaatgagagaaacaggcaaagtgtgcatgagccccatggggaaggaagaaagttggagtttggcaagtcagctgttcttgtattgttttttgaacacatgacaggtgttggtgagtagggggcatggtgtgaccaactgctcctatgtgaggaaggtttatatattctgtctgggaaagtggtctgaattttctttataagaaattttagtatacttgaatttatttctgtatactaatacaacattgagaattagctttcagggacttctgtgccaattctattgggaataaaaatgagaagaaaggtagcttgtatagaaatagcagaggtttggtagtgaattcttatgagagaaaagatgtacagagaaagtaaactctagaattagcattatacacttgtctatgttgaaggatggtaaatagatggtgtgtctcttggcatgaagttaccaggtaaagggctagtattatgtaacccttggtattaaggatatgttagggacattacagtgggatttcatcataggcacattaaacctccttacatttagctgtatatattgaggcaaaaacaacaacaacaaaaaamccattaacatgttttttttttttttaagttaaaaaaaaaatagagatgtggtctcactatcttggccaggctagtcttgaactcctggcctcaagtgattctccgctttggcctcccagagtgctaggattacagacgtgtatcactatgcttagccttcttgactgtaagcaatagaaatcaactttggctaatttatgcaacggaataaataaggagaaccacttttggaaaatggataggaatcaagggaagccagcagcaaggaccagagccaaggtcagggcacaggaacactttgattaggaagccaccattagcacttgctgacaatgtctttgctgttgctataaataattctgcaactattcttgtgcctctctgtcactcaagttaaaagttttgggaaaggaacatggatagtctggtctagatcctgagcctatttccagcctgctaggggtagggaaaatctgggcctttggtttccatctaaactcatggtgtccatcgtttcttccaaacaaaatgggacaattactgcttccttcttaaatgccccatggctcagtaaatatgcccagttcctgaagccagaacttggaacttctctcattttctcagtcacatatccagtaaatagcatattgaattactgtcagtctgcaacttgaatatcttgagtttatctatttatctctaaaattattgttactactgtcgtagtcactgtgatttctcacatggtctattacagaggccttataatttctcttgtctacagattgacccctattctgttggggtatacattatgtggtgatgaacttttaaaaatgcaggtgagattatgtcattagtttgcttaaaacattttagtggtctgcatttatttacctcccatctctcagttcgagtccacccttttattctgtgttaggggctgggactttgcaacctacatttcccagactcccttgccagcttacttcgtgttaagttttaccactgggagcacaggcaggaatttggaaggtgagagaagggactactcttattcccagtttctgtaaggacacctccaaaagcaaaggacaactattactccattctccaacttcttttgtcactctctgcaccagtcttgctgtttcctctcagagataccagcttctgggcaaggcatcctaggtagatagagtgccacttgtatcacttcctaacctgctggactttattcccttagtggtttgaccatcctctattggacacctgttcatagggattcaaacttaagctacagggccatttgtgaccacctccttagaggttagagcattctgccacatggacctctttcaccttcttccaggcatagccctataatgcttttcttccaagctcctagcttttcaataacagacctctttcattttgttcccctagtcctgcgggtcatagtgcttcctgcaactattaatctctgagttatttcagccttcctgttctatgttctcagctttccagtatctttgtaaccaatgtgctgtattatatatatctcctgggtttgaattctgcattatggtttctgtttgtctcatacaagtagttttttgttttctaagataaagttaaaaaaaaaagttaaaataactagtagctgggggtggggggattaaacagattttcagactgagtacggtgacttatgccggtaatcccagcacttttggaggctgaggtgggaggattgcttgagcccaggagtttgaggctgcagtgagctatgttcacaccactgcactccagcctgggtgacagagtgagatcctgtctcagaaaaaaaaaaaagttttcataattcctatttgtctgttacttctttagtctcatttcataccattttcctgctttctctttacacttgagtattctgaaccttttttagttaccagaacattgctgcattctatcttgtctgaaggacattgcacctactagtctgtgtactccaaccctcccatccctcatttctcttcttctctcacattacaacctgtgctgggttgactcctacatattgaatgtgagggttagtatactgtagagggtgtacaaacaaactattgtctaaattttaatatcagcgttgccgttgtgtcagcgttatgacattgggcaatgtctcagtttcctcatctggaaaatggggataataattttactgacctggtgaggttgttgtaaggattaaatgagttaataaatgagttaataaaagtgctcttttcttcagaacatagtaattgctcagtaagtgtaacctgttgttattatcagctatgcatgaattcctctggaatgccttccatgatctccaaactctgacaggctctacctttgtaggctcctgtaatagcttcttcttcactgttctaatatgtattatggttggaattatttaatatcttgttttctttttaagagtgtaaatgatgtgaagttgagaagagagtctgtgccatttgctgttataaccctagcatctagtactgcctagcatctagactggctccaggtcggccctttaacttatattttaaaaaataattgattaaaaaatttaagagaaaagccataataagtttgataggggctaggaaaaatggatagagatagagatggtggtgaaataaatcaatgtaaatgatcagcttttctgtttttattgcccatcaaaatgctctagtatggaggctgtatgacagaagaagaggaatatctgttgttttgaagccactgtggtacaaagaacaagggttagaatcctgtcttaattcattgccactttgcaaagggaaaatgtttctctgggtctgattatagactacatttctggcttggtggcttttttcccccttgtaaagctttaattttgccccctgtgtctaaaagcaatttgtgtttatttctaaaaattttgaaagtacagaaaagcttaatgaggaaagcaaatatcattgataattctaatacatagagatggggcagctcttactattttggtataggctttactctatatttacgatatacatacagttttgtcctcctcctttcctctgtaattatttaatgtattctggttttaaacttgcttttttcccactaaatatattgtaaatctctttccatattaatgaatatttttatcattgtttaaaaaatgcttgactagtatgcttttacatgaatatgcaatatttattttacctatttgctgaatgatggacatttgagtttttatcctttcactgttataaaatattatgatgaactttgttgtacatacagctttgcttaacaaatattgagtgccttcctttagtgtgtattcaggtagactgtgcaagatacttaagctgtgagaaggaacaaaatagataggatttctgccttcatagagtataagataaattcctgaattgatgatcagagttgggtctaaattggtgataactttaaattaccaggagtttaacgaccattttactctcagactactgggaggaatgtgaattaggactctaaggtggtattagttaccattgttttctgtcagttttccttctctttaattatgtacttcctaattttattaatgtatatttggttgttttacttaattatatatctcacatctcagcaactgctctgaaagattatttccagttttggtagaaaacctgcatttacagtaaagtagtctatacatctggcttttctgtaatccatatacctttggtttatatactttagcattttctatctgggaaacgtatactgaattaaattttgccttttaatgggaatgaatgaatataatacaaatacctattgataattctgaatattaaatttgcagttgagataatttcctaattaataagaaattatattgcatcatagttatatactaaggcagtatctgacagtttgtgaggtagttgcttctttttaaagaatctggctgctttcagggactttggagtgatgtggaaatatttccacattccttacatgaaatagctcmttactttttgttagtatcgcataacaaaagaacatatgatttggaatgactggagttcaaactaaaaatcatagctcaggaacttgtgttccaaagcctgaaaatttatgtgtgcagaagaatccctaaataccaagtgctaaataatttctctggtgtttctgcagatgcagaagctatccttttgtaaatcccgtcctctaaagctttttcttccttagtcttttaaatctgtttatacacatgtgtgcatagaaaatattttcttttgattgatactctacttgatttaaaagaaaaggtctgatactaagatgtgtgtgtgtgtgtgtgtgtaaaataaatacatcttcaccctgggataatacctattgtgtttaaacattaaatttaaaattctcaacttctgggcagtcagtgaaaggggaaatataatttcagttatcattattacatgatcataagagtaaaccatttcttttttctgaattctaacatttattagcttaagtcagcttttctcaaattgtaagtatagaataccaattctgtcaaattttaacagatatcaggattaagtttaggaaacaatggactaaataagatgaacagatttatttatatattttatcataactttaaatatcctaatatatatcttgacgttctaagagaaagatacagtggtttcctaacttatttgccttgaaatacccttttggtgaatatcagctttgcaaaatgccagcctaagtccttaacaacatgatgggttgtgtgtcttccatgccatttttgcagatgatgtcatcattgctttttatttgatcttcccttttgttgatttaaattccttttgaaacataatccaaggcaaagcttacttcttccaagtagcttagattctctctatccaccaggaattgctgcttttgaaaagcatgtgccagagggtcttgcgaactaagtattcctgttgtctgtgtgccagctggcctggcatttggtctaggagtctttcagatacacagtcagtccagactgaggctgaatttatttttcctagtgaaacctgagtccccacactccccatctactagggctgcagctattatagcaagggcctgagctctccatctgctccccagacacctgctggaactaattatcattattattaaaactttaaaaaaatttttttctattatgttgccttttttcctttcctttttcttttttcactttttttttttttggaactgattattttggaaacagcaaagaacaacatacttcacaatctaatccaaaaacataagcccctttggtcttccatgctgctcttttccattttgtttgtacacttgttttcccttcatcagctctcctatttctcctcacctatcctaaacatgtgtactttgctcttcagaacattggtttgtggttagccagttatccactattatattagcttccatatactctgttagcttgcatgtcttcatgtaatatttcttctgtcccctaatcttaacttgattcagctgcatctttcagtcgttgctgccttttttttggacatacctcaggtactttgcgggtaggaggttgggcagtctggtcagtgttctctttcattttcgttggtacctccagaccactcttcttccattctttcatttaacaccaaacaccaaacaaaaacagcctaacaaaatgattctgtttctttgaggcttatgccttttaactttctaatcttttttgctataaattttttctcattctttgaagactttggttcttggatttgatcttcattttcaccccaagtcttcttattatccatttggtagcatagcttcccagactgtaatgtcttcaacatcagtccatctggactttatatgtggtgtgaaatagaactccattcttgatttgctgatgggaaatcagtgatgataacctaaccatttgaagaatgacaggttgttaagtgtatgaattcccccatatgttgattgagtttaagaagataagagataattgaaaatcttatggctgtgtttaaaaatattttaattttatagtcataaatgagaagaaaagttatacctgatattgtggtacctggctatatcatgatattgattcaaagagagggattagctgttttgctaacaggtatggtagaaagagcactggataatttaaagtctggcaaatggcaaatcacttaatgtttttcactgcttttttctattttgaagtggagagaatacctaatccatatagttattgagctagtaaagtacatttatatatgtgtatatgtgtattttgtaaactttgaaaggcttcaatgtttaagatctcataaaaattagagaaccattctctgttaggatggattcataaggttactcctgaatatcacattatctccataaaaaacttagaattccctatactctgtgttttctataggaaatgaaaaaagttaaaaaaattattatttgtggactaggcgtggtggctcatcgctgtaatcgcagcactttgggaggctgaggtgggcagatcacttgaggccaggagttcgcgaccaacatagtgaaaccccatctctactaaaaaaaagaaagaaaaaacaaacaaattagctgggcatggtggcacacacctgtaattccagctactctggaggctgaggcacaagaattgcttgaacctgggaggcggaggttgcagtgagccaaggttgtgccactgtactccatccagcctgggcaacagaggaagactctgtctccaaaaaaaaaaaaaaaattattatttgtgatactttaatctacatgataaagagactccagtgaacattagtctacagatgtttaaggtctatggaaaaccagtatgttatttctcatgaccctgttcttgatattatactgtaaatattagctttttaatgtttcatttacaggtacatgatgttgattgatggcacaaatgaagtttttatgattgatagagacaattcagtatttcatgtttcaaatctggaatttccatttcgtaaagatcttcgtatgcatttatcaaatactctcttggatggcgtaagtcatatttatgtatactataaaattaaacattgccatttttcttttccttgtaagtaaatgtgtatttctgttggttaagaaatttcgaatgaaatctaacttttttttttttttttttgagacggagtctcgctctgtcgcccaggctggagtgcagtggcgggatctcggttcactgcaacctttgcctcctgggttcaagtgattctcctgccttagcctccccagtagctgggattacaggcatgtgccaccacgcccggctaatttttggatttttagtagagaaggtgtttcacatgttggtcaggctggtcttgaactcctgacctcgtgatccacccgcctcagcctcccagagtgctgggattacaggcatgagccactgcgcccagccaaatctaacttttattaggatgttaaatttcatttatttcttatgtatacttatattgaattaaggtcctcttaaagagagatctgccaactgaatctttgagcataagtaagactttgagatattttctttggtggagaaatttgttaaagatatgtaaagggtgttaaatgagtgctctggtcaaatatgtatacatatggatagttatataattttgcatgaagagaaacawatgttacatgtggttagtaacttgtctttttccccacacttagcaatgtgttttggacatctttttcacataaatgtctgaatggtttaccattgtgtatatagagaccataaattggggtttccaaactatcttgactgtgaaaattgtagggttaaaaaattgcttgtttaaaatatgaccctttccaatagcatatcctagaccatatgaattggaatctcccaggggcctacatgtccgtacaagtgaccaagtgattgtaattaggcaagtttgagaaatagttctgtaatttatttaaccagttcccttttgttggacattttgatttttgtattttttcctgtatctagtaaattttcattcctgtgacagcatgagtaacaaaataccactttctaataaaaatgatatatatatacatatgtacatgtatatgtatctatatgtgtatagatttaactatcatagttaatgtgactggtacccttggggttgtatagtacataaaagtcatagtcatttgtggcagctctggtagttggttcatgggaacagcaggaacattttagtttttgttatctttatttaaggtactttttttagcattataattaataaaatataagaaaggaaaagacttaagtaatagcatttgtcaaagtttagtatagtttataattgaactaatgtttgttgagtgcctattatgagttgctataccaagagtacgggtattgcttagagggttgaggagaaggcctcacccttgaaacattttgcttaattgagcagggtggagaatgaatggtaatgatggaagagacctttgaataaaacaataacccaaagagaggtatttaagtcctgaggtagtttagaggagaaataaatcacatcyagttagttaggaactaaatatgttttgtgtaggagttggcattagaaacagaaagatttctatagaaagatttttgatggacgtgggctgagggcattctaggtaggaaataatgcttaaaaattagatatttaaccatctacagatttaacttagcaatactatttatttcacctcaaacttggataactgagagcggcataatagattcttgtgaagttttaaaaatagcagtatgattcatgatgtcaatttacttgggctagaattatagttgccatatctgtttttttttgttaattaaaacagtcctgtagtttcctgtttcttctacattttcatgtgcaaattgtttttgtaaaattccaaatccaagaataattcaaaccacctaattgtctgactgtcagatgtgagcattgaagcttttgttttgctttgcttaactatgttctttgacctataaaatgtggaaaataggaatttagaaatactgcattaattcacttgaaacacatcagtgaaatttaatcaacttaatattgagactaagataagaatatagcagttaatcattaaagttaatggcaagaattttggaaaaattccatgtctttttcaactattaattttttataaaacactacatgcttattgttgaaattttagaaagtctgtaaacttagaaaaaataaacaatcaagagatgacattttatattttgatgttaaaaggaaatatccttttagtaactttgttgtgctaataattatataacatgtataaccaatatgtatatagctgacatttaatatatgttatgtatctggggttctgttattcctcttcaatctgaagaactgcttttaggattttttttttttttwaatttagttctttttttaaaaaaaattgagatacaatttacatactatgaaattcactattttaagatgttcaatctagtggtttttagtcttttccacaaggtcataaaatcaagaccactatctaattccagaacatttcatcacctatatggactgtgatgattagaaccaagggagccttatatgaaagatttcaaggaatgagttacagagatgagccttgaaggcccacaggttttgaaaacccttcagtggttccctgttattcatagcacaaaagccaaactgttcaatataatattctttatatctgaagcgtgcctgtgtcttcagtctcatctttgattgtgattgctaatcacaaatactcagctttggacaatttcatgcctttgttataccatttggcctatccactatcctgctggaaaatatactctgcatctttcaggatgcagctaatggtcatgtaccttattaccaaactttctcttattcttcaagtagaaataactacactccttgtacttaggcttaggtaatgctttcttacaacaacaaaatatatttttcctaaatcagtgtgttttttttgtaattttagatggttgtacatggaatttctgttataaaattagatagcaagaaaacctatctggtttcctagtaagaatatgaggaaagaaaaataattttaggtcaaaaacatattaataattaaaattttaagtaatactgcattttatacctgtagtcatcctttaatgtccttatcttgttctgtcagactgcattttttttgactttttaatggctatggtagatttgcagtgatctgttcatactcccttgccctgttccctttgaacaaagcctagtaaagtggtatgaaaccaagaaaggccacatggctcacatgggaattaaatctataatgaggatgccatttattgtcatagattttatgattaaagtaattggtgtataacaaaatttaaagcattaatgattaaacaaaaatatttttaaaaaagatcctgacgtttagaatttaaaatttgtagtcttcctacccttaattgtcacttagtaattcaagcataaagcaaaatgtagcatggaaattcaaatatgaaaaatatgatgagatattgtcaggtgattctatttcagtatagaataaatgcatgatggggatggggggctaacagtttattgatatgatctgggtacaagtgtgttcactttgaaatttcatcaagttgtatatttatggtttatgtgcttactgtgtgtatgccatatttcaattaaattaaaaaaaattgttattaaagtatgaagaaacttaccttcttttctctttcaaggagatgattattgacagagtaaatggacaggctgttcctagatatttgatatatgacataattaaattcaatgtaagtacctataatttataaaatacaagttattactgaaataatgaatgtatttttgacaatagtctttggtgctgccttagagatagtaggaaagaaaatttgtgactcaggttactcactgggaatcttttttttaatccttttatatctccttttctttctcttattgttaattttcacacatttctttgttttaggtttctttaacttgcaagtgagtaaagaataatggcataactctgataaaataagacagcatttcataaaatgaacatttctgattttaattatcctgtacttttttcttttaaatctcatgagtttatttctgtcaccaaaacagcaacaaaacaaaagagaaactgattatgagctgttgaatgggtaataaattgcagtattaattcaggattgcattaatccaggttattaaaagrcatttttttctggacatttttaatgcacacatctaattttttgattgaaattctgtatttaaaacaaagaacttcaaatttaagagcctcagggccagaaaacatcaagttttattttgttctgtttgactgtattcctcataagtactgctttccagaactggcttaatctcatcacagatcttggaataacattcattggcctataactagacataaggggtggcggggtggctttgtttctttgtgagtagggaagttctgtctcctttacttcttgacactgagctctgctttaatacatgttcagtctgggcttactctcacttcttagctgagtactgtctcttagatagcagttttctaatactttttaaaaatatgaaaaatttcaccatatagaagagtctgaaaaataatgtaaggaatactcatgtactgaccagctagatttgttaaaacttcatacttttggtccactttctttttaataagacatgattcattacgaatccaatagaagtttcttagttacacctctctcctaatctcaaatctcttgcccagaatcagcctctaccctgaatttggtgtgtttattgttcccatgaatgtttcagatacttttactacctatgtgtgtatccatgaaatatatatgatattcttttgcaaggtttctggtgttatataaatgttattgtactatacctttgctgacctttgctcaacaagataatgttgagatttatttgtactaatatgtctagatttagttcattcactttaattaccattgagtattaaattgtataaatatacagaatttatcctttttccttttgatgaacattaaggtttccattttttgcttttatattactactatattgaacaattttatgtttttttcttgtgcgcacatgaaaatttcgctaggacagttgttctcattcttggaatgtaattacctgggaagtgtttttaaaaactctrttccgtcattagtgtatcatggagatggtgattaaatcagcagcttcagctatattatctgcattgctaaatttctctcagaaatagttgtttcagtttgccaaagttcgttttatcacacatttatattattaccaatttgatgtgtgtgaaatggtatcatcctgttttaatttgcttttccttgattactaacaaggtttaacatatttcttattttttttttttacttgtttggaatttatatgatttaattgcaagtttgtataatcttataatacaatcttctgtttttcctatttggttgtctgtttttttccctgattaccaatgaagttggacatatttctgaggtttatttttatttgtttgtatttttcttttgtaacttaattgcaagtttgttctatttggttttctgtctcttttttttcttcttaatatgtaggagtcaattatctttcctagattctagtcctttcctggttatatgtgtggcaatatgttttccaaatcagtgtttattaatgcacagaagctttaaattttaataaagtcaatctcatcagaccttcccaaatattatactttttgttttgtttaagaaattaatctatattttattctaaaaatgattgttatgctttttgtccttaggtcaataattgtttattcaatacatatttattgtgtgcctattaccatattttatgattttaagccacgtatatttttacatttctgatattgggatgcatttataattgaaagtatcgtatatttaattctttaatttactatggagtctttatggatgattaacaatattatttattttgtatcaccaaatcagggccactgttagaaaaagaatttttttgaaataatatttaaaatcttttcagtcccttagtttattagcttgtccagaaagaatttcatcaatcatctttttttttcaccctctgactctcagcatcgatcatcttttatatgtcaagtacatatgtactgggtatacaaagatgaatgagacataatttcttgcctttaaagaattcacatgctagtgtactggcttccaaagaaggccatttgcacagcgtttcattggaatttgggaagaacacaggagaacttaaaaaaaaatttaatattttattttgtcagttttataacattttacattaaaaacgtaacattttgtaatattttacagttgtgtatgtatacacatttttaaaaaacaggcattttttaatgtatttgttaggatatgtgtttagattggatataaaattaaagcaaatttgcagactattgatgaaatataaatgtaaagaaataattataactttaaaatcataaacataacaaaggtatataaaagatatagtggtattagagaggtgagagtattccaacttccctgggtatagttgagtcactgaagcatggaattgcagaccgagaaagtgacacaaattagttttgaaggattgagtcatggaggtcaggagcattagatggtttgttagcatacatttttttttttttttttgagacagtcttcctctgtcacccaggctggagtgcartggcatgatctcagctcacagcaacctctgcctcccgtgttcaggcaattctcatgcctcagcctyccgagtagctgggaccacaggcgtgtgccactacgcccagctaatttttgtatttttagcacaaaaatacaaatacatgaggttttgccatgatggctacgctggtcacgaacttctggcctcaagcaatctgcccgctttagccttccaaagtgctgggtttacaggtgtgagccatctgcacccggcctgctagtatacttgacggatggtaaggtgtgggacatagcaaaaaatgagaatggattgttaagtagagggccagattacttgaataaggcattttaacttagttctttatgtaataaggcattgttaaagggttttcattatagtaatgatatgaatatacttttactattttgaaagataactagtggcagcatggatagtgttttgaagggagtaagaactgaaaacagggagacaagctagtcaataattattgagtgtttcctgtagtctcttctcagtaattcaacacctatctgttgagagcttaactttgcccataggcattgtggatttgaaggtgaacttgctttcagtctattcttgaagtttggtgaatttatgtataaaggtagaaagcttctaggagggaatttagacatttacatatgttttaacagttgttagactttttttttttttagaacataaaagagggcttacttattctactttaattttataggtgtctgaattcttttaataactctaataaaccagcctaacgttttagatttttcaaccttgttgatgatgttgattgcatagaagagatgacacatggactgtatggttatttactagcatttccccaataaatatcctttacagatggttgtatgcctttatgtaaagagaacgtgtgctacctcatacctctcactcactttgtctctctccttattctttgctgaatatcaaagttgtcatccttctaaagttgagaaaaagacatccccaaggtatatttaatgtttactccttaagcaagtgctgccacccctatgtaaacattaggttgagtaaatgttaggttggagaatatacattggagaagaggaaaaagacagaaaagatgggggaaaaatgcacttaaggtgtgtccagttgcaaaataaaagagtagcttatgtgccattgaagcgataattactaatctggatggttactgtcaaccagataatatgttataactgtgtttgtatatgccacatggataggacgagacttatcctcaattcatacaaaagtgttcatgtactttttatttcacagttcaaaccatatatgctttaagaacattcaagggaaagtgtatttgagggagagtactatttctttataactgtataactttgaacatattatgtaaacttctgtgttagcttccagagttgagggtgtatttgatacatgtcttctacttgctgatgtctatagcattagcactttaaacaacaaaaaacattgtaggtaactgtgcgacctattttggtgtgttactcgcttgtacttttctgaattctgtggattttagtttttatactgtaatagggtactgttaaagggtttcaactaatttatataaataattaaaaaagactagtgagtatatattttttctattttaaaatgattctgtacctataaatagtaagtatattaatactttaattcagatgtgaaattgtttattttattttttattttttaaaatttggaagtggtggtcttgctctgttgcccaggctagcctcaaactcctgggctcatgtgatcctyctgcctcagccttccaaagtgctgggactacaggtgtgagccaccacacccggcctagatgtgaaatatttcgatcaacttacagtagaattgtgccactttctcatactgttttatacagttgtattttaaaataagtctctttgtgtgtttagatagttgtattgttagtcaaactaattattagggttggtatatatgtttgtgcacgctgtgcactgaataactccagaggatgctgtttacacagactattatgtacattgtggcagccttgataattatgctgataaaatrgttgttagtgttgaaatttaactaattctttatttaattcagtcacagcccgttggagattgtgattttaatgttcgtctgcagtgtatagaacgagaaattataagtcctcgacacgaaaaaatgaagactgggctcattgacaaaacacaggaaccatttagcgtcagaaataagccgttttttgacatctgtacttcaagaaaggtaaagtttaatttttttttaaattagtgctaataatgtctcataattcagcttacaagatgaatatgaatgacattttgctgcccagttgtcttsactttgtcagaaaatactcgaattgggtatagcgctgttttggccaaacatggtacgactcctaggctttttctcttgaataagattctcagtggtggcacctgaaactaggctgtttccctttttctcataatagtttttgtttcatggtcattggtcatactacgttttttaaaaagctataagcaacatagaactgtattgaatgaaaatcattaggcctgctcctacacatcctgaaggtaaagtgtttggtacgtactcttattaaaaagatacatttatatatatgtgtatgtatatctatatatacagatatatatatagatatatatacacacacacatacattgaaggttttcttttagtatttttgttgtttccacttaaaatgaatcatatactaaggccaggctcggtggctcatgcctgtaatcccagcactttgggaggccaaggcgggcagatcacaaggtcaggaactcaagaccagcctggccaatatggtgaaacccgtctctactaaaaatacaaaaattagccgggtgtggcggcgcatgtctatagtcccagctactcgggaggctgaggcaggagaatcgcttgaactcagaaggtggaggttgcagtgagccgagattgcgccattgcactccagcctgggcgacagagcaagactctgtctcaaaaaaaaaaaaaaaaaaaaaaaaaaagaatcatactaaatattccaagatgttggttctttttgttttgctttgttttttcacttaacagtatggcttggagatatttccatgtcagtgtatagagatttgccatgttatttgttaagtgctgcatggtaatgatagtaaaggtgtactatacattatgttgtaattgatgggtttttagattgcttctagtcctttgctattaccaacactgtttcagtgaacatttttgtttatatgggtggatatttcttcagggtaagtagaatttttggtttaaagattatgagtaatgttagtaactactgccaaattcctttccaaataaagcaattttgtctccagcagatgagagagctcattttcccattgccagcactctttttttttttttttgatctgtaggcaaggcagtgtattgtaatgggaaggtgagtatgagttttttgttttgttttgttttgttttgttttgaggcagggtctcactcttgctcagcctggagtgcaatggtgccatctcggctcaccacagccttgacctcctggggtcaagtgatcctcccacctcagcctaccgagtagctgggactacaggcgcatactaccatgtccagctaatttttttgtatttttttctagagacgaggtttccctgtgttgcctaggctggtctccaactcctgggctcaagtgatcagcctgccttagcctcccaaagtgctgggattacaggtgtgagccaccatgcctggctgaaaagttcatttttatgtagttaaatttggcagaatatttcttgcatcttctggttttctgtcttgcttaagaagcccttcatctctaaaatgtttttatattatgttctaatattgctatgattttgtctgatgattacatttagatgctctatttttactcttccattccttcagggaattgtcttctgtttgcatagtctatttagcatccagtttcttctattcactgtctcttcttcatgccctgtgttctcacatgaacatactaattctgtttatgcctcatcttctccattttccttttcattctcttttttttctttgttattatttttagtatcactcatatgactactgttattactggtactactgttattgctgctgcatagtttgttttcagtgggatatttaccagatctagtgtttaaaagcaattgtaccttggtatttctgttttttttaagacatataaactgcatattgactatttcctaagacttttctccatttctcatttgtgcttttggtgagattcttatttctttgtatataaactatacatggtgttttctgtgtgcctgttatgtgttaggatgtctgatttattgaacccaccttttaatttgtttttcttctctgacttcccgttttcctttcttccttgttttataatttgtctgcagttttgaatattcgtaagacattcttgcttttggtagtggttaactttcttagcaaaccgattgatggttctaattcatagatatgttagttggcagtcataaagctctgctctccttatcagaatttaaatgtattttgagcctgcataccacatggtcccatgcttgattgtatactgataaacatttgaaatgttttagaagttttagaagggataagggggcacatttggcattcagaagaaggccagctggctatttcctaagaagcctgaaggaatgttacaccttttgtgaaatttgtcatattccagaatcaggtttgtagcttcacagattcagaaactttgggaggcatttgctctttttatatttctctattgtgagttgaatttatagttcagctttgatactgggttatgagtacttttacattaaaattgcacgtggcatccaagaagttgcattgtggtgggattttattttctaaaccagtgttttatatgcctggtttagggcatttgaaaaattggtggccatgaagaaccatggtctgtttacattcaacccagggaatagtacccaaataatttatattttttgggaggagggtggttatgatagaattgtacaaaaatatagcaacatatgcaatcatgttttaaactcttcacctgctcctactctagtctgcttaatttggtgtcagtctttggatatgatattagctgtaagtaatcctagcactattgagtggctatctttttcattcaacaaatacagagtaatcatcctacttttattatgattttgtgtaacacctgcttggcatgggaattttggttgacctctgccgctatgatctttcgactgttcactgcttgccttttgtgtctgttttggcagcagggatattaagggggtacctacaagagcctgtgtactactgtgccctgtccaataggttgggtaaagataaagttaatatttaaccatctgctctgtccacggtggaagtctattaactgaaactgtgttctcttatgagaacattttctaaattgtaaatacagtataaaagttgggcaaaagccagattcctttggtttgtgttcatttttaaaaaatgaatttcacaggttgtgctgtcataattcagagttcagcatttaagaaaatgtgtttagatagtataatttcattagtcaaatcagtactgcttagaaatatttgctaatgtgtaatatcagaactattttttagggatttgaaacaattatgtggaacaacttgttatgtagtttttcactagaaagacagtgttcttactatgtttttctttatacttagcttatgtaattccttaaaatcataggatatttcttttttaaaagcaattcttgctaggcgtggtggctcacacctgtaatcctggcactttggaaggccaaggcacttggatcgcttgtgcccaagagttcgagaccagcctgggcaacatggcaaaaccctgtctctacaaaaaatactagaaaattagtcgggcatggtggcacatgcctgtagttccagctattcaggaggcggaggtggaatgattgcttgagcctgggagtttgaggctacagtgagccaagattgtgccactgtacttcagcctgggtggcggagtgggacactgtctcgaaataaataaataataaaagcaattctaatttttagaattttgaatagtctcctctcctcactttcagttcttattattgytttttgtccttaatgtctcttactgaagtattttcggttgtagaatacaaaaggaaaacacactttatagcagaattggcataacatgtaagaccttagtaacaccagttataggataataactacaattgacaggttattgctgtggagatttttatctttgctaatgggatggtaaaatagtgatattacgaaccttacagcattttcagggaagtatagatcatttattttaagaatggtagcttttatgaagttttaaacaaaatttacagctataaaacatgcatactaattttgtagaaaaataatagaatttcatatgtgtatctttaaaatctcaaagatgattctgattttaggaatttattaatattgctctataactctttgttttgtttaatttgatctgttaaacacaataaagggataattgttcagtttttaactttaatatacagtcagaatacaacatccaaaatagtaataacaagctgtttttcaaattgcgattctatttacatttccagtttgaaggccaattcaaaaagaattatttgaacagactatatatgactaacaaaactttaaaaacatgcagtaaaaagtttctctgaaagctccccatccatttatcaccttctcagtaaccattgctgttagcttttagtgtatccatccagaatttctttagcaataaataaacacatttatttatattcttactatctccataaagtgatgatttttttttctttttttcgaaacagagtcttgctctgtcatccaggctagagtgcagtggtgcgatcatggctccctgcatccttgacctcccagactcaaacaatcctcccaactcagcctcctgaatagctggaactatagaccggaaccaccattcctagctaattttttaattttttgagtgatgggattttgctgtattgaccaggctggtctcaaattcctgggctcaaacgatctgcctgcctcggcctcccaaagtgttgagattacaggcatgagacaccatgaccagcatggtgattttttaatacactgttctgtcgttttctttttttctttaaaaaaaacttgacagtatctcttaagtctcttcactccagtataggtacacagagattagatcatcttcatttctctttaacagttgcacagattttcattgtatcagtatgccataacttagctaacatcatagtcatagacatttgggttatttttagtctgttgacatggtttttttttttttgcatatagatattcagttgtttctataccagttgaagagactatccttttctcattgaattacttttgcacattcataaaaaatgaagtttgttgtgtatgtctggttctgtttctagactgtctgttcagttctcttgatctatttggctgtctttactcaagtaccatactgtcttgattatttttggttgttgtaaatcttgaaatcagatagtattaatgttccaactttgttgttcttttctaagttgttttggctattctaggcctttgcattttcatgtgaattttataattagctgtcaatttctacaaaaaagcctactgggattttggttggaattgtaatgaatatataggtcaattttggggaagaactaacatcataacaatgccaagttttctagttcatcaacctggcatatattttcttttatgtaggtcttctttattgtctctcagcaatttttgtagttttaagcatgagattttgctcatcttttttcagatttatttcatactttttgatattgtcataaaagtctttgtaaaatttccgtttctgactattggtagtatatagaaatatacttttttccccaaaggagtacgttgatttttgtattttgatgttttatcttacagtcttgctaaactcaattattatactaataattttttgtgaatttcatcaaaattattacatagacaactatataagtgaaaaaggtgctacttttccctttccaacttggatgcttttaattttattctcctgccttactgcactgactagaatctattgtttaatgttgtatggaagcagtgagagtgaacagccttgtcttcttccacatctatagggaaggaaaattttgtttttaactattaaatatgatgttagctataggactctaggatagatgccttttatacatggttaggttttaaacttgaaagctgataattttgacatacaatcttatttatcgaactctcttacttttgttattgcttgcaataattttgcaatttttttaggtattcatattaagtgtaaatagtgatatttttacttattggatttttcatacattaacttttgtctagtttgattatacataaatacagttttaaattgtggcagtagttatggggattcttttttcctgatttgagtgggaatgcttctggtgtttcttcagagtatgatatactgcctttaattctgagatctgttttatcaggtgaaacaagtatgcgtttgttttatttttaaccaagaatgggtgttcagtttggtcaaatggcttttcatctactatagatcgaatactatttttttttctgtttagatctgtttatctcaggaattatatgaaaatatttcctgatgttgaatcattctctcattcctgggataagccctactttgtcttaatatattattttaaaaattgtactgcccagtttttttttctaacttttttaaaggatttttgcattgatgtttataaataatcttgatatgttgtaaatctttggaaactttttcatcagtggtacactctgttatactctgttttcatcagtgtaataaaaaaacttggtttaaaaaaatatgttctagagcttttttttgttgttgttgttgttttaagacagggccttgctctggtacccaggctggagtgcagtgacacaattatagctcactacagccttgaactcctgggctcaagtgatcctcctgcctcagcctcccgagtagctgggactacaggcacgtgccaccacactcagctaattttaaaattttttgtggagatagtgcctctcagtatgtttgaccaggctggtcttgaactcttaggctcaaggctgtgctctggccttggcttcccgaagtgttgggattacacggtaagccaccatgcccggccagagcagttttaataaaaacattggaattacctgcttttttaggtttttgaggaattcctccacggaattatttggattgtagtgctttgggtttgggttaatatctttttcacttcctatgtgaaaattggtacatttaaatttttctctccctttgagtgcaatatccatttattaaaatacctgaagtttcttctttcttttttttggggggtatttttttgcacttgatcttagccaagaagttgagaactgatttttaaaaatgtgatagctatttaatttttttctcctcccatgaacttttagattaattttttatttctgctcttttcctaagccaagcctagttctgtttttattttattttagagataggatcttgttctgtcacctagtggagtggagtggtttgatgacaactcactgcagccttgacttccttggcttcagcaatcatcccgccttagcctcctgagtagctgggactataagcacgtgttatcatgcccggctaatttttgtatcttttgtagagatggggtttcaccgtgttcccctggctggtcttgaactcccgagctcaagcagtctgcccaccttgacctcccaaagtgatgggattacaagcgtgagccaccacagctggcaaatatctgataatttatttgtcatgttagtaagggttttgcggttttggtttattttttcatctttcccaggattgtgagagttttaaaatttctagtggaagagtctttattttctgagtttattcttaatttaaaaatttttattatagtgacatgagagaatattatctgcacttttctactttttggaatttattataaagtgtcatcaattatatatatatataaatctcattcatatgtcatttcagagggaaatttaagaaaatcatataatgcatactaaagagaattcatactttcatatggtgaacctaaagatttattgtcccagataacttcctttggagtagtaaatcatatatatatatgtaaatcttatatatacatgtaaatcttatatatatatatatatgtaaatcttatatatatatgtgtgtgtgtgtgtgtgtgtgtgtgtgtgtgtgtgtgtgtgtgtgtgtttttaatagagacagagtcttgctgtattgcccaggctggtctcaaactcatgggctcaagcaattctttcacctcagtgtcccaagtagctgagctgcaggcgtataccactgtgcctggctaattataatactttctaaaactttctggtacagatctatcaccttaaaattctggtagttactgactttttgtcctgctctgaagtttaatgtttttatacgatgtttttcataggcattttagtagatgttttggaaagtttgtaccaaatctgctagacagacaatattttaaactacaaagctctgttattacttgcttagtctgagaagctgctttttatgtttcataattattttccccttattttcagggaataggttatctgtgtatataagtagatgggaaagaccactctaaaattgctcatttgtggagtgataacatttcctgatatattcttgtctaattgcctatttttctgcccaattggcaaaaataataatgcattctcttctttgacaaatttctcatgtttacttttcctgttgaaatagtatgttgtctttctttattttctgcttgtctgtgtctggaactctgtacatttcccttagagggagtcagttgtgtatagttaggatctagtgaaagaacatgcaaagaatcactcttgagtgattttaggaaattgtgcttgattaaaaaaaataagcaagtccctgtcccctttcccccatttcaaaagctagaattaaaaaagaaaacaaaagaacagataatctcttgaagttcctagtggcaaagcttttctctgcttggagtcattttactttctactgtctaattagactagaaaaattttatgtggaaaatatttttaaataatttgcttattgctgtttcaaaagtaaaatgtttgctttataggatgaaagagtagtaaatgttaagatctcctttctaataactgttgagagtattaaatagacaattacaaaggttattcttttactacatttaatttttcaagaacacatctacttttaaaataattttattaatattagttatttgcatgcttcgttaggcaggaatttaaattttatgtttatttatgtatttcatttggcattcagatttattttctatgtattgcttttcttttctttattttcttgtttatcactaaatataaatttataagttcttaagtgtctgttcaagactagtagttcataaaaccataaggcttgttatttttatatcactgttctatgactgtatcagtgttgtattgtttgtatcatagtaaaagaaacagaacctttgagagtttgttatggcaactgtggttgaagagaagaaagaatttttgcataaacatgaagatctattgttcacacatagagattttcagtgattatgcctaatttttaatgaaattacagatataatggtgcaactgcattttgatttgaaagcagatgcaagataaaatgaggatgaccattccttatcatgtttgtggtgttcagttttgcattatctagtctattaatatgtcattcattattgattattgaatatggcctgatggatcctttcaatctcattcatatgtcatttcagagggaaatttaagaaaatcatataacgcatactaaagagaattcatactttcatacggtgaacgtaaagatttattgtcccagataacttcttttggagtagtaaatcttattcattgacacatgaagaaataattgtatctcatgccatatatatttgaaatatttctatgaaagatttttaattgtaacatggagaattttctatgtttgctaaatatgagagctaattttttttataattaacattcaaaaaaatacctatttgtagattcagaggaaaatgatgattattattttattttattttttattcttttttttgagacgaagtctcgctctgtcgcctaggccagagtgcattggtgctatctcggctcactgcaacttctgcctcctgggttcaagcgattctcctgcctcagcctcctgaatagttagatatcaggtgtgcgccaccacacccggctaatttttgtctttttagtagagatggggtttcaccatattggccaggctggtctcaaactcctgacctcgtgatctgcctgcctcggcctcccaaagtgctgggattacaggtgtgagccaccatgctctgtcaaaagatgttattggcctccaaaataattaagaggcagttactttgcytaaatctgatcaattaattgttctgtgattgtgaatttgctgcaggttaacaaagccataggattgacatagatcacatgactgtattcacattcagctgaatacttttctaaaaattatgctttaagttctgggatacatgtgcagaacatgtaggtttgttacatagatgtgttacacacatgtgccatggtggtttgttgcacccatcaacccgtcatctacattaggtatttctcctaatgctatccctcccatagcccccaacccccaacaggaccccatgtgtgatgttcccctccctgtgtccatgtgttctcattgttcaactcccacttatgagttgaagatgcagtgtttggttttctgtttctgtgctagtttgctgagaatgatggttttcagcttcatccatgtccctgaaaaggacatgaactcatccttttttatggctgcatagtattccatggtgtctatgtgccacattttctttatccagtctatcgttgatgggcatttgggttggttccaagtctttgctattgtgaatagtgctgcaataaacatacatgtgcatgtgtcttttagtagaatgatttatactcctttggttatatacccagtaatgggatggctgggtcaaatggtatttatggttccagatccttgaggaatcgccacactgtcttccacaatgatggaactaatttacactcccaccaacagtgtaaaagcgttcctatttctccatatcctctccagcatctgttgtttcctgactttttaatgatcaccattgtaactggcatgagatggtatctcattgtggttttgatttgcatttctctaatgaccagtgatgatgagcattttttcatatgtttcttggctgcatacatgtcttcttttgagaagtgtctgttcatatcctttgcccactttttgatggggttgttttttcttgtaaatttaagttacttgtagattctggatattagccctttgtcagacggatagattgtaaaaattttctccattctctagatttcctcttcattctgatgataatttcttttgctgtgcacaagctctttagtttaattagatcccacttgtcaattttggcttttatttccattgcttttggtgttttagtcatgaagtctttgcctatgcctatgtcctgaatggtattgcctaggttttcttacagggtttttatgggtttaggtcttatgtttaagtctttaattcatcttgagttaatttttgtataaggaakgggtccagtttcagttttctgcatattgctagccagttttcccaacaccatttgttaaatagggaatcctttccccatttcttgtttttgtcaggtttgtcaaagatcagatggttgtagatgtgtggcgttttttctgaggcctctgttctgttccattggtctatatatctgttttggtaccagtaccatgctgttttggttactgtagccttgtagtgtagttttgaggtcaggtagcatgatgcctccagctttgttctttttgcttaggattgtcttggctatatgggctcatttttggttccatatgaaatgtaaagtagttttttccaattctgtgaagaaagtcaatggtagtttgatggggatagcattgaatctataaattactttgggctatatggccattttcacgatattgattcttcctatctgtgagcatggaatattttcccatttgtttgtgtcctctcttatttccttgagcagtggtttgtagttctccttgaagaggtcattcacatcccttgtaagttgtattcctaggtattttattctctttgtagcaattgtgaatgggaattcactcatgacttggctctctgtttgtctgttactggtgtatgagaatgcttgtgatttttgtgcatcgattttgtatcctgagactttgctgaagttgcttatcagcttaagttgatttggggctgagacggtggagttttctaaatatgcaatcatgtcatctgcagacagaaacaatttgacttccagtcttcttatttgaatacactttatttctttctcttgcctgattgccctgtccagaacttcaatactatgttgaataggaatggtaagagagggcatccttgccttgtgctggttttcaaagggaatgcttccagcttttgcccgtgtagtatgatattggctgtgggtttgtcataaatagctcttattattttgagataagttccatcagtacctagtctattgagaggttttagcatgaagaggtgttgaattttatcgaaggccttttctgcatttattgagataatcatgtggtttttgtcattggttctgtttatgtgatggattacatttattgatttgcrtatgttgaaccagccttgcatcccagggactaatccgacttgatcgtggtggataagttttttgatgtgctgctggatttggtttgccagtattttattggggatttttgcatctgtgttcatcagggatattggccctgaaattctctttttttgttgtgtctctgccagtttttggtatcaggatgatgctggcctcataaaatgagttaggttggagcccctctttttctgttgtttggaatagtttcagaaggaatggtaccagctcctctttgtacctttggtagaattcagctgtgaatctgtccggtcctgggctgtttttggttggtaggctattaattactgcctcagtttcagaacttattattggtctattcagggatttgacttcttcctggtttagtcttgggagagtgtatgtgtcgaggaatttatccatttcttctagattttctagtttatttgcatagaggtgtttatagtattctctgatggtagtttgtatttctgtgggatyggtggtgatatctcctttttcatttttttattgtgtctatttgattcttctcacttttcttctttattagtctggctagtggtctatctattttgttaatattttcaaaaaaccagctcctggattcactgactttttttgaagggttttttttttgtgtctctctctctctccttcagttctgctctggtcttagttacttcttgtcttctgctagcttttgaatttgtttgctcttacttctctgtttcttttaattgtgatgttagggtgttgatttaagatctttcccgctttctcctgtgtgcatttagtgctataaatttccctctaaacactgctgtagctgtgtcccaaagattctggtacgttgtgtctttgttctcattggtttcaaataacttctttatttctgccttaatttcattatttcattatttatttcttccttaattaacttctttatttctgccagtagtcattcaggagcaggttgttcagtttccatgtagttgtgcggtttttgagtgagtttcttaatcctgagttctaatttgattgcactgtggtctgagagactgttatgatttctgttcttttgcatttgctgaggagtgttttacttccaattatgtgctcaattttagaataagtgtgatgtggtgctgagaagaacgtacattatgttgattttgcttggagagttctgtagatgtctattaggtctgcttggtccacagtttgagttcatgtcctgaatatccttgtcaatttcctgtctcgttgatctgtctaatattgacagtggggtgttaaaagtctcccactattattgtgtgggagtctaagtctctttgtaggcctctaagaacttactttatgaatctgggtgctcctgtattgggtgcatatatatttaagatagttacctcttcttgttgcattgatccctttaccattatgtaatgcccttctttgtctcttttgatctttgttggtttaaagtctgttttatcagagactaggattgcaacccctggtttktttttttttttttttttttgctttccatttgcttggtaaatcatccctttattttgagcctatgtgtgtctttgcacacacataggagctgggtctcctgaatacagcacactgatgggtcttgactctttatccaatttgccagtctgtgtcttttatttggggcatttagcccatttacatttaaggttaatattgttgtgtatgaatttgattctgtcattatgatgctagctggttattttgcccattagttgatgcagtttcttcatagtgtcgatggtctttacaatttggtatgtttttgcagtggttgatactggttttttccttccgtatttggtgcttccttcaggagctcttttagggcagccctggtggtgacaaaatctctcagcatttgcttgtctgtaaaggattttatttctccttcgcttatgaagcttagttggctggatatgaaattctgggttgaaaattctttcctttaagaatgttgaatctctcctctggcttgtagggtttctgcaaagagatctgctgttagtctgatgggcttccctttgtgggtaacccgacctttctctctggctgcccttaacattttttccttcatttcagccttggtgaatctgatgattatatgtcttggggttgctcttctcgaggagtgtctttgtgatgttctctgtaattcctgaatttgattgttggcctatcttgctaggttggggaagtcctcctggataatatcctgaagagggtttccatcttggttccattctccctgtcactttcaggtacaccaatcaaacataggtttggtcttttcacatagtcccatatttcttggaggcttcattagttccttttcattctttcttctctaatcttgtcttcaggcttcatttcattaagttgatcttcaatctctgatatcctttcttctgcttgatagattcggctgttgatatttgtgtatgcttcacgaagttctcatgctgtgtttttcagctttctcaggtcatgtatgttctctaaactggttattctagttagcaattcctctaaccttttttcaaggttctcagattcgcattgggttagaacatgcttctttagctcggaggagtttgttattacccaccttctgaagcctacttctgtcaattcctcaaactcattctccatccagttttgttcccttgctgatgaggagttgtgatcctttggaggagaagaggcattctggcttttggaattttcagcccttttgggctggtttttcctcatctttgtgcatttatctacctttggtctttgatgttggtgaccttcggatggggtttctgagtggctgtccttttgttgatgttgatgctattcctttctgtttgttagttttccttctaacagtcaggcccctcttctgcagctctgctggagtttgctgggggtccagtccagaccctgtttgcctgggtatcaccagcagaggctacagaacagcaaagatttctgcctgttcttcctccggaagctttgtcctagatgggcacccaccagatgccagccagagctcccctgtatgaggtgtctgttgacccctgctgggaggtctctcccagtcagtaggcactggggtcagggacccaattgaggaggccatctgtcccttagcagagctggagtgctgtgctggagatccgctgctctcttcagagccagtagtaggcaggaacgtttaagtctgctgaagttgtgcctatagctgccccttcccccaggtactctgtcccagggagatgggagttttatctataagcccatgactggggctgctgcctttctttcagacaccctgcccagggaggaggaatctagagaggcagtccggctacagcagtttgtggagctgaggtggggtctgcccagttggaacttcctggaggctttgtttacactgggaggggaaaaccacctactcacgccttggtaatggcagacgcccctccccccaccaagctccagcatcccaggttgacttcagactgctgtactgccagtgagaatttcaagccagtggatcttagtttgctgggctccatgggggtgggatttgctgatctagaccacttggctccctggcttcagccgcctttccaggggagtgaacagttctgtcttgctggtgttccaggtgcctctggagtatgaaaataaaactcctgcagctagctcggtgtctgcccaaacggccacctagttttgtgcttgaaacccagggccctggtggcgtaggcatccgagggaatctaccggtctgcaggttgcaaagactgtgggaagagcgtagtatctgggcctgagtgcactgtccctcatggcacagtccgtcatggcttcccttggctaggggagagagtgcccaaaccccttgtgcttcccaggtgaggtgatgccccaccctgcttcagctcaccctctatgggctgcacccactgtctaaccaatcccaaygagatgagccaggtacttcagttagaaatgcagaaatcaccgccttctgcattgatctcgctgggagctgcagactggagctgtacctatttggccatcttgccaggcctctgaatacttttttttttaaagtgtgtaactcaacaatgtgagccactactttggcattgtctgacttagtaggttttttagaattttaaagtgaaatatggcagttaaataatagcgtctgccctttccacttgcatagaagcttctgttggtcattgttgaaatgatggaggtatttagttccagcacattaattttaaagtaatttttatagtatattatatatatatatatacacacacacayatatatatatatatatatacacacacatatatatatatatatwttttttttttttcttttgagacagggttttgctcttgttgcccaggctggagtggaatggtgtgatattggctcatcgcaacctctgcctcccaggttcaaatgattctccttcctcagcctcccaagtagttgagattacaggcatgtgccaccatgcctggctaattttgtatttttattagagatggggtttctccatgttggccaggctagtcttgaacttccggcctcaggtgatctgcccatcttgtcctcccaaagtgctgggattacaggtgtaagccaccgcacctggccgatgatttttatacttcgagcagagccagtcttactaaaagtaaaatatagaaaacttgtgtgttattattgaattattgcaataaaattttaaaatactttgagaaattasttcagtgaagccgttaaactcgtaggtttaagttaacttctctaaggcatgagtgtgaagacaaatgcatgaaaacaaactgtaaatcacagatatgattctagtacacaattggtgatggtgttgaagaagggtgtcagacaactctgttgtttatatggaaccagattttctgtaccttgtttaccaaataagatgctatcggttgtaaaccatgccccctgcccacctttttcttttcatacctttggaaatctcttacccagtggtacatgaaatcaactgtgatttgtcattgtaagataagtgctgttttcagacatgtgaacgtgtgggctgtgaaatggggaagtatatatttcccaaaagagggaagaactctatattttctatgctaattgtaaaattggtttgaatgaaccaggcatttgaatagattagaaagagatcagcatcaatttgtttgtgttctaccattgtgccatcagtcttgccttactttgttggacacgggtgcagagtgaggagaaggatagtggaaaatgcaaacaatttatatgaacataaggaatatggcaactataaggcatacatttaaaaataatggtcataatcagagcaattttgtatattagtgatagctgaaaagctctaatagtgaactatttcagtagaagaccaatagaacacactgtgctttgcagtggaagaaacagtaccactgtataacaaagtttggttgtagacacaaaacaaaggcaaggtttacatgtattcaaataaacatttttaaaaaaatatatgtatgtcaaacatatacacactgatttggaaaataggctgtatttatttaaaagtaatggttttcaagttagtatctctgattagatgtttagaatgctaccaaaattttgttactaatgtttcgatgaatatctctttagataacttagtgaaagttcatgagttatttccttaggataaattctaaaaatggaatctatgccaccaaatattcttgaaagtttgtgctactgtgtacctccacccatgtggtaggcagaattttaaggtgaaccccaatgcctgttgtgtaaccccctcctcttcagtgtgggtgggatctgtagcttgcttctaaccaacagatggcaaatgtgatgggatattgtgtcaattattaatttatattcttagttctcagtgtacccttcagtgtatgctctatgataactgacagacttcctttaagcattttcacttaagaattttggcattttgtaaataatttttggttattcttttcctttcatttttacttacatgttttttagaaaacagacagaaggctgggtgtggtggctcacacctgtaatcccagctctttgggaggccgaggtgggaggatcacttgaggtcaggagtttgagaccagcctggccaacrtggtgaaaccccgtctttactaaaaatacaaaaattagctgggcgtggtggtggacgcctataatcccagctactctggaggcagaggtaggagaatctcttggacccaggttgcagtgagccgagatcgcaccactgcattccagcctgaatgacagagtaagacgtctycaaaaagaaaaaaaaaaaaaaaggaaaacaaacgtgttttcaatttattgcagggtcctttttgttggcgtcttgtttatatgtgttttctttcaaagcagacctgtccaacggaactttctataagatgaaaatgttctgtaatctttgctatgtactacagtgcctcctagccaaacatggttattgagtagtgcttgaattgtggctagtgcagctgagggaactagatttttaatgtcatttaatttaaattttagtagccacatgtggccattgaatagcacagttttaatatatagttgtgtgccacttaacartgttttggtcaactttggactgcatatataatggtggtcccataaggttataacaaagttgccctatacaggtgtaccattttttatcttttatacataaatacttaccagtgtgttagagttgcctacggtattcagtacagagtatagttacatgctgtacaggtttgtagcctaggagcaataggctgtatattgtatagcctagtgtatagttggctgkaccatctaggtttgtgtaagagcagtcggtgatgtttacacaatgacagaatcacccaacaatgcatttttttcagaagacactcctgttgttaaatgatgcataactgtatttttaaatttaatttgctggtatgtaggatttttgtgcctatatcatagattctttttacatttaaagcaaaataaaacttatcttgatgtatacctgtatgatctagttcctgcccaccttgctgctaattttctatgattttcttttacagttactgttcactagtgtttttatttcttgtatttccacatatgatattttatagttcatgttaagacatttgcactctggaactgtgcttagcttttatagctgcctctttctagttctcagctaaatctcaactcttttgttagcctgatctttgattttttttccaacaacattttatttagaaaaaatttaaatatacagaaaagttgaaagaattttattgtgaacacccatgaaggcctagagtctatattttcctgtaccagctctaacacatattaattcatctatttctctatccatccattagtctattttttggggtgaatttcagagtaaattgtaatcttccatttattttcagttttattttttactgggtttatctctttattttgttggagaagttctttacatatcttggatattggtcttttgtcagatatatttttctgatatattctcccactttgtaatttgctgttttattttcttaacagaggcttttttttttcttttttccttggatggcattttgctcttgttgctcaggctggagtgcaatggtgcgatcttgactcactgcaacctcagcctcccgagttcaagagattctcctgtctcagcctcccaagtagctgggattacttacaggcacgtggcaccacgcccagctaattttttgtatttttagtagagacggggtttcaccatgttgttcagtcaggctggtctcgaactcctgaccttaggttacccacctgcctcggcctcccaaagtgctgggattacaggcgtgaggcaccatgcccagccaattttcttaacagaggcctttgatagcagaagttattaattcactcgtttgatttatgaattatttttcttttatggatagtgctttcttgtgtcttgcgtaaagaaacctttgcttgcctaacccaaggtcagaaatatgttctcctatgttttattctgagagcctgtggcttagtttttatgtttgggtgtattatctgtctcaaattaatgtttctgttagtaatgtggagtaggaattgagattcatatcaccctccccgcttgttattctagcaccatttgttgaaaagacttcttttcctggacacctttgtcaaaaattaaatcactgtattataaatgttgatgtatttgttggttgatcacctgtttttaattgccatcctatcaatgttcactctttttatgtgatacagacacactttctgataaaataatgtgatagatttgccactattgcaaatgcctggaacgacggaatgggtgatagaggttggtctgtagttgacagtagatggagaatgattttgtagttgtctgtttttattatgtaaaatgaatcaggggatttatacctatttttctatgacagagaatagtttatttacactgtagtgaattgttctgtgaaagcctgaatgaactcagtcctaaaataacttttaggatatttttaaggaggaaagtctttgaaaaacatagttagcaacttttaacatttttatgcgtcacctttgttaatatgtcatttttagaaaattatcaatgtcattaaaatgttcaaatgtattatattggtgttggacatatattttcttttaaattttgttttctacgtatctgtgtaactttagcattgtgctatcatctcgaggggaaatccaggtgtatgtttgaatcccttcccaaatgtgtctctctaattccctgagcccactaaaatctctacttgtttccttttcccttagcagtggccttttgcctagggaaaaaatatggattttctaagttttgccatatgttaaaatcaggaaatgcccctagagaaaaactggctgtataaattcagttcactttttggcccttcccctgactgcacagcacttaacagaatgttttaaaatttgaagtttatcagcttttcccatttgttttcaacttatttatttttcttagttctaattttgttgttgtttgtttggtgactagggaatgtagttggtatgatttctaggaatttgctggttttttttttttagtggcctaatatatcatcagttataaacatttctgtgaatgtttttatgttatagttttgtcataggtaagagaggaatattaaaatgtttcagtgctattacattttgtcttttttctaatatattaaaattttagcacataaacatttattactcatttcttcattatgaattttattatcgaaatcagttgacaccattttttctttcagtttgcttaggcatattttayacagaaatattaatttcttttattttgcttttgtttactttgaattttgcttaatcgtattttgcttagaaatattaatataggtttgcataatatttaattttccttaaaaattttgcttaacatgtgcttctatatattttatcttttatacttttctttgttcttctttttgtattattggatagttcctcaaaatgccctatatttcacacatctgatttttagcatagcatatttttcagaaatttgagaatgtaaaacatatgctttctaaaatttaattagcacatttttttctttagtgtttctaagcagacttttgcttggggatgtataacacacactgaaacatacacaaatcataagtttgcaacttcagaatttatttatttttttgcatgtgaaggtccggttgttctatcaccacttgttgaaaagactattttcgtttcattgcttttgctgttttgtcaaagatcacttgactgtatttatgtggatctatttctgggttctattctgttccactgatccatttgtctgttcttttgccgatattatactgtcttgattactgtagctgtatagtaaattttgagtctggtagtgtcagttgttgctcttattcttctccttcaatattgtgctggctattttagatcgtttgcctctccatacaacctttaaaatcagtttgacaatatttagaacataactttctgggattttggttgggattgtgttgaatctgtagatcaaattgggaagactgacatcttgacaatattgagtcttcctatctatgaacatgtgctgtctctccatttatttagttcttctttggtttctttcgttggaattctgtagtttttctaatacagatttttatatgtagttgttatgttatccctaagtatttcatttttggagggtgctaatgtaaatgttattgtattttaaattttgaawttcacctggtatataggaaagtgattgatattttttctgtataccattgctggtatgtgggaaagtgattgagttttatatatttgtgtcctgaaacctggctataattgcttattagttccaggagtttttgtttattcttttcatactttctgcataggcaatcatatcatttgtgaaaaaagacaattttatttctaccttcccaatatttataccttttacttgtcttactttattagctagaacttcagtatgattttgaaaggagtgctgacagagaatatctttgtcctgttctgacattaatgagaaaatatttgattgttttttgattcttcctctcatattagccaaacatggagggctgggtaactggccaatgttttaaaattttgctttctttatttaatagtgtggaactgctagcctcagataagtcatccatcatcatcatcatcatatcatcatcatcagtaatatattgttaaaattagactttttcactgggtaattggtaggagyctataggttttcttgtgataagttcagtcctcagaaagcaccactcttgtggcatttcagggcttaaattcttaatactctttgcttggttttccaagtctaaaacacygttccacatatgattctgtacaatctcatatctagtcatattgcagtgctgagaattgtagttccagagaggcatgtgtggagatagggttttgagaatgttcgtgaaatgtttcacctacctagtaggtgaaataatttttgaaaggtgaaataaagatccgcagctgtagcaggtagatagaaatgcctctttcattgctggatgggagacatatattgtaagagagtgatcacgtttgatgtggagtacttttaaataataatttagcagctgtctgttggtagagattaatgaggtagagtggaagagaatgtcagtagagttgaaaatatttaggatcttggacactaggatgctgagtagattgtccacatgtatggtagcatacatgaagaagacaaggatgattcaagtactaaagtccttgttggtagtttgatgaattacatggaaaagttagggttaagattagagtagctggtggttatgatgccaaaggattaggactctttactcaaaagtaatgtagtgtcttggaaataacattgaatttctaggagaatgcagatcctactgtttggatggttgttttgtggcacatgtgtttattagctgcatgagctctttcagcacccctttcagaatttgccctttttcattctttttttcttggggctgtttaattcatgagccccgccttgcctttcctgttactgtatctgtgagtgtaacagactatttctacttgaaaccttcctcttaatgaccttctcttttctatagttcagttaggtgctaagacatcatttcaggaaaaatgactttatcttttatctaccaaaaaatatatttaagttttatataattttggggaatacttaatgttatgaagaatactattcttgacattaaataattttttctaggtctcatagatgttataataactgtatatttcaaaattaaattttctaataatttgctgtttattgaattatgaactgaaagaaagtaggttgaagatattaaaggactagtattattatytttattgaaactgtgatgtggatataattttacctatcagcaaacaaatatgtttaacagaagtctttttatttattatgacataaatgtatggtcacataaatggttttggctaactaaatatagctctgtatagaaaaaacataatgattaaattttgcagtcatttattgctgattttaagagaagttaattttattaaaactgttctcagtatgtatcacaaatttatttttctcttgttgattatggcttttgcagcmcaattacaaaacattttaaactgggtttatcatactcgtaatgaattggtagttaatttcatagccttattttatcagtaactgtgcattcatctttagcctgacttgatttggttcctgatggacgaaataaacttttttctttttttctatgagtcggagtttcactctggttgcccagactggagtgcaatggcaggatcttggctcactgcaacctctgcctcccgggttcaagcgattcttctctcctgagtagctgggattacaggcatgtaccactatgcctggctaatttttgtatttttagtagagacggggtttcaccatgttggccaggctggtcttgaactcctgacctcgggtgatccacccgcttcagcctcccaaagtgctgggattacaggcatgagccaccgcgcccagcccaaagtaaacttaaattatgctcctggttaacccaatgtcttgagcttatgtttctaatatgctgactttcaaaaaatgatagtatatttggctgtatttttaggtgtttaagaatacttaggaacaattgcacataatgctcaacctgatggaaattacagatggttaaaagaaaataaactgttagatgttgactcatcttacatctgtatagaagaatgattttaaaatgatgtgaataggccgggcgcggtggctcacgcctgtaatcctagcaytttgggaggccgagacgggcggatcacgaggtcaggagatcgagaccatcttggctaacacggtgaaaccccgtttctactaaaagtacaaaaaattagctgggcgtgttggcgggcgcctgtagtcccagctacttgggaggctgaggcaggagaatggcatgaacccgggaggcggagcttgcagtgagccgagatggcgccactgcactccaacctgggagacacagcgagactccgtctcaaaaaaaaaaaaaaaaaaaaaaaaaaaatgatgtgaatagacttggatggtgaaggcatgggataggttagttatcatttaggttcagaggttggcaaagtacgtgaaggaatagggttaaggttgctgattagtttgaggagacatgatatagttcagagtggtttattagttttctgatagttggagaatatgagtgtgtgtgtgtacacgtatgtgttgtgtgtatatttagtgtatttatatctacacctccccccactttttttttttttttttttttttttacttatttttttgtagagacaggatctgactttgttgcccaggctggtcttaaattcctggcttcaagcggtcctcacaccatggcctcccaaagcgtttggattacaggtgtaagccactgtgcctgggccacattttgggtaggatgaccagaaaaattaagctgtaaaagatccaaaaaatgtaccttttaaattccatctgtctgatatgtctgaagtgagataactgtacctacttagtccagatatatggtatgaagaggttctgaataccttgcatattcctttttgctgtctgagaagaaaggggtttaaatgaaaggcatgtatatatttaggattccttttacatacgctagaccagagtggtttttgctctagagtgtacaaggtgccaccgttgttcttcagtgtgtctctagagcttgcaacaagctaaaacttatcttttggtgcttcaggtctaaactgtattactggccagactttaaggattgagttcaaagttccagtgttgatttgtatgtgaatagttttaggtctccatattattgtttggaaataatgagaatctctcccccagcctgtgtgccccctgtgtccccatttcctccttagactgtgattacttccaggaaacaatgacattgaaattttaagtactcatatatctgggtcaccttttctaagttttggtgtattgtaaatcaatgctttctctagatataattagaataggttttattactgattctagggtgctcgcaaaggtttttttgaatgttattttcaaatggaagcttgaatgactcatagtttcatatacttgagaacaaaagagtaataaatttaaattggtggtgttattggtttaagtacattgcttttccaatacctaaaatatactttgcttagtcttacctctgatacctagtattttatgtcaaataccccattatgtgctatgggttttgtcccactcgttctgttcattcttttttctcattaaagaagtttttcatttcttcccccttttgtgtactttgcccttctttttgcgtgttcttagaattcttagtcttagcctagggactataagtgcacatatatgtccccatatactgtatacacatatgtgcacctcatgagaagattgtaactcactagactgaagtaggatggaatcttcctgggagataatgtacatatagaggcatggaagataactaatagaactttaattttgacattggagcctaatgacaataaaatgaatgaaagtcagtattctttaaaggtgttatgtcaaatcccagtgaaccatgtaattactttgctgcattaaattgttgataaatgcttaattttaagtacaggaaataaaatcaccgtaacagaggtatacatattttgctattttgttcacaatatatttcatacaacattctagatagaaatcttaggtcttatttttatatgattttgagctttctctttctgtcctagcttaaaattgatacaaagaatagggaaatgttatacttttttatattgtggaaagtaaagtttatttctgaaagtctcacttccattttcctgttactttattaggctgcagaacatgtttagtttacagctaaaatgccatttggtatcccagtgtgggttgtcctcatccggagacatcaatgtctattaaagtgaagctaaaggtctcatctgtgatggctaactgggtcactttactcattaacagagaaggcaactatcgcatcattctacagtctgtcacttccggaacagcttcttggcaataatgcctcacaggggaagtcataagctttcctgctgatgggtgtgactttgaggacagctgaaatggtatcaactagagaaatacagtgacaaaaacctattggaatacgtttaggccaaccgcatggtccttgcttcagataccagcctcaagtttgggggtccctagggcctcctttacttcagacttgctggctttagatactgaggtccccactgactccctcagatttgataattcactggtatgacccacaaaactcagagcactaagaattatagttttattataatgaaaggatacatactaaaaccagccaaaggagagacacgtgggcagaatctgggaggggctcaaaagcaaagcttctggttgtgctttcctggtggagtcatggatgctgttacctcttcctggctatgatgtatgacagtccagggaagttaatgcaagcttttggtgtccacagtttatactggattttgttcacatactgtccctgtgtctgacctttagtctttatctcctcccaaaagttcaggctaatacatttagtttctagtttctttggagatcagagctgacagggtattccaggaagctcccatcatgagtcacattgttagactctccagtgactccaggtactcttatcaaggaggatatcccctgggcctagagatcgtttcccagtagctgagggcaaaggccaggccctctctttggtaaagtgaattcctcaacacacctatttaaacagagggtatatttttgcaatttctcatattactctttatttgaaaatcttaaattttattttacaaataaatgattttcccttaatgttcaaattagaactatttagccttttccttttttttaaatctctctactttttctccctcatgacatccagactagtcatttatgcagtttagttgtatttttactgcattatgtatttatggccaaatatccattgtattcgtatattcatttcaaaagtacttactattcttctaaactgataggtcatgcttttctatccacaaaacaaatactcacttatatttcttgtcagctgcaatctggatacagagtatagcatgaacaaaggtttaatgatatcaaagtatataaatattttagaaaaggtgagcatttcattgtgatttgattatagacatattcaggagagttttcccaggaaaaaaagggctttaaaarctatactaaggcaacttggactatagacagtgaagggcattcaaatatttttagatatgaccatgacacacaacaaattgtttgttttagaaagtcagtgagtagcatagtgagtagaaatagtttgaagaaaggaaattcacctagaagcaactctatatgcccagttaggacgttattactgttgtcttcactggagatatatataggtaataaaggatgatttattaggaagttattaacttatgagagatgactttagcttttttttaaaatcttacccctttcataatacgtacacaagtctaatcaacttttaaacttctctaacagttttttatgttttcattttataaaacctcttgtgaatacagcctatgtatttttctacctaacctataacctatggttataacctagccttaccagcttatttttatagattcttgcactgtgttattcattttatatttatttaacacacatttgttaagtgagagcttactgtgcaccagattattgtaatagatgttgaaaatacaatgaatgtaagatgtgattcctgacctcaaaaagcatacatatcaatttagtagtcagacagatgggaaaagcttgtgatggagggaagcataggatactttgatagtttattgaaggagcatataacctagactagagtagagattaggagaagtttttgggactctgacactctagtttagaatagcagctaacaatatggactctggagccagaatgcatttggattctcagtttcttgctgtgtaaccttaggcaagttcttaacttcacctttaaaatgggaatcacaataatccctactgtatatggtaattatgaggctaaaaatgttaccgagcaaaagggcttgctgcctgatgtgctagaagccaatactatgacacttgagtttttgggaaaataaaagctttttattgcaagtcgactaacaagaggaaaggagtccagctcaaatctgtctctctgtgctgactttaaggcagtaatttcattagaaaaggtttagggagtgtgttcagggattggtaggttattggtggaaggagaggagaggtctggaaagtcctcaggcatgcacagctatttattcatactacctcatggatctcatgtgcaagtttcagggggagttagtatgcagcctgtggtggaaatttgatctgtgacaccggcaagttcgttctgtgcaaacgccagtaggccatatcggttccagttgatttcagccaggttttaaatctcataagtggagggagtttcagcgtttcagcaatttgtttctttttttaatttgccaccctgcaggctcaataatttctgccagtcactggtttctttaactctttagggcatagtttaaaaataagttaaaatatgtaaagtgttggaacagtacctggcatatattagtagttttgtatgtattacctccttctcttgctcttctcatcattttctaaaaatgaatatgtaattagtactcagtaaatatttgaataaatccttaaatgatagatgaaaatataattgctgttttgtttccttagaagtctttaagcatctctattgaaagcatttaaggtaaaaaaactattttatgtgtatttaggtccatattaactcataaattcatgagcttcataaagtgtaatctcatatgatatgtaaacaatgttgaatttgactgcttgtagatgaggatgtcttctccagttggtctcacgcgtccgtcttactgtataccctgtccagttcaggttatggcctggcacgtatagacatttgagtttggggtctccccactagaccctgccacctgctcttccaagatagacatggagtaaactcttttacatctcaaacacttaacacagtggttgtcacttattggtactaagtgaatgtttgttgaatgagtgaatgatgcctaaattatgaaataaaaaagaataattagaaatctgatgaaaagaacttttattgttccatgaggatgtggttgactacttctttgtggatctatgaagggattttggtaaaaataagactaacggcaaccaaaattaagagggtatattttctagagaaattttgtttgagattttctaacttgtcaaataggattcaccagaattattatgcctctttttaattgcaataatattggttaatgaaagagccaacaatagtattgcaaaagcgatttatattttgattagctaacttgaatgacatagttgtttaggcactattggtaaatagtgrcaatcaagtcattcttttttaaaagaagataatgatgttggctttgtgatgagcaagaaggatgacttgtaggattattatttactgattagaaggacattcagagtacagaagcattgaataatcctaacctgaactagaagttagaatttgggattgaaaaccaataaagattagtatccaggggagtgcaaatttccatttttgggggggttttaaaactaaaccttggatttgtggggagttatgaaagcacataaaagagtcaagagatagaagttactatattgagtattctcaggcaatgagttgaggctttgtgggaatatctgctcagaagatgtctgagtagaatagaccagaactgaaaggtggaggtagtttattcttttttaagtattccattggtatattttccatactataatgaattgatattgccaattcgtatttctaataacattggagattgagtttcttcttcactgtagtcttaagctgtcattttgcttattatttttaaaaggctcctttctatgctttgtaactttgcagtttctattttatttctcatgtttctaatgtcaagccttttgcattatgtttctctgcttatgcatttataacaacttggttttcggttacatcatgattcatagacataaaacatcaactcagagtcaatcatatggtaacctttgtcarttcctccaatctttggtccatgctacatgccctctgtaggatatttcagatggtattcaaagataagattatgttcataagtaagcaaatttaagttttataggaaaaaccttatgaaaagtatcatgctttattaaaaattgatatataatgtctactgttttacttttcatccaattatcttcgaattttgtctggagggaaaattatcaagaaaattgtaattctgaaaaggattgtatcctagtttagggtgattgaccagatattccactttaaatttctccaagatttttcaattaaccatttctaaattaagattcttttatttgttagaagtgttttaaaaacatctagggtaatttaagtagaaccacgtttctgaagaaagattgacaaggagaaattgtaattatgtcatcacatttaaatgtttttactgtcaaattgaaattaaggtattatttaggcacattggccaaggcttatgttgttattgggtcctcatatcccattagcatgtcctaatgctggcttggtttctagcattggaaggcagtcaggaaatatctatctcatgaacactgcatgcaattgtatttttattgggatgttaatcaaccagtgaattatctatgaaaaacttagcttagtacttcttacattaggataccagtgcaactcatgaataagttttactttatatatagaaaaggagaaaaagaaacagtaggttattttttgaatgtaatatcagacacaaaagaatatcaaagtgagtttaaaattatatctgttatttaaattattaaataaaacctgacttttcaagtcgtgctattttaagcacattgagactctctttttgactttttgctaactcctttttttcatggagactgtgcctgacagactcttctctcaaaggctgcccatcatcgttgctgaatacacttcccaatgtttggtttgacttacaaccttggcctctcaatttctttgaaattttcatctcagcgacttaattttgaaatttggaaattcattcctacctattactcagtatgctaaatttggacatactgctttgatacaacttccatctttaaaggcagctgggacatttcatcagcttcaccatccagtgagctatggctgttccgtcttcagtgaagtccggtcttagccttaggaggggagaagttgtttttattgtgtacactatctcagcccaactggctattttttatatctgagattatgaaattctttacagttctccttactttcttaaagtggaagttgaggtcgttgatttgtaacctttttcttaattttttttattataaaaatgggtaaaaaawttttttttgcttttgttaggcgatatctaattctgttgcccaggttggagtgcagtggtgcaatcaggactcattgcagctgcaacctctggggctcaaatgatccttctgcctcagcctcctgagtagctgcgacttaggtgcatgccaccatgcctggctactttttaaattttttgtagagacagggtctcactatgttgcccaggctggtctcaatctcttggccttaagtgatcctcccacctcagcctcccaaagtgctgggattacaggtatgagccattgtgcctggtcattgatcttctttttaattaggtatttcatgcagcaaaattttctgtaaatatgctttagctgcatctctcaaacattaatctactctgtttttgttttcattctgtttaaaatactttaaaatttcccttttaatttcttcttttattcttgggttatttagaagtgtgttatttaattttcaaatattggatgactttccaaatattgacatctaatttaattcattatgatcagagaatatactttgaaatgtgttgtacgcatttaggaaaaaaaagcattttttcctggtttgggtrgagtatttttataaatgtcaattaagtcaggttgttttatagtgatctacgcttccatatcctcactggctttctgtctgcttgtgttctgtaagtcttttcaagatgtctttactactagtgatttttttttctatttgtccagtcgtttgctcagagaagagtgttaaattctctatgtataattgaggatttccccactatttttcttatctattttgtcagttttattttgaagctttttttaaggtgtgtatacatttaagattgttacagactcctgatgaattgaccccctttgtcagtatgtattgttttcatctctagtaatttcttgttcagaagttctcattgtcttatattaatatagcctagatgcttcagcttttttccattagccctgaatttgacatctttttccatctctgtactttatacctaacggactctttatgtacaaagtgggctgttgtagacactattatatagttggttccttttttttttttaagagggatctcactctgtcactcaggctggaattcagtggcatgatcttggctcactgcaacctccgcttcccaggctcaagttatcctcccacagcagcttcccaagtagctgggactataggtgcatgccgccatggcctggctttgactatggttttgactttggttttgactatgataaacctacattttttaaaatattttttgtagagatggggttttgccatgttgcccaggctggtcttgaactcctgggctcaagctatctgcctgcttctgcccctcaaagtgctggcattacagacatacatccagctggttcttgatttcttaaaaaaatttattaataatgacaatctctgcttgttgattttgtaatgttgtggtttttagaagaaatatcattagaatgaaaacaatctggtttaaatctactatcatactacttgatttactacatggcttgccccatgttttctcatttacttttttccttttgtcttgccatcatttagattacttgagaatgttcttattccattatatctccactttttgggcctattagatatatatctttgtgtatattttagcagttgttctaaggtttatagtgtctgttttcacaatttacttttaaataatagtatgccacttcctagttggggttcttacctcatttccttttatacaatttgtttttacatatgttataaatcctacaatacattgktaatatttttactttaattagtcaattatattgtaagaaaagaaagaggaacacagatttcttatatttattctagtttttaaccattccaatgcccttcattatttcagtttagatacagattttattcttgtatcatattccttctacctgaaaattttcttttaaaatttcttatattctagcttggtggaaatatgttttatcagctattgtctgtctgaaaaagaactctactgtgcctttattattgaaagatattttcatttgctaaagatttttggattgacattgtttctattaatattagtatgttaaaggtgaggtttcattgtctcatggctggcgtaatttcagataaggagtctgctgtcaatcttatttttgttcctctgcctgtaatcttttcccccttcttgctgggttttgactatgataaacctacatttttttttttgtttttcttaaatctttcttcctgtcctcttggagtccattggggtgtgtgtttgtgtttatgtgtttaattaattttgtagcaattggaggcattatttctctcagttggtttctttgcttccttgtatctttctttttgttttcgcattccagctgtacaaatgttctgtctttggctgtagtctcccagctctttgattctcagcactgtttcttttttccctctttttttctttttgtatttcagttggaaaaagtgccacrtacgtttcttctttaagtttagtgacttttctcttctgtgtccagtctgtggataatctcattgattatcattcccactgattaacattctttttctctgatgttgtgtgtttttatttctgcattttcaattgtttcatttttattgtttccatctctgctgaaactccatatccgtttatgcatgttttccacttttttgtctagatcatttacaatgttatttttatttatttatttgttttatcaacttttaagttcagggtacatgtgcaggatgtgcaggtttgttacataagtaaacacatgctatggtggtttcctgcacagatcatgccgtcacccaggtattaattcagcatccattagctattcttcctaatgctctccctctccccatgccccccacaggtgcctggtgtgtgttgttcacccccatgtgtccatgtgttctcatcaatgaactcccacttataagtgaggacattcagtgttttgttttttcgttcctacgttagtttgccgaggataatggcttccagctccatccatgtccctgaaggatacgatcttgttcctttttgtggctgcatagtattccattgtgtatatgtatcatattttctttattcagtctatcattgatgggcatttaggttgattccattactttgctgttataaatagtgctgcaatgaatttacacatgcatatatctttataatagaatgatttatattccttgggtatatacccagtaatgggattgctgggtcaaatgatacttctgcctttaggtctctgaggaatcaccacactgtcttccacaatggttgaactaatttacactcccactcacagtgtaacagtgttcctttttcaggccgggtgcggtggcccacacctgtaatcccagcactttaggaggccgaggcaggcagatcacgaggtcaggagattgagaccatcctggctaacatggtgaaaccccctctctactaaaaagacaaaaattagccaggtgtggtggtgcgcgcctgtaatctagctacttaggaggccgaggcaggagaatctcttgaacccgggaagcagaggttgcagtgagccgagactgtgccactgcactccagcctgggcgacagagtgagactccatctcaaaaaaaaaaaaaaaaagcgtgttcctttttctcgacaacgttgccagcatctgttgttttttgtaaatgttatttttaaagtctttgataattccaaaatatagaccctctctttgtctgcttctgttgactgccttatctttgaatataggccatttatttttcctttgtgtatgtgtgtgtgtgagacagaatttttaaattagacgtctttcgtggatttttctttcctatatgaacaaaagagactgaggtaagtatctttatgcttggtaacaggcatacttcttttagtttgttaataggcttcatttgtgggtggggaggggtagtggttgaatcagcctgttctatgtgttgctatataattacatcttcagtgctccaaagaatttatattttctcagcagttggctgctgttacttgtatttattgtaatgcctagagtataaaagggttttctcctggtgtttctgtttcacgtttagctttcagtaggctctgctccyctgtaccacagagtgttctattttcatacttctagtacttttccccatatgtaaacaactgtttcttgccgctcagtgccagacttgtgaagactgtggagttttcttagtttttcttctccagccttagtattaagcagaacctgagcacctgaatcgcaggcatggggttttcctcagtgggtcttccctctccctcttgccagtgaagttttgccttgcatagggatattttgtcaggaccaagtctttctgctttttatcaatataatatcattggtccaagtctgtctccagcttcttgtatagctgcatatgratttattcccaggtaacttttgcatcatatcaagaagggtttggaaagcaggagggttttaacgtctgtgcccaaccaaggtgggggcattctcatgtttcctgccctgcctgtggtctttcttgtgaagcctgatagaagcctgagaaaaagtttgtatctcttgtgttttgggcttccagggattctaaactgttccactcgcccagacttagtttttaagaattggtcagttgttgttttctttgtactcacttatggctgccacttcctcttccttttctctaccaaagaagacatgagttcatatacttcaccctcctttggaggggctgggattcagtttatttggttgcctgcagatgtcagctttctgatggccataacaaaagttattatttgatagattatctgcttttttattatcatcagtgtagaagcagcattctcttactatttttcacatcgtaaatgaatgaggaactttttcttaaaccaaccttttaaagrtatcttcaaagagcaaagcacttctaagattatgaacatagatctatggaatgaatgaggggaaaaagcattttcttaacattagtcaaccagtacttgtagcttgggataacatctgcagttataatctcatgtatgatttgaagaatgctgtaaatcagagacagcagcaggaaaaataatgkaaactggctaaatgacttaaaagttggctctaatgatgaagatactgatatatggaagatggccgtaacaagtttggatactttttttttttaagaattgtaaataaacaaaagctaatatttctaatttaataaacacattacatatatgatctcatatgaatatataaatcagttaatataaagtatacaatattaataacatttttagattacatctctattcttagaaaaccttttttccttcaagaattttatctcccttcatattcactttattcatatagtatattctataatgcatttaaagtctataaaatttttgttaaatatacaaatggggtcttgctgtgttggccaggttggtcttgaactcctggcctcaggcagtcccctgcctcagcctcccaaagtgccagaattacaggtgtgagccactgtgtctggccaagtctataaaatttaagtggctattggaggacctatatatttaggaacttgcagaaatctttggggcatttgtttcagagagtcataagactttatttagttatctctttatttttagttaaagtctgatgtaatctgttctgagtgattttactttactctctgaattaaagctagttgcttatgtctgatgacctcagtttccttttctggcaaattgagtaataattcaaaacttgagaatacacatctcatgaggagttatgtattttgaatgatatgttaagtaccaagcacaacactccattgtaggtctttgatacatgataggtgatatcataaatattatgtgtcaagtaaagaaaaaaatattgtctagagtaatgcagaggaactcttattttgacccatgaattttcagtcctttaaatactctgatttataaaaagagtagaataaaaaatgaaattactttcatttctgcagcaggtagaatcatgttatgtagagtcttgctaactggctattttttattgttactttacatacaggcatggtccattacatgaatttgagaagtttggttgaagaatggaaactaccatgttaacttgccataaatgatgtacctacaatacaagtagagcaaatgaaagattaaaggttacatttttttaaccttttttttttttttgaaaaaagagattattgtggtatttggtttttattgcatcattgctcagcagaaatgctatgaatttagttttttttttttttttttgagatggagtctcactctgttgcccaggctggagtgcagtggcacaatcttggctcactgcaacctccacctcctgggttcaggtgattctcctgcctcggccttgtgagtagtagctgggactacaggcgcgcgccaccacaccggttaatttttgtattttttagtagagatggtgtttcaccatattggacaggctggtcttgaactcctgacctcatgatctgcccgcctcagcctcccaaattgctgggattacaggtgtgagccaccatgcccagccaactttttcatctttcaaaactgaaactcattaaagactaccccccaagcctctggcaattactgatctaatttctrtctcagtgtcagaaaggaacattaaaattttaaggaaatatagatttttaaactcaaatttgaactgccctcagtttagagaaattatagattttgaaggatgaaatggcagagaagatgaagtcacagtttgggaagagaatcacagatttttgttgcaagtgaaatacgtacttgaagttttggttgttgcttttggaaagcaaatcttgtaaactctttaagcatagtgctttcaagagtgtgtgattgtgataaaagggatgtataacacacagcatatccaaaaatttagaagacatatttgaatcctagaactatcctgaattttctgttaattggccagagtctagataacctggtgttgtgggagggacctggtgggaagtaattgattcgtgggggctatttccccccatgctgttctcatgatagtgagttcttatgtgatctgatgcttttataaggggcttccccctttgcttgacactcattctcttgcctgctgccatgtaagaccatgcctttgctcctccttcaccttctgccatgactgtgaggccaccccagccatgtggaacagcaagtccattaaactgctttttctttataaattacccagtctcgggtatgtctttattagcaagtgtgaaaatgaactaatgcacctagctctgtgaaagtatgttttgttctcttccccaaaatgcagaaattcatgtttcagrcctccatcagtgatatacatgttgagttcttcaaaataataaaaatctgtgaaagagatacattaaaactacgtaatcagtcagaattaattagagggtatrgggtctataactctgttgatatggcattgaaaaaactgttagttgtatttttcacggtgtattctttgcaatgaaattctctgcttggaaaaatataaaaaagacacaaaaaaaccccaaagtaagattaaaaacattctctaagggttcttggaaaacacartgtatttatggattataatctccatgtttgagctggtttgtggttacaaattcttgcccccaagcaagtttgtttgtagctttggactataatcttcatgtttgagctagtttgtagttacaaattcttgtccccaagtatttctttgcttctcctgtttttgtgtgtgtttattttttattccttttatctattactttccagagtttctactttcactttgtttttgcttctatgtctttcttccttttgtgctggcttaggaatacatttaaaaatatgttttcagtgctttattcattattttggttgttrtagttaggactattgtttagaatatctagcctgccaaggaatggaaatttgtgtgtgtgtgtgtgtgtgtgtgtgtgtgtgtgtgtctgtgtgtgtgtattcaaatcttacgatgtattaacttagattcctttagacctatccctttctcttattttgtatttcagttcttataacttatatattaagaagtttttataaagcttagcaagaagtttaaatacttttaaagtgattattatatttttaaagaatacatgtgtatttattttatagctacttgaaggaaattttgccaaagaagtgagccatgaaatggatggacttatttttcagcctactggagtaagttcatttgtctgtgtgtgtgtgttcgtttgtgtgtttgtgtgtgtgtgtacacagatatacatatacatacacatacacatgtatgcctcaaacttatttacttgggattgattactgctgtgattgccacttttccttaaaacaaattgctcattatgaaagattttatttatatctaaatacatgtaatactaaaatgagcaccyatctgtttttcactcagcttaagaaataagcatttttggtcgttacatttcaaagaaaccagtcttttaatataattagttattaaaaaataattttctaccaatagcattacataaatgtttatttccttttgtaacttggtatacttttatgtattaatctctctaaaacttcattttgctgtagtttactgtagagtaaaattcatactttgtcactacttgagaaagaataaaacttttgaatattttttccatgttaaatttttgaaatgcactgaagaacttttaccaacttaatggtcgaatcatatatttgaagtaagttgtattttactctatagcaggttttctcattctcaaccactgatgtgttgggccagataattctttgctgtgggagctgtcttgtgcatggtaggatgtttagcagcatctgtggtctctactcactagatgccaggagtatagatgccaggagcatgctccctattcccatttgtgacaaccaaaaatatagtctgacattgcccagtttcctcagagaacataattggccctacttgataacccatgttctgtaggacggtgtttttcaaaatgtggcctgtagaggaggattagcaccacccaggaagtttcacagatgcagctcagccccacacctattgagtagaaactctggggatggagtttagcrgtttgtgttwtgacaagttctccaagtgattctaatgcatgttcaagtatgagagctacttactctataggaaagagtttatttcatgtgcaaccacctcatcatatgctgctttttttcttcaccaactcttcttttagtaattagagtataagctagttgakaatttatatatggagacatcagactgggtgcctggggtcaaagaaagggaactaataatttgaacacagtgtattaaatactgtacaggttgagtatctctaattcaaagactgatatgctataaaatttataatgttttgagcaccagcatgatgctcaaaggaaatgctcgttggagcattttggatttttgtattagggatgctcaactgttaagtatatataatgcagatattccccaatctgaaaaaaatcagaatccaaaccacttctggtcctaagcatttcagagaaggcatattcaacctatgcatgtaaagcattatatctttacgtgtgtaataaatctctgctaaaatgcaaatttagagacaatgtgatatgtgattggcatctgtctgtcttctagccccccttgccaaacaaagaacagaaatatcttctgtggttaagggaggaggagagggaggaggasatggaggagcactagaggttagggacggaaatggaagaaaatactattttaggaaaattaaagttgaatcttttagttctaatatattccagtctccctagactgaaagaagcaaagtctaaatataacaataaattcagaaaatttcagtgtgtgaaactcatggttcagatctgtacatatatggcatatgtaggaaaaatggcctgacaaataagtgagtctctttcttggatgtctagtataggcagttgatttgtcattccgttccctttctagtaaccatactttttttttttttttttttttttgagatggagttttgctcttgttgcccaagctgaagtgcaatggcgcaatgttggctcactgcaacctctgccttctgggctcaagggattctcctgcctcagcctcctgagtagctgggattgcaggtgcgcaccaccatgcccggctaattttttgtatttttagtagaaacggagtttcaccatgttagccaggctggtattgaactcctgatctcaggtgatccgcctaccttggcctcccaaagtgctgggattacaggtgtgagccaccgcgccgggccgtaaccacactttttattacaatgactttgtaattgatatctggtattaagtcaagtctccctgttcgccagcattaccttaaatatttgttgacaattggtttaacgtgaaagtttcagaatcaatttgtcatgctacccagaaatttttgttaggagtttaattggaacatctttgaatttagattaacgtggagaaaattgatgtgtttgcaatgttaaatcactttctcaatgaatgctatggcttttttttttcaggtctttttctgttctgtaactgagtttaagttttttattattgttatggtaacttctaaatatttgtcattttctgcttttgtggtaaattgtgtctttttttattgctacttctagtacactgccacattattgatttattttattgattcaacaatcctgttgaattctgttagttctcatcattgtctaattttacacattgaccaggacctctagtattgaattaagtattagttctagttagataagggagaagacatttataccttcttctcaacctcaaagggaatgtaactaaattttctccattaagtatgtttgtggtagatttctgttagatatcctttattgtgttaagaaatttctgattctgttcttccaataattctttttaaaatcataaacaggttttgggctttaacaccttttaaagcattaattttaaggcagtaatgcctcttcggtatctactaaggttatcatgtcattttcatttttacaccatttatgtagtaaattacactgatttttctcatgttgacccatccttgcattcctgggataaatgctacttgatcatgatatatataattttttaagcatacttttggatctaggtataattgcttcttgaggatttctgccaccttatttcttacagttcatttttctctctttttttttttttgagacagggtctcactttgttgcccaggctggtgtgcagtggcacaaacatggcttactgcagcctcgacctcctgggttcaagcaatcctcgcacttcaggtccccaagtagctgggactataggcgcgcaccaccacgccttgctaatttttgtatttttcgtagatacggggttttgccttgttgccgaggctggtctaaagctcctgagctcaagcaatccgcctgcctcagcctcgcaaagtgctgggattacaggtatgagccactgtacccrgccaatttttctcattttttatattcagaataatgaaggtaatattttttattgttgaaaaaattatgtaagttgcacataatccatggtaatgcctatccatgatttaaaaaaaccaattaaatgagtgatttgtgctgaaaaatagaacagtctcttaccaaacagtctcttacctttttctgcactctgagtactactcctaggaggcaattattttcctcttttttttttttttttttttggcttttgcttctacagttctacacagtctatgctgttcttttttggttttgtattttatacataatctgcttactttgtactgtggaagaataggattgagccctctaattccactaaccccctccacacccctttctccttctgtcatyctattgtaattacatcacatatttggtcaaattaatattcaatttttatatttttatggtgacataaatattgttcctatctgggtcaaatagtatacaattgtattttctttttttagaaaagtcttgtcatctagcattaggaatatttttggttattataattattaatatttctttctttaaactctccaaaagaactgtttactttttatcaatgcagtcaaatatataaggtycatttttcatttgaaggcattctttctgaagccttccattctttagtcctgctgcatagccttttcttcttagagtttcttttcactatttcatccaggaaatcccttttacctttcttctctgatagatttccctacttttttgactttatcttttctgcttttttgatttgagtgatcttgaaaacctaatgctgtacaaactggtccttrtacttatggagcttttgtttcagctgtaaactgaacatgttattttcagtggtctctaatctgttctacaattttatggctctgacttagccccaaattttttattgtgtttgtgtagttctgtgcaacttggtataatcttgattatctcgtaataaatcaagcctccctgtttgccaggacgttcttaaatatttgcagacattttgtttaacacgtaagtttcagaatctgtatgtcatgttacccagcaatttttattaggagtttaattggagtgcctttgaatttagattaatttggagaaaattaatgtgtttgcaatattaaatcatcttcttatatatactagagaattagggaaaaggtgcaataaaccgtagctcaggactacctgtctaaatgtcagaaatttccagaagttttagatctactcttagtttacatattcaattttgtatttttaaaaactttatctcgtaagttataactgatagcaatattagacaatagaactaaaaaggagagagtagttgtactcaaattctgtatttgtaataagcttcctaagacactggctttctcagcctcttccaccttttggatggctgtctttatacttgtcttctaaggtagttctatccccctttccttctcttcatagagaaaagtgtattttttatggctatagctgttttggttaaatcaacctttaacccatgccttttgttttgcttctagtactctatttcttcgttcatattatacatttctactagggacaaccaatcttcaaacaatcagtgaagtctgttaagtggctcatcactttgtctttttgggttgtccttgctatttattccttatttaaaaaagaccatgtcagatttggctcaaattgttttatactcagcctatttcagtagcttcttaactgctctttgtatctgtattatctttccagtctacccctgttttttgacctagtaaaattatactatggaagaaacccttatatgggggagaccagtactgactgatagaaatataacatgtaacacaaatatgatccacatatatactttaaatgtttctagttgccacattaagaaaaaaagtggtaaaattaattttaataatatattttacttaaacgactatatcaaaagtattatcatttcaacatttactcaatataaaaacaattattatttttgtactgagtatttgaaatccagtgggaattttacacttacagcatgtcttggacttgccactgttcaagtgctcagtggccatgtgtgtaagtagatagtgcaggtatagatatattgatttattgtttcccatttcttgtatgtgctcatggcatttgtacatgattcatttgtgatcttcagttgaattgtaattctctgtgtaatgatagatttttcttctccagcttgcagaacaaaataagattacatttctttattcaaatgcaataggcaggctcctacactccttccccttccaaatcatagtgcatkgcagtattgcgagggtccctttttttatttttatgttcttcccttttaaaattgtgctttgagttgtttatttcttgttttttgtttgtttgtttgctttttttggtggtggtttttaaaaaattatacttttaagttctgggattcatgtgcggaacatgcaggtttgttacataggtatacacgtgccatggtggtttcctgcactcatcaacccgtcatctacattcagtatttctcctaatgctatcccttccctagcccccaaccccccacaacatgccccagtgtgtgatgttccctccctgtgtccatattctcattgttcagctcccacttataagtgagaacatgtggtgtttggttttctgttcctgtgttatgtgcttcgagttattaaacgtgttctattcaaggggtcttgattccggacttcagtttctgtaacggtgaaatgctactgagtttgtagatggaaaccattttttgtgcatttactgccttcagccctctatgttgatagtgttgaagagaggtgtttttaagctacacctgttagtctgatggtagtattttagggtataaagagttgaaaagatagttgctaggtttctttcgtatcaccttagtcatgaatatttaatcttaaacctctttaaacaaaattgacacatacatatttgcattaaataactattcctctatcatcacttttatagcagcttggtcagaagtgatacacctttgtctagaattagatctttccttccatgacagcctaggtcctgatcatcaacctgtaccttctacttctctgatatggagatttttcagttctctggtagcagctghtctcattctgaggccaccagtctaagagagatgagatcttagattcctgtgcacactctgtgtcttcattgctctccattccataggatttgtgggagattgatttgctttcatgaagctgaaagcaatatctttttctatcttttctcttgaaaaattgttactaattgccaaattgcttcagaactaaaactgattgcttaaatgattattctcaaagcaaaaatggttctctttaaagatgcctttctgtttctagctacccctcacaagctctcttttggttatatttttgcctcacaaaatctatgggctgtggttatatttttgcctcacaaaaatctatgggctgtggttatatttttgccttgcaaaataatctgaggttattagtcctttccttccttatttctttttaaacctccattgtctaggatagcgtttagcccagtatgtcttagaaactgtttgttaaaggaatgaaaatgcatctttgtgttttccccagtctttcagatttgactagttttttatgttatcaatgtaggtaaataccttttaaatttataggtattttattttccttgctgcataggaatatgtgtaatctaatttatgctgttatcttttttcctttcaaaaaacttatcagtggctttctttaaattctcacttttctttgccaagtccagaatccaaacaccattcttccctaaaacaataacatgagttttgtcctctgcatattctcttcagaaacttcccagtgggttaggagtggtctctggttaaacaaacaaacaaacagacaccactgaatatctttttgattctccagtttttcatctgtaaaatgtagaggctgtaagagcttagctttgaaattctcttatggtcatatgatgatcagtgcaaatgatataaatcagtacttgaaaattctttctgccaataacctggtgaaaatttactaagtaatgaatttttaataaaagaagaaactcttttattttagtttcctaaaaataatttatgytttaaatggcaagttagacaattaaaataaactagacttcttatgaagtttgatagtatgactattacatgactgtattctattgatttttttctcctgccatgatttctttttttggtgggggagacagagtctttctctgtcgcccaggctggaatgcagtggcgcagacttggctcactgcaacccatggttcccaggttcaagtgattctttagtagaaatggcattttaccttgttggccaggctagtcttgaactcctggcctcaagtgatttgcccacctcggcctcccaaagtgctgggattataggcatgagccaccacacctggccatcctaccatcatttcaatagacttttcacttttatatcttttatctcctaagttgttaagattataaaatatatggaatgtctctgaaagggtcacattttgttcatcagtggacatggtcagcttcttccaaaagtattaatttatttttattagaacagatttattttatttataacagattctagattagtttacatttataacttatttcagaaaacatgttttacaactacctattttggtaacagtttaattgatggcatagcactgtactatactagttataagtatctagttcatcattttcattttctatgaaattttaatgatttcagtctttgtttcttaatgttttatttctgattgtaatttctcatgatcgttttctgtctagttttttatttcttaaaagcacatgttaccaactttaattctcttagtttttatcactaatatgtacctttcatcatatttttgatgtgctctttaattggatggttaatttctaaaacagcatctggctgtaagaaggatgtggtacataatcacatgtctacccatcctagttaattcagtggttattttacattcctactattttttttggtaaatattctaaagggtattctaagtataaatatatattaacggtgccatccagaataggctccagttttgcataaatccattygggtagcaggaggcaattttctctctcaaatgcaaaatttcattatattgaattgtgtagcctttgttattttttccttattttggttttgcaatttcaacctccgattctcctgcaaaggctgattttttcctatttttagtttatcctcagtttaggccaccatcaccagagtggtcttrtgtattccactttcagacttttgatttgccaaagccccagattaaacctgtacttagctcttatgcagagatttatgacttttctacctctttaaaaaaatggaaatatgtttctattaaaataaagttgaatgacattatcagacactatatgatattctgctaaagaaagcagagtttaagacacatttttctaataattcttactcataaattctctttatgactttaaaagaaagaatacttaagatttttctcacttcttttgtgcttatacattgtcatcaatttcctttttaccagttsaaatagcctttttctgattgctgtttgtatattcaaaggaaccaccttaattttccttttcacctgcactaggtcttatttgtaaggaggaagtaagaagagagttgattatagacagatgtggcttccagtggtgagaggagacatgattttaggtggtccagggacagggcatcagatgacactgcatcatacaatgagaaatgtagtcccattcttgtttttattcagtctttcagattataaggagaaagtctatttctagtttttaatatctaaaacttgctgatcttttcaacaagtgtgtgggcccacttttagactattcaataggcaacatatctactagaatttagtatcattgattaatttctgtcttttctaattttaggactactggttatttaaggtaagcaataccgttttctcgaatagtatcaatggtgtaccatttgttataaagtttccatttaaaatatatattttttagatttttagagtgaactattttaaagaaaaatataataatagttatggtattttgatgtgacagaaatcctgggccgagcatggtggctcccgcctgtaatcgcagcactttgggaggccaaggcgggcggatcacgaggtcaggagatcgagaccatcctggctaacgtggtgaaaccctgtctctactaaaaatacaaaaaattagccgggtgtggtggtgggcgcctgtggtcccagctactcaggaggctgaggcaggagaatggcgttaacccaggaggcggagcttgcagtgagccgagattgtgccactgcactccagcctgggcgtcagagccagactctgtctcaaaaaaaaataaataaataaaataaaatttagaaaacgtgatggtactagctagttactgtattagtttcctatggctactttaacacattaccacacacttgatggcttaaaacaacatacatttattcccttacagatctggaggtcccagcaatttgggaggccgaggtgggcggatcacttgagcccaggagtctgagataagcctgggcagcacagtgagaccccatctctataaagaatgaaaaaaattagccaggcatggtggcacacacctgtagtacttgggaggctgaggtaggaggattgcttgagcctgggaggtcaaggctgtaatgaactgtgatcgtggcactgcactcaggccttggtgacaattgttttttaaaaaaaattgaaaaaaaaaaaaaaaaaggtacttgtgattgcatttagggttcatctgggtaattcagaataatctcccctgcccttgaatggccttaatttaatcataccaccaaagtctcttttgccatataatgtaacgcattcctgatatctctaggtcgccatttttcagcccaccaaagttatagcttaataagacgtttccgatggatagctgtagaccttaatacccagtgtaatttctgattctgtctttgtaaaatttgtaaattacctttctttcttagacttcctattaagagcaagttctaaatgagaagtttaggacccttaatcaggccaagaactttttaagtaaaatttgccaacatttcaaaatttttcttctggggaagtctaaaactttctgatgaactcagctttaataattaagtgcagggcaagtaatacattgttatgagaaaagtaatatagtatattagaggtaatctgcattttaaaaataatgtcaaaatgtgtataaatttttcttttatttttaaattggaggatatacaaattttataacgtgtagttattttccctgaaaatcttttaacctgtctggaggtcaatccttcagtcttttgcctgctcttactattcttggagtagagaaggtaaaggagctagggtccactcttgggtaaactttcacttaaccttgcagtttcagtttttctcttctgttttgaatcttctccaccatagctctgccttcagctttttcacagaataaacatatctcctgccttttgcccgcagtggaggagagaagctagaggtttagtggtccttctatagactttccctggtctccttgttttatgtcctatgccttacctttatcccctggcagccttctaggttacctgttatttatatgactcaatcctttctggggcactgcaccaggaatgacttgcattggcgtccttctttgcatgtacttagtatttggttttctttgctgtatgctgtgttaacttctgtactttctatcttttaaaattacattgctatgggtttttttctgctattgtcagtctcctatttttgttttccctttctgttgatacctcttgttttctgtaactctcacctttagtgaggttttatatcaaagcgggcataaatacatgtttagtctaccatttatcctaaaatctttgaaactttttatagtgtggtgttgcatctattggttcctattagccaacaattcaagtaaatcaagaaagggatagttgagtgaaagggtgagtgtatataaagtggagaacaagtcctgatgaagcacaggcaaagcctgttatccatcctctggtaccacagaaatattccaaaggcaaatgaatggcaaaagatgatgaggattactagtggatctacttgtgaaaaaactccttggcccaactgtgtttggtgctagttacttaaaacttagcaagaagtttattctgctgtgttacattaattataatgagtgaattgaggttgaataaagggtagaagatgttagtactgttgaaaaaagaagatatatctatagatatctacatatttgagacagagtcttgctttgtcgcccaggctgtagtgcagtggtgcaatctcggctcactgcaacctccgcctcccgggttcaaatgattctcctgcctcagcctcctgagtagctgggactacaggcacaccccaccatgcccagctaatttttgtagttttagtagatacggggtttcaccatgttggccaggatagtctccatctcctgacctcgttatccactggccttggcctcccaaaatgctgagattacaggcgtgagtgtaattaacacacccggcctaattttttgtatttttagtagcgatggggtttccccatgttggccaggctggtcttgagctcctggcctcaggtgatccacccgcctcagcctcctaaagtgctgggattacaggtgtaagtcaccgtgcccggccaagaaagaagatactttgaatcctagcaagttattgaagaatagtgataaaaaatactatattaagatgatgattctattgagaacaaactcccaaaaaccagcttaggagaaagttttattgtttagcttttgatttaatattctactttcagagacataaccatgtaacacattcataattggacatagtttacttattacttttataagaaggaaaagttaatcagtggtttaatcaaggaaataaaacttaggatatttgtgtttataaagaagtacactaatatcttattttgagtaagacacagagcagtcattaatcatcatgaaagcctggattcaaacaaagtagattaccttgcatttacagaattatagaacatcagaggttatctagttcactcactggtttcaaaaatataaactccaatgttctaggtttctgtgaagtgccttaggtgactgcatggagggataggttactaggtcagcattctgtttccattgcagtgctgctgatttactaatattacttttatatattgtgcttgtagatgagattatgttttaaaaagggctttagctgctaagtaaatgatgttcgaatcaactgcttttttgaaaggtcgccagtcatctcctttaattaaaaaatcaagataattttcacccttttttactggatcatttagcattagtctrtattctgttcactctttcttgaaatactttcttttatggcatctgtgacaccacatgctcctgattcctcctagtcttttgccattctttgcggtccctttcgagctcttccgtcttctaccagccattgaagtttggtgtttctcggggctcagtgcaccagatttcattctttctcatgccctactctttctagtagtctcatccatacctatgaatttagttcwtttttatcagcatgttactcagacttcagatttctatgtaagccccaaatttggttatctttttgcccactctgatactgccttttgaatttctcaaaaacatcagaaacacaatacagacagttcccagcttatgatggtttgacttatgatttttctgtggatagtaatgccgttgtaagttgagaagcatctgcatatcaaagacaaactctatctctatttctgaaatgatcaaataagcagacatacaaactggttcttttccagcatttccacctcagttactaaatgcagttacttaaatcagaaatctagctgtcatctttggcactgtccccttccttcatctccaagtctttctttatcttttaagtatctcttaaattattcccttttttctccattgtcactgctactactctaatccagtttgtcattcattgcctcttgctggaaccactacagtggcatcctaaccagtcttacagcatccattcttgcctccctccaatcttttcttcactccttttttttttttgtttttgaaatgaagtttcactcttgttgcccaggctggagtgcagtgacgcgatctgggctcactgcaacctcagcctcctgggttcaagcaattctccagcctcagcctcctgagtagctgggaatgcaggcccgcaccaccacacccagctaatttttgtatttttagtagagacggggtttcaccatgttggccaggatggtctggatctcttgaccttgtgatccgcccacctcggcctcccaaagtgctgggattacaggcatgagccaccacgcctggcccaatcttttcttctytccatatcragtgatcttccttaatctctagtgctttctccttgttctcaggttaaccaacatttctcaggaaaccaacattagatttggagccagtttrcttttttctttatcatattttgccttttggtttccctgtgtgttttgctgttgattcaaaaataactttaatgttttttatttaaaggtggcttaattatattattcacaaacagtgatataaacaataatataaacagtcaattagtcagtttggggtgctgtaacaaaataccataaaccgagtggcttataaacaacagaaatttatttctcacagttctagaagctgggaagtccaagatcaaggtgttggcagattcggtgtgtggtgaaggcctgcttcttggcttatgttgtgtcccacatggcagaaggggcaagggagctttcctgggtctcttttctaagggtaggagtctcattcatgaaggcagagtcctcttgacttaatcacctcccaaaggtcccacctcctaataccatcacattaggggcttaggatttaaacataggagttttggaagggacacaaacatcagtctgtagcacagtgttttaaaaaaatttgaaatgtaacctatacttgacaaaaatacttaaatatttgagaaaaactttggtattttcttcaaaaggaaaaaattatctgtttgttttcagtataaacctattttctaaggtttaaggttcaagctttcctcaaacagaaatgatcatttttaaaaagaaccactatcaaattgaattttccatctcattatcagcttctgtaataaactatgttttattagactcctatctatatggttttcagttctgtgattacacttccattttgaattgctaatttttggccattcgtcacttaaaaatgaatattttaacgtgatgatttggtattttaatatgcaggtattcaatcttttacatgatagctattagattgtttaatttacaaagttggtagtaaaatgaaatcttatttgtttactagcttttataagttgattttagtgtagatttatgtagcatattacagttttacatgtggaaataacattaatttttaaccttttgaaaaatcagctttgattttacttttatcatctggagaaactatgtttctagacaagaattgtatgccattaatctatcactatgaaataaaaacagaatagtggattgtataaytgaagtaagaataaaaatcttgaaaatatttttgttttatatttagaaaaatggcttttcttgttgtacccactaactctactatggttagtaaaacataattgtttctattgagtctagagttatttactttcaagtagtagagatataattgttttttaatgttttcatcactattttgattttcctataaggtggttcagcttgattttatgtatctggtattcatcagtttgcatagaaatttagagtcagctttgattttaatattgcattcttttgaaatattaatatttttattaaatctttactactgccaggtatattgaatgttatggatagattgtaaaatgaaaattggaattagcctaatgccttgtcttgaagtacatgacaaattagaatggttttcctctgtagcaaggatgttaccatggtgagagcttctgtttccatgacatttgcttgcatattttgataggtcttcatttgaagaagggctctgttttctggcaggctgcaaaagtgtcattctatcttttctcaaaatgtgttacttttattgaaaaatataattttccaaggaattgtaatagcaaagtgccargaaagaaaatataccttattttatttttttttycttgttcawcttttagagcacagcaaaatattcttagcttgctttgtgtaaggaagaaaaagcaaaacatcattttcaagtttttaaaataaatatttacttttttttgaattttgttggcaaaataaacagctacagatgcataatttgtaatcagtctcagctagatatagatatatctgtacaactaaaaggaattgctaatgatgatatattggtagcagagaaaggggaaataaatataaataaggacttcacaaaaatgaaagaagcggtgaattcctagagggtaaatatacagaataccaaatcagttctcatataaatgatacatattaaacacttaatgaattagggatagttctttttattaataacttatgtttaatgttgaaacattaatggtagatttttaaaattgtcattttacagtggtataattttaatttttaaaccagataatacaatcacgtggttcagaaattttaacatgtatttaaaaaatacatagaagaaaatttccctctcatacttcttcccagtttctttatatatatagaagcaaatacaaatgtgtgaatacattcttattttcattccacttttttaaaaagatagcatattattttacactttgcttttcagaatttgtccgggtatatttttaatgtctattttgttagcgctctgatttaggcatctagggagacatattggaatcatagcaaaaagatagggtttattaattgatatttcttatcccttatgcttatagcaattccacattttagaaggaaatatttaaaagcacacattttgtctatgtagggtcagaaaattgattttccttttgttgtccaagttcagtgataactttagtagctctttctactgacagaccaattcattctgtaagagctacaaactgaaatagtctctaaagaatatgtatttatacatgctatttcttctgcctgaaactattttcttttctatattactcccatttatccttcaactatcaagttagatgtgcttccttgaggaagcctggttgtataggtgagcatgactctcccctgtgcctccacagtattcccattggcctcaaagcacttaacrtgtattaatttttagttatttaaacattaccatttctcttactagattgtaagtaccatgaagacagagaccatctctgtctcattcacagtgatatttttagtgcttgtagcagtagggtgaatattaagtactgtgctgtacgtgtgggcaatctgaatgtctgctgctcagattcactgtactttctcttgtagctacttaactcatccttattgcctgtataattctcagcttaaattttacttcccctgggaaatttgtttttatctttttgactgtgttacatttcattttctcagctattatagcactctgaacttcatctttcattaaattcttcacagttttttgtaactgcttattatttgtctgaaacccccattatctttatcttactgtcctctagcacagaggttgacacaggcttagcagytgatcaataggtactggtttaaaaaaaaagaatgaatgcatactttagatcagtgattctcaactggcatgattttacttcccaaataacatttgacagtatgtggggacattttttattattttgattggcccatagaggccagggatgctgttaaacctcctacattgcacggaacagcccccacaacaaagagtcaactgccccaatgtcagtagtattgctgttaaagaaccctgctttagactgtggatttctttgctttctccatattgtcttagatttatagatttataaatgtatagggcttttgaatatacttgaacagatatcttaaccattttgtcttttttctttaaattctatattttgtgacaatttaacttttttgacgtatagaaattgtatgtatttagggcatacagcttgatgttttgatatacattgtgaaataatcactacattccagctaattaacatctgatatctctgtctacctgccatttttgtaccctttgaccagcatcatcccatttctagttccttccgtttccaggcagccaccatcctaatctctgcttctatgagtttgactaattgagattccatgtataagtgagatcatgcagtatttctctttctggcttatttttgcttagtacagtgctctccagctccatccacgttaccacaaatggcataaattacttttctgggggtaaggctgaataatattctgttatatgtacaccacgttttctttaaccattcatccatcgcagggcatttaagttgcttccatatcttcgctattgtgcataaagctgcagtgaatgggagagagcagatatctcttcatgatcctgttttcaatacttccagatacatactcagaggtgggattgctgaatcatagggtggttctgtctttaattttttgaggaacctcaatactgttttcactaatgggctgtaccaatttacattctcaccgaagtatacaagggttcacttttctccatatccttgacaacacttgttatttcttgcctttttgataataggcatcctcgtaaatgtgaagtgctgtcttattgaggttttgatttgcatttccctgctgattagaaatgctgagcagcttttcaataggtctgttggccatctacgtttcttattttgagragtgtctattcagggcccttacccatttttaacaggttatttgtatttttaatattgagttgtatgattttatatattggatattaacccctgtggatgtatagtttgmagattattttttctcatttcataggtgacctttcactttgttcattgtttcttttgctgtgcagaaggtttttagtttgatatagtcccacttgtctatttttgcttctgttgcctgtgcttttggtgttatatccagaaaatagttgccaagaccagtgtcaagaagtttttctttgtttacttctaggagttttacagtttccacttttgtgtttaaatgtttaatccatttgagttgatttttgtgtatggtgtgcacctttttgtctttccattcaccccgtacaatgtggtagttagtatatattttggaawctggaataaaatacttgggttcaaatatcttttctaccaatttctttatgactctgttttgtgatccatgagaaaagggtactatgttagattgaactacctcatggagctattttgagaataaagtgatttaagaacactcaaaccagtaactggtgaaaagtgaaaaactcagtcgatgttagcccttagaagttattgctgccttaattattctgtgtaaagggcatagtaggggataaaactagagaggatgaataaggctaggtaagtgggcacggggaggtggtctttggttgttaggttgagaagcttgtattattttcagtaaaccatctaaccagatggattcaggatcagttgtatttgatagggcctgttgataatagggataacagttaggttgatcacaatagcctgggtgaaaaagtaatagagataattggtggaatatggaattggtagagatcgcatcaaagatgattcgagagttttgaacctttctggttaggagcattatgttaatcagaaatggaaatcagaatggagatgaactagttttttgtttaagaatataaatgattcagttttagatttaaaactttaggctgcctttagggtactaatgaataagccagtgcctggcatacttttatttgggagaaagttaggacaaaagatgaagatttgggagtaattttcattgtaagtgtatttggagtcttagaggagtggatgctgtataatgtgtaacagtgaaaagacaaataatagattcttgaagaatgtgcgttcataattgattccattgttttactgtctctagtagcattactgtctakratttctaaagttttctttaaaaataaatgctgtaataaaactaatattatagtaaggacagggatctttcttagcttcagatgtgatctttgtgaagaaggcattatgtctcargttttactgtagaacctggtgataactactcacattttactagtggaaataatagaataacataagcctgcaaggtgtttttagatatctctggtctagatatcctgttttaggcaagcaaaatgctattattgcatttttacaaatgagatagataaagcccactttgaacttgcttaaaataattacgttagtagaggcaaagagggactaaatacgttgctcctttgccgttactaatgctagcttcatttacatcaggktttctcagccttggcaccattgacattttgggctagaattctttgttgtgggcagctgccctgtgctttgtaggatgtttagtagcatatctagcctttaaccactagatggcagtagcaccccctccccacctcttgttcaaccaaaaatgtctccacgcattgccaaatatcccttggaggcaaaatctcccctagttgagaaccagtgctttacaccacaaatatatatcatgtatacctccagttagcttcctgtccaccttagttttacagacttctctttggcatatggccatcttctacctctaagccaggttctgttctcatctggtcaacactttcttaagcatcttattttgctgcctgacgtttacatttattatgtttttgactttacaatggcaatggatatcttgggttatattggtaattacgtttacacctaacatatccccagtttttttttgacagctcacctcatacaatcagatttatttctataaactaagtattgtatttatcagttaactatagctctgataattattttaacctagatacatgctggtaaattgaattatattactctgactatacacgagaacatgtagaatggtgtttttatatccttgtttatagttcagcaagattctgtatttcaagtttgataaatcataaatatttatttctaaaaggcttattcagtttctgtatttgtaatatatttgctcttattattttggggatcatgaaaaagggattatttggtagtgatttatataatctttcataaatattgttagcttatttcataatctcagatatttcatttttaaattaagtgtacctgagacagatatttttgtagtaagttttgaaattctgtatttttaattattttattmaagtatttgagcattttactaggtgttttgtaggcacaaaattgatgtgattttttctgaagtagaattacattctaatgggtatttcaatatattttactcatagaatctgtgtcattgttgaatctacattcaataactgggagctacagtattcttaaaataccattttctagattaattaattaattwatttatttgagacagagtctcaccctattgcccaggctggcgtgcagtggtgtgatctygactcactgcaacctctgcctttcaggttcaagcaattttcctgccttggcccccccaggtggctgggactacaaacatgcaccaccatgcctagctaatttttgcatttttagtagagatggtgtttcatcatgttggccaggctggtcttgaactcctgacctcaggtgatctgcccgccttggcttctcaaagtgctgggattacagacgtgagccactgcacctggccccattttctaaaattttataatcattaattttcataaaggtgctttgaaattcctaataatatcaagtctagtattccaaattaatatgaatgatttgatgtgcaatgagatgaggagttacttaagtttctgaattattgctgtgtaaaaacagaagagttgatacatgttgttttctyattagacaaaattgagtcttgatttccaggcaagagaatgtgaatgatatttaatatctrttatataaataaaattacatattaaagctttttagaatttatcattaggtacctattaggagatattttaaaactataccatcattcaacttttctagatttaataacttagattgatattggtttctaagtgttcttgtagtcacttactataaacaagtaggaaacggaactaaaggatgatttgcctgtaagtatgaaatttccttggcagaggttgcaaatgcggtgggatgtgcatagtgtgtttcaagctacacaaacttactctttttcttgggcctattctctcttgctgacactcctttctccccttactttttttgaccctttactactgtaatgagccactgttacttaaaggcctgtgacttttctgtcaaataagctttactaggaaaatgactatattttatcagattctcttcactaatgggttgacaatgggaaaatgttgcagtttcaacattccaaaaaaactttctaaagagatttatttgtgattatcctgaagcatgtatgttacctaaataaatctctcagggcaaatatatggaagaaaatttccactgaaaaattatatatttgattttatacttactcatgcttcaatacaaaacttgagggaaaataatgtgcattattttcttacacgtggcacagttaaaaggtgtttcctatcaattccaatgattttttctttcttagcaaaacttaaattatattgaatcgtcattgtatggacttccgtttgaagtaagcaatcctgtgattatgatttttgcagttttaaataatttataaaaatctgtttgagctgggtgcaatggattgcacccttcgtctcagctactcaggaggctgtggtgggagaattgcttaaactcaggagttcaaggctgcagtgctrtgactgcacctgtgaatagccactgcattctagcttgggcaagatagcaagactccatatctaattttaaaaattaaattaaaaatttgttagaatgcaatttgacttggataatttaaaaatactagtattggacacttagcaatttttccttcctaagtatttttcttataatatggccccaccctccataatgcacacactgaattgggagacttgcctctcctttagcacatcctatatttctctactcctgtttttttgcccatatttacttcatgctgcaaatctgcatgagtgaatattacccatccttcaaggcttacaatgttcattcctctataatcaattttaagacactcaggtaataccttttctttttttactttgtactcagaatacatttaaaatccccaagtgagatttatccctgggttacaaggttggtataaacatatgcagatcaatcaatatgatataccacagtaacagaataaaagctaaaaccacatgatcatctccacagattcatacaaagcatttggcaaagttcaacatcttttgggacaaaaacttccaataaaataggtatagaagaaaattttctcaacacaaaggccatttatgaaaaggccacagctagcatcacaattaatggggaagaactaaaagcttttcctgtaaaatccggtacaaggcaaggattccccatcttggtgcttctattcaacataatactggagctactagtaagagcaatcagacaagaaaaagaaacaacaggcatctaaaatggaaaacaagtagtagaattatctctgtttgcagatgacatgatcctatatgtagaaaaagactgttacatcaaaaaaacctgttaattcaataaagttgtgggatgcaaagttaacatacagaaatcagttacatttctttacaccaatsgataacagcctatctgaaaagagaatgaagaaaacaatctcatttacaatagcatcaaaaagaataaaatacctaggaataaatttaaccaagatggaagaaattgaagatgatacacataaatagaaagatattccatgttaatgaattggaagatttacattgttaagatgtccatactacccaaagtgatacacagatttggtgcaatccctatccaaataccaatgacattttttacagaactagagaaaaacaattctaaaatttgtaggggactaaaaaccctgaaaaagccaaagcaattttgagaaagaagaacaaagttggaagcatcacacttcctggtttcaagttatattrctaagctccagtaattaaaatggtgtagtactgaaatagaaacatacacatagaccagtggaccagaatagagggcccagaaataaacccaagcatgtatgttcaaatttttgacatgggcaccaagaatacacaatggggagaagataatcttttcagtaaatgatgttggggaagcttgaatatccatatacaaaagaatgaaattggacccttataccatacacaaaaatccacttaaaatagatcaaatrcctaactgtaacacttgaaactgtaaaactcctagaagaaaacatagtggaaaagctccttgatgttggtcttggcaatgatctttttgatgttacatcaaaagctcagccaacaacagcaataatacacaactgggactacatgaaactaaaaagcttctgcacaacaggaaacaatcaacaaaatgaaaaggcagattgggagaaaatatttgcaaagcacatatctgataaggggatatctataatattaaaggaattcacaactcagtagcaaaaaacaaaacaaaaacaaataatccaaggacttgaatagacttttttttttttttttccaaagaagccatgaaagtggtcaacaggtggctgggcatggtggctcatgcctgtaatctcaacactttgggaggccaaggtgggtagatcacctgaggtcaggagtttgagaccagcctgaacaacatggagaaaccccatctctactaaaaaaaagaagaaaaaaaaatgcawaattagctgggcctgctggcacatgcctgtaatctcagctacttgggaggctgaggcaggagaatcacttgaacctgggaggcggaggttgcggtgagctgagattgcgccactgcactccagcctgggcaacgagagggaaactccgtctcaaaaaaaaaaaaaaaggtcaaaaggtgtatgaaaaggtgctcaacatcaccagtcacagagaaatgaaaattaaaacgtcattgagatattacctcatgcatattaagatggctattatcgaaaatacaagataacatacaaaatagttggtgaaggtgtggagagtaagggtgtcccactgttggtaggaatgtaaattggtacaaccattatggaaaacagtatggaggctcctcaaacgattaaaaacaaaactaatatatgactcagcagttcctctgagtatataccaaaagaaatgaaattagtacctcatagagaaatgtatgcccccatgttcattacagcattatttccaacagcctrcatatggaaaccacctaaatgtccttcagtgggtcaatgaattaagaaattatggtatatttatgcaacagratattattcaggcttagaaaaaaagatcctgtcatttataacaacatggatggagctggagggcattgtactaagcaagatcagccagacacagaaagagaaatggtgtgtgatttcacttacatgtggaatctcaaaaagttgagtacacagaaacagaatgcaaaaaacacctattatgaagctacttggttaataagctcttttaaatgggggagaaacaaacccagttggtaactcattaataacaacttttgattataggtgataaactaattctgtacctccttattataattgaaacagatataaattactctgtcagttctaactgtaccgtcttctgtggttagaaatataaaaaaattagcaagctcaggtcagagggagagcatgctttttatcccccctctcagttgtgggtattcaaagggatttgttttgttgaaactagaagctactgttcaggactaggaagaaggttatcagtgctgaggatgggggagttggggagatgtaggttaaagagcacaaatttgcagttacgtaggctgaataaatctggaggtctaatgtacagcacaatgactgtacttaataatattgttttatatactggaagtttgccaagagagtagatttcagatgttcttgacacacatgtacacacatacaaggtaactgtgaggagatggataatgttaatttgctttaccatagtaatcatttcactgtgtatatcaaacattgtgttataatgttatatactttacatatcaaaaaatttcaattaatttttcattctgttgagtaaatgcattccaattaggatacctataaagtgaatatacaaatatattgattagtgtgatttatttatatttacatattatatacattaggaagttataatgcttaagaacacaattatttacaaagcttttgtttattaaaataatttttataatctctaattacatggacagtgttgtacaaccacctccactgtctatttccaaarccttttcatcatcccaaacagaaatcatttaaccactaagcagtaacttccattttcttccatactgtagccctgggtgacctctaatctactttcggtcaccatgatttttttctattttaaatatttcatgtaagtggaatcatacaatattttccttttgtgtctggcttatttcgcttagcataatgcttttgaggttcatccrtttggcagcacgtatcaaaacttcattcctttttatatttggataatatatgtatatacaaccttttgtttatctactcacctgttgatggagacttgtaytgtctttaccttttaatttttgtgaagaatgcttcaatgaacattgacatacaagtgtctgtttgagtagctgttttcaggtttttggagtgtgtacctasaaatggaccttccrggtcatgtggtaattctgtgtttggctttttgaggtactgttaaccttttatctatagtggctgcaccatttcacatttctatcagcaatgtgcatgttctgatttatccacattctcaccaacacttgttagtttctgtgtttttttttctaaattatagtcaccctagttagtatgaagtggtatctccatttgattttgattgcatttgtttaatgattaatgatagtgaacatcttttcatgtgcttattggccatttgtatatcttccttggagaaatgtttattcaagtcttttgacttttaaatttgggtttttttgttgttaagttgtatccattttaacaatatattctggatataaatagatacatatccaggtttatatcagatgtataatttgcaaacattttctcccattctgtaggttgtcttttcactttcttgataatgttctgtcatgcacaaaggtttttaattttgattaagcccaaactatgtagtttttcttttgttgcttatgcttttggtgtcaaaactaaaaatctactgccaaatctaagatcgcagagccttatgttttcttctaagacttctgtggttttacatgttacaggttgtttattcattttttgttaatctttgtatatggtatgaggtaggcattcaatttcatagttttacatgtggaaaaccagctgtcccacctctctttcttaaagagagtattctttccctcattgaatgggcttggcatccttgtggaaaagaaatcaatttgctatagatttatgactttatttatgtactcttaattctattctgttggtgtttttgtctatctttatgctagtaccacctgttttgattactgtagctttgtagtaagttttgaaaagtaaaaagtgtgactctttcaattcttttcttttttcaagatttttttttttttaccaataattttttatttatttattattattatactttaagttttagggtacatgtgcacaatgtgcaggttagttacatatgtatacatgtgccatgctggtgcgctgcacccactaactcgtcatctagcattaggtatatctcccgatgctatccctcccccctccccccaccccacaacagtccccagagtgtgatgttccccttcctgtgtccatgtgttctcattgttcaattcccacctatgagtgagaatatgcggtgtttgtttttttgttcttgcgatagtttactgagaatgatgatttccaatttcatccatgtccctacaaagggcatgaactcatcattttttatggctgcatagtattccatggtgtatatgtgccacattttcttaatccagtctatcattgttggacatttgggttggttccaagtctttgctattgtgaataatgccgcaataaacatacgtgtgcatgtgtctttatagcagcatgatttatagtcctttgggtatatacccagtaatgggatggctgggtcaaatggtatttctagttctagatccctgaagaatcaccacactgacttccacaatggttgaactagtttacagtcccaccaacagtgtaaaagtgttcctatttttccacatcctctccagcacctgttgtttcctgactttttaatgattgccattctaactggtgtgagatgatatctcattgtggttttgatttgcatttctctgatggccagtgatggtgagcattttttcatgtgttttttggctgcataaatatcttcttttgagaagtgtctgttcatgtccttcggccactttttgatggggtcgtttttttttcttgtaaatttgtttgagttcattgtagattctggatattagccctttgtcagatgaataggttgcgaaaattttctcccattttgtaggttgcctgttcactctgatggtagtttcttttgctgtgcagaagctctttagtttaattagatcccatttgtttgactctttaggtctgttgaaattttacttgaatttgaagagcacattttcatttctgtggaaaacgctgttggaattttcttagagattgcactgaatctgtagattgttctgggagtattgacatcttaacacattgagtcttcctatccatgaacatatgatgtctttccatctttttttttttttaaagaaatcagtgttcagtatacagatgattcaccttggttaaattaattcctacatattttgttcctctagatgctattgcacattttttttttttgagacagagtttcactctgttgctcaggctggagtgcagtggtatgatcatggctcactatagccttgacctcccaggctcaagcaatcctcccacctcagtctcctaaggagccgggactacaggcatgtgccactatatttggctaattattaaatttttttgtagagataaggtcttgctttcttgcccaggctgatctcgaactcctgggctcaagctgtcctcacacctctacctcccaaagtgctggaattacaggcgtgagccaccgtgcctaaccctaytgtaagtttttaaaaatgtcctttccttttttttcttttgatttttattgctggtgtatagaagcaaaactgaatttttgcgttgataatttcaccaaaaatagtaaattattaggaatacatttaacaaaagccatgcaagatctctatactgaatactacagaacattgttaagattcatttaaggatgagtaaatggagagatttacagtgtttatgaatcagaaaattcaatttggttaagatgtcatttcttccctaacctattgattgattcagtgtaatcctcattaaaatctcagcaggcttatttttcatagaaattggcaagctgattttaaaatgtatgtggaaatgtaaatgctacattagctaaaagtgttttgaaaaaggagaataaaagtctgaggacttacacagcctgttttcaaaatgtataaagttatagtaattgagactattctattagcaggaagaaagacatatatgttaatgcaacagattagtgagaaaagaaattgtgtgtgtgtgtgtgtgtgtgtgtgtgtgtgtgtatatatatatacacacatacatacatacagtcctgtgcttcataccatagaaattaataagctgaagtagtttgtatacctaaaaataacagctgaaaccataaaacttgtctaagaaaacatagtagaaaattgtaatgactttaggaaaatattccttaaataggtcacaaaaagcacaaattatataatttttaaatggataattttgacrttactaaaataaagaactttggtcttcaaaagaaattatttagaaaatgaaaaagccaaagacttgtagaaaatatttgtaatacatatatccaaccaagactatttatttacaatatgtaagtaacttcttacaaggcagtaatgagtcaaacagctcagtgcaaacaagagtaaaagatttgaacagacacttcaccaaagaaggtatacagatagcaataaacaaaagaaaagatcttcaccatctttgtgtcattagagaaatgccaattaaaatgatgagacacacactttagaaaggctaaattaagaagactgacaatgcctagtccaaggcggatatggagcaaatggacttctcattcatttctggtaggaatagaaaatgttacagtttgacagttcttacaaagctaaacatgcatttgccatgtgatacagtcattccactctcctagttatttacccaagagttaggaaaacatgtcaatacaaatgttcagagcagcatcattcatgatagccaaaaactggaaacaacccagatatccatcaccttgtaaatgtgtaaacaatttgtggtatatacatacaatggaatcctagtcagcaatgaaaaggaacatactactagtatatgcaccaggatagattcatctcaaaaatcttacataaagtgtttctttattttttatttttaaagtatttcttatgtagctagaaaaggtacaactrtagtcgtagaaagcagatcactgttgccagaatgctgacggagggaattgactgcaaatggtagcaagaaattttttcacatccttgaaatgttcaatatcatgattttggtcatggttacgtaactgtatatatttgtcaagatttgttggttaattttattcattataaattatccctccataaagctgaacaagaaaaaaaagcatttttaaaaatgaagcttcttttaagtcataggaaggttggatagaatcactggttttattctttttctggactttcacaaacaagggtctacatgtctttggtaggaaaagaagaaaggtcatcaataagaaggtagatatctagcctgacttgttggttgaagattaaaattatgtttagaaaagaagtaattttgcttaataaaaagttacattaggtttaatacattgaatgtttaatttttaacttcttagtaacgattgtcatcattttaattggctttagaaatacaaacctggtcgatgtgatgatattttgaaatggaagcctcccagtctgaattctgtggattttcgtctaaaaataacaagaatgggaggagaagggtaagtatgcacttttgtactttttgcatgaaataatactgtttgtgtaaggcttcaccttttacagggtatttcatatatactttacaatactttaaagaaagaaactaaaatactttattttacaaratattttacatatatacttatacaacaatttcgttttcagagattactcctttgacctgtgtcagctaacatatagcagtttcctttaaagtttactgatctttgttttaaaatcattttcattaatataattatattaataacaacaatataaaaggtaataataatattaaaaaacgaattttggctgggcgtggtggctcatgcctgtaatcctagcactttgggaggccaagataggcagattgcttgagcacaggagtttgagagtagcctgggcaacatgacgaaaccccctctctaccaaaaatagaaaaattagttgggcttgktggcacatacctgtggtccyagctactcgggaggctgaggtgggaggattgtttgagcctgggaggcagaggtagcagtgagctgagactgcaccctgctgcactccagcctgggtgacagagtgagaccacttcccccgccgcacacctccccccaaagaaaagaactttgttaaattgtaaagtgaaaattttactaaattttgagattttactgaaaaataattctcttatatgaattatagatctagatataagatatgatcattggtattataattaagcatatcgaaataagtcttttttactttgaaggaaattacttcatgtttgcatttgcagagcaaatattttctatacttttgtagggtaagttaactgttgactttcattaagattttttataatgtctattaagtgttaatttttaaatttattggttaatcttccttttatgactttttggttgctatcttagaataaaagatgctttagcatgaatattttcaacatttttccaaagccttgtttttatttcacttttgttctataactttttaagtatcttggctaagtaaatacattacaacaaaataagaaatccttaatcaaggaaatcagaaagagaaagtaaataagataatactagcaaagagattaaagcttaccagtgcatcctgtgaaatttttacttatcaaaggtaaagcacagatagcatttttgctagctgatggaacaggggatatatggagtccagactccaaaagattaaaatatattaagaaactatgcattatcaaagaaaggaaactgtgcattgtggtgaatcttaagtgaaaaggtgggtttaataaagcatgtgggtattcgttttcaaacaacagggtatttaacattttatttgaggctgggtgcagtggctcatgcctgtaattccagcactttgggaggccaaggtgggaggatcacttgaggccaggaatttgagaccagtctgggcaaaataaggaggccctgtttctaaaacaaacaaaaattagccgggtatggtggtgcatgcctgtggttccagctacttgggaggctgaggtggcaggattgcttgagcccagagcaagtctctgtctcaaaaaaaaaagaaagaaaaagaaacacacacacacacacacacactatccctaaatgtttgtggcttaatttacaattgggacttaatggcaaaaagttgttagaacaattatctggaacccccaagaatatattgagctctayatgagtctgattataatccaaggatagataaatttgaggctataggaatagctggaatacacacacaggaatgactttcaggatagtttcaaaaatgtctttctcttatctaaacattggataaatattgatatgttgaacattcaagattagtcttcctgacaaagtgcccagtgtacagattttctcagttgccagtcaaatgtgggattgtttatcactaatcatgcaagttgggtgtaggtttgatatgttcttctggaagtgccttacagaagaccatctcactattagaaaaattgaggctaagaaactaattctagtggggctacgctgtttttttttttttttttttttttttgacacaagtgaatatagttcttcgaaaaataagacttcaaagatgaagtaaaattttgttaaactgcttcattactaaatcttctatttttcttaatgctatatttgtatttggttaaagagtatagactctcggattgtttcattgggttttttaaaaacaacttacttttgccttttacagtcagttcttagtggcacttaaaggcttcctgaggctaaacatagaatactcatttctctagtagtaaaaaatgttattttttcttgcagtttcctattgtaattaaacatagcatgatgtaattcagtttagtagtttgtcatcctagttttgcctttattcatagtacgttttaaatatattttgttcttttaaaattttacctatttaatgtcttcttcctaaaaaatggaattacttttgagtctagtgcatctttaaaactcatccaaatgtttctctaaggtgattttcagataggaatatgcaatttacatcagtgtatgtacattatttgtgtaatgggagtcaattttcaaaaatagaatatttaatatgaaatataacatggtaactattacataaaacatattcggttagccagagtaatatgctttttctaaatgtaaagaatgttgtgcattatagcagtctttactgaataaatgagtttatatctaatgcttagcattaactcagtattttagagaacactgtaagaaatatgtctatactagttcgaaaggggagtagctatgtctctgaatcattaagcatgcactagtgaagtgggactaagctgttaaaacaccatgagagaagctcatatctttgattgtacttccaaatatttctacaaagcctaaaatggaatagaatatcttgaaggtataatataaataatagtctttgaaaatgactgcagtagttttctaagaaatgaagacttaggcattctaggtatgtttttgagtttgactttaatgaggtgctaatagtatagatttctgttagattgaaatttaatacaaatagaaaaatctgttctatgtgttgagtgccctgttgatggcaattaaaatccatactttgctcttcttatctcctattatcatttctgaaaatttgagatatattaacattgatttatcatggcctaatataacttttgtatatcttagcaatttatattgtgttgagttttatacacaatatagattttcatctgagagctatttgttgttttaaaaacatgatggctttatattaactaacttgtgacctaaaaccatggtcattgtcaaaagctagaattacaaaagtagtctgtactctggaaattgcaaactcttgagtacaatgtcagtgatatatagtgattggtataaacttattatttgtatagaatagtattttagagttcaggttttaaagctggactgcctaggttatctccttactgtctgtgtgattgagcacattacttttttctgtgtgtcaagttcttcatcaataaaataagttggcctcataagacgtctgtaaggattaaataagctaatgtatgtaaaatgtttagaacagaacctggtacatggtaaacgtttaaatatttgccattatttttattgttttaatcaaaacaaatttaaaagtgcatcttcccttcttgctgcctctgcaatactacctgttacttgctgcactaagtccaactttctgtgtgaatcatttcctatttgattccaatctctgttaattttctcttttaaaatgcatatatctttagcttttttgtgtaatttgtcatmactgttaaacacctggagagcaagagcacagcaaagtcagtaacttttcattatagaggtttttgtaacaagtctcttaaaataaccttgacagtatatatactggtatatatagcatatagtggttaagaacataggttattggccaagtttgcccagaaccaaatccaagttccactacttatttgctgtgtggtcttgttaacttaacctacctaaccttcctcatctgtaaaatgtccacaggaataatgtttattttgtagattkgttgtgctgaagatttatgtatrctcaatatttaattgcatgggtaaacaaagtaaatataagtctgcctttatagaatttacaagctaatgggctaagatgaaaaaataatactactttatcaggttttgtggggattaaataaatgatgcatgtaaattcagcataaaactcaataaataaatgtttgctttaaaaaatggttataattattaattgaacctcagcagaatgtatggttaagtcatggattaaaaacataactctgtattatcaagtggaaaaaaagtgccctgaatgaagaagcctcactttgctgtgaaaatataaaaatttttgtccttctaataaaaaatatacattctaaaacaagaatgaaatgtaatttttttttttttttttgagatggagtctcactctgtctcccaggctggagtgcagtggtgggatctcagctcactgcaagctctgcctcctgggttcaggccattctcctgcctcagcctccctagtagctttgactacaggcgcctgccaccatgcccggctaattttttgtatttttagtagagacggggtttcaccgtgttagccaggatggtctcgatctcctgacctgatgatccacctgccttggcctcccaaagtgctgggattacaggtgtgagccaccgcacctggcccaaaatgtaattttttacctatcacattggaaataataacattgtcccttttggttagaatgtgagcaaataggtactctcctaaactgtttggtaggaacagaagttggtacaactctttcaatgggcattaaggtagtatatgtcctgagaaaatatgctccaattttgtgaaaggagagatgttgtttgtcttctacatagttgtattcttagtacatagcatggtgacttgtttatagtaggcactccagaaatattcagtgatggaatgtatatacaaacaaataagaatatgtaaaagtatgtgtataataattttattgaagcatcattayaatagtgagaaactggaaatattcaatgtctttttcactgtaaaagtcttttgtaaaatatagttgtatacatgtgtcttcctgtatgtgtttccaggaaagttgctaatagtattctaaaaatctctaatagtatcttttagaaattggtctagtctgttgagatacaagatttcctagagctttgaggttgaactcagacctagcatctacatttgttgtttgattttacattcacacatagttgtgtgatgttaatagacataccagtttggatttaattaaaaacagaaacacagcaaatattttaacagaatgaatttagttgaagaattgtctgttacgaaagaactgaagagatgaaaaagtcttgcagaggaagcaagcactgcaggaagcgtctaccatgcagcgaactggggtaaygaagaaatgagggtagattattaaaatttagaagattggaggaggccttatagggttcataagaagccagttgctgcccagctgtcattcttgccacaagatcttggaggaaggattcagaggctccagacaattgatatactgggttataaggcccaagtggcagagcagcttayactatagcatgaacttgctgcagagccatcttttgttctgatttcaacttaaaaatggtagcctaacaggttccttggtcaatgagttggagtactgcttcaaaatccacagtgattgttaatctttgtaacgtcctttttagtatccactgatagtgcaagtagagtaacttgtctctgacaccttggagaagctatcctgataggcttccaaccattggacccctagaaatcttacttaggcaatgggctcttaatttttgtgggttttatgtcttctgtcttacatgtgtcttagcaagatgtctaaagaactttatacttcctctttatcactcttaataagtacaaaatcatcagcattgttgatcagtgatttgttctgtgtagtgtcagagtgaccactgtctctgaaaaaaattagaaagacgataacaagtgagagacagaaattggagtccttacacatggatgttgagattgtaagttggtgcagccagtgtggcaaacagttacatagttcctcaaaatgtttaagatagacttaccatgtgactcagcaattccactctcaagtatatacccaagagaaatgaaaacatatgcccacacaaaacttgtacgtaaatcttcttatcagcattattcataatagccaaagggtggaaacaaccccaaatatttatcaactgacacatggataaatacgcaaacaaaataactcttccaccaggcacagtgcctcactcctgtagtcccagcactttgagatgtctgaggtgggcatagtgcttgagtccaggagtttgagaccagcctgggcaacctgstgaaaccccatttctaacaagaaatmcaaaaaaaaaaaaaaaaaaaaaaaaaagctggccatgatggcacatgcctgtagtcccagctacttggaggctaaggtgggaggaacacctgagcctggggaggttggggctacagtgagctgtggtggggccactgcactccagcctgagtgacagagtgagacccttccttaaaaaaaaggaaaaagaaaatacctttcatttagacgactgtagtggatcctcttaagcaaagagactctggatattatgccagctggatttcaattcaagctctgccactctttactcaggttatctctctgttgcttgtgtttctgtaacttcattatgtggataatagtgcctaccttgtgtgggactttaatgacataatacatgtaagtcctttaaactactgcatgttacataataaatactaaatatatatttactattttttaaaaagaccactgtctctgtagattctactgtggcagagagcagaaaagcagtatgctgtggctgcaagatatactattggtcattctaggcaaaggcagatgtcttctgatagtaccacagattggtacagagaraaaagtatttgccaacttgtatataagattttagaggctacattgattggtttcgttaaagacagcacatctgaaatggcagctgcacttggtttaacatgattaaatttatgataatcaaaaatcattctaaatctctgatggtggtactaatttttgtatttcccttggagataygttactgcttttggtttatttccctggtagggaaggctggttgaaggggcttttatttggcctttcctagcataatgacccttattcygtgggtcagacagccaatgtggaaattcgttttccaagtatttctcttccagttatacatccagtaactggaaaataaccgcaggttgtatttgtggacataccgtcacacttagatttaaacttgagccagtaatccatttatcacctgattaccctaagctctccatttaacttacrgactgcagtggcattttgggttcctggcaattcgtgtctgtttaaagtaagtgtctggtaatcccctagtggtctgggtgttctttcttttggattataatttttttattagatttttcttttgaaagaaagaacatccgtaccactagggggttaccagacacttactttaaacagacacgaccactaggggattacccatcggggattaccagaacaatcactttagcaaatgctgctcatcctttgaaaaactgttggaagatttacagcaagggtcagcactttttttctatgaaaggccagatagtcaatattttagggtttgttgcctatgtatctcaactactcaagtctaccattgtggtgctaaatcaaagctagacaatatgtgtatgagtgagcatgactgtgtcacagtgaaactttatttacaaaaacaggtgtgaggccagatgtggcctgtagactatagtttgccaactgtggatttacagtactgtacatggttgtagtagtattgcaataccttctttaaggggatctggcctcccacttgtattgggaggcttaggtatttttgttgttgtttgtttgttttgagatagagwcttactctgttgcccaggctggagtgcagtggtgcaatctcagctcactgtaccgtccacctcccgggttcaagcgattctcctgcttcagcctccagagtagctgggattacaggtgcctgccaccatgctgggctgattttttataattttaataggggtggggtttcacagtgttggccaggctggtcgcaaactcctgacctcaagtgatccacstgcctcggcctcccaaagtgctgggattacaggtgtgagccaacatgcctggccagaaggttctggtttgttaaccaggtaaggtctgcacatttaaaactgagaaatgctarcttcctagcaagcagaatggaatatatagaattgactgcatggtctcctttacttcctatcggaaaagtctttttactctgctgactagagtgtrtgtgtgtgtgtgtgtgtgtgtgtgtgtgtgtgtgkatttcttttgcttcaattcattaaaaaaaaaaatagaatgagctgggtttggaagctgaggcaggaggattgcttgagccctaggagtttgaatccagcctgtgcaatacagcaagatctcatctctgggaaaaaaaaaaaaaaatcgttttctcatgcttatttgaattagtgttactctttttgagaaggaaattgtggtggtaaaatatttttctgaatgttgaagaactgttcttatataaggaaggattaagtatgggggaaaaagtcttactactttgctgagcagcatttttctgttttctaccctctgcctctttcacaaaatgaaatgtttaattctttcatttatattttatttaaaaattattttaaagaaatagacataaaacactaatgtaatcactattattatagtatgcttaatgactaagctatttggtatgtagctggttgtatttttttatgtataatatagctatttttattatttagcaaatgacccatagtaactgctttcttatttgaaaatattctcatcacccaaacatattttaagacaaatgcttcgttggctttcagtctttgaatggttactactgttaacattcttgattatgttttacttccagtgtgcctaggagaggcaaggaggagctgtgactgaactcttttcagttcctttgcctggttatctcttgggtattagtaactcttgtttcctctgttatttcatccttcctgcattcagcagaaaatctttcccaggccgcttaccaaaaaccaacatcataatcaaagtgtctacaagtaactagtaggagaaaaggagcatgtggctttaaaacatctacttatgacctcactggagtcaaattacttatttttacttgttaatttactaaatagaagtatatatcacctttgttttataatttgrttctttggaatttaattttcatattcattttaacactattctttacattagtacctttygcttatgtgatttttctcaattaatatatattttcattaattgcaatttctctaagttaccttttatgttataaaaagcttgttacctggtggatattatatagattaaatattagttaaattcctactttgaatcacattgaagktggtgggggggaaaatgaagtaacttaggaacataggatttgaatgcagaccctcatgagagatgagatgggaagaactgcaaacaaatcttgaactccttttttattaggtttgttttttgctgtaattatggttgtgaaacgccaaactactttagaagtgttgtaggattgagcaaatgggtactgatgttgggagtcagggttctcagtgaggaaggagaaagatacaaatatgaaatggaggaaggcagtgaagaactctgtgagatggattagaatttttaaaatatttgaatatatatgttcacatgtatgtgcatgtatatgaatatatatacatgattgtgtttgtgtatgtaatatgtgatacacataaactcatttcctagctctgtccactgacaggacctataagcagaggcaccctggtaataataagcatatccagcacgaagattttggtgtctaacaccattcctcaccaaaaagaaccagagatcttcagagaaatgtcttattctagagccgggtagggaggatgcaggataggcatagaataccttcttatgccagaaagtaagaaagtacatccccaacccaacaaaaacaatgtatgtcgaaaggatgcaggagccaacttgaaggtgctcccactggccagatctgggatatagtgtggacaccagaaggacagtaatgaattatgaactttgctaaaaataggaatctatgagtccatactgccatactggtaataaatgagcagaagagatggtttagcttttagcagaatgctgattggtaaatgttctgagtcctggatttggaaaattattttgccaccaccatagtaaagatcagctctagtgagaataatcaatggagttaatgggtgaagcacaccaacatggcacatgtatacatatgtaacaaacctgcacattgtgcacatgtaccccagaacttaaagtataataaaaaaataaataaataaaatacagcaaaaataaawaaaaaagaataatcaatggatgctaagtctgggagggaaatttttataagatattttcatggttgtaaatgtctttctgtggattgcttataacttgcaagggcaaaataatagactagagagttgagaaattggacaaccccttactagcttatcagagttaacatcagcagtgaggataaaatgaacattatgtactagttcagtactatacctagcattctgactatgggtatctagctctaatctgataatgaggaagcattaaacaaatcccaaatgtggaacattctgtgttttttaaagggtctctgtattattcaaatatgtcagtttcatcaaacaaaatctgaggaatttttacttaaaatatacataatttcagatggtcaaaaactacctggagcaatagacacctttcgaygaaagtataatagctctgaggcttgccttgtgtacttgactatccccttcttggttgagcgttagttcatttattcctttctgtgtaccgggcactggagtgtattcagtgattattttctaaattgaatttctgaattacaattatcacagcagttataaaattaattttggtaatttcttatcaaaaattgtaattattaaggaacaattcacaaacacttttgccaaacgttaatcacttaagggctttttgtttttctctctcttacgaggagggagcattgaccttttaaaatgaagcaatatagagacaaagactatcaaataagtaaaaacaatctgagataactgaatttgaagcacagaagaaaaaacagatatgaaatcatttaaaaatagttttgaaatcttttaaatcacttaaataaccatgtgtctgatgtatggtatactgaaacttaagataatgcttatatgacagatgaagattgcctaagactgttacttaaacatgtaacaataggagtaaaagttgctttttggaatctgaggttggaaaatttcaaagagtttagaattaactttcaaaaaatttagctacatggttggcctgtcaaaacttatagtgtgacttcaaatcttatagtgtgacttcaaaatatgtctttgtcttttcaaccaaatgtattttgttatgttttgttatttgttcctactttcattgaatttaatcagaaaatttagtctgtaaaatcttttgaaaacattttgttaatcttgtctataacatcatatgttgtcttttctggatatttcttagacataacaacagtgaaattatttttactatttaaagaatacaacattttctctttgattatgcaattaagtattaaagtttatattagtaaattcctttactctctttactagctctaccccatataagagatacttgaagccttacattataattaagtttgctttgcatatttaatacctttgtatttagatactaggtttgatttctccagatatacarttgatatttctgtcacccaaatcatgctttttgttattaaatcatgtacttctttttattgcttttaatcctaaattcrtcctagcttgatactaatactacctgtcctgcttgcttttccttgaatttgttgtggatcttttctcccattcatgtatctccatcctttttgtttcactgtggtaggtcattgccaaaactatcatgctgagatcctctggttttcggacatagcaaatacatgatcacatatcctcagggaccagtaactgatatacatttatagtgtatcagtgtgtggttacgtgtttgatgactagtccttttgtgaaattagttggtaatgtagcagtgtggcatagtggatgttagttgttaaaactgaaaagtggttcattaaagacaatttgtttttttgtgataaaattgtgtaatttttttagggttttagtctgaggatacaagagtcataaaaagctaataaccttcactctcccaacctgtccatccagcgttttccttgaccttcactctggacagtttccccgacgttgctagcacttagctccaagtgaacaaactagagtaaaccccaaagccatgttttttgagttttcctgatttgatgctgtcttgttaaaacctggaggttatctattaagaatgtaattataaagcataatttgtatgtagtcaatatagtcattattttcaagcatcaaactcaatccttcattggaaaaattcctttactttctaagtgtgtacttgaaaatatagttggttttatttaactcagtctgtagcctcttatttttaacacaagaatttagtccattcaacatttgtatgctaaagtatgtcgctttattccttctactttgtttattaattttacctcttttttgtttgcttgagatggagtctcactctgtcacccaggctggcatgcagtggcatgatcttggctcactgcaacctccgccgccctggttcaagtgattctcctgcctcagtctcccgagtagctgggattacaggcgcgcaccgtcacgcctggctgatttttgtatttttagtagagatggggtttcaccgtgttggccaggctggtcttgaactcctgatcttgtgttccccctgcctcggcctcctaaagtgctgggattacagacatgagccaccaagcccggcctaattttacctctttaactttcctttttaaaaaattgtttctgtgtgataattggtattagttgcattttcctctttgttaacctgaactgtctattaacttttcattatattattggttacctttcctttccttatattcataatcagatatatttctctgttattacttgaaaataaagtaccaactctcccccaccaagatgttctttttttttttttttttttttttttgagacggagtctcactctgttggccaggctggagtgcagtggtgtaatcttggctcactgcaccctctgcctcccaggttcaagcagttctctgcctcagcctcctaagtagctgagattacaggtgcccgccaccatgcctggctaatttttgcatttttagtagagatggggtttcaccatcttgttcaggctcgtcttgagctcctgacctcgtgatgcacctgccttggcctcccaaagtcctgggattacaggtgtgatccactatgcccagcctcaagatgttcttttcatcctcccctcatcatatagaaattttagaatagtttctaataccttacctttcttcttactttagaagtctttggcatgcttttattctcaccacccattcccccctagcttttattggaaaattttactggaacattttccccaacccaatccctacaggtattactgaaaaaacttagtagtttttttttgtcgttgttgtttgtttgttttatgaatttctcttacagacatgaatgtcacttttatttcaagaatttttttgtttggatcttgttttgtttggatctaaattgtttggatctaaatttaaattgggttcaatttaaatttaatggcatttatatactgcaagatttgtcacctaccactttttccttttcttcattttctctttcttgttcacattcatttgttctttggagtaattttctcagatgggaatatatagatttttaatctgaattttttgcctaactgctaacgtcttcctttttccagacaggcaaatcatgtcttacctggatatagaattcttggggtgcagttcttttctccttctaattgccttttggctcctttacaggtttctgccaagaccagctcggtcatggagaccccaacccagtggcgctagagaaattaaagacacacacagaaatatagagtgtggagtggggaaatcaggggtctcataactttcagagctgagagcctcgaacagagatttacccatatatttattgacagcaagccagtgatgagcattgtttctatagattatagattaactaaaagtattccttatgggaaacaaaggratgggccaaaataaagggatgggtctggctagttatctgcagcaggaacatgtccttaaggcacagatcactcatgatattgtttgtggtttaagaacgcctttaagtggttttcctccctgggtaggccaggtgttccttgacctcattccagtaaacccacagccttcagcgggggcatcatggccatcacgaacatgtcacagtgctgcagacattttgtttatggccagtttaggggccagtttatggccagatttgggtgcctgttcccaacaagttactttattcccattttccttattggctcactggggctcaaatctggtttttggagtgctctaagtggtggcagtctacacaagaaggaaatatatgtgttctttatcttggtggatcataactggagaaatgttccctacatcctctactctgtaaagtgtttcatcttaggcttcaaatatgttcagcccataggaaggtcaggcacatgacctggggccaatgttgacctgatctctagggtttttagatttcagtggcctgtactcttctcaggatttgctaattttccaatctttgtctttagggtcttctcaatcatttcccctgctaggaagccctcgaatttcatacctcactttactcagtagacacttggattcacaggctgatattttggagttgggtatgaggagaagtcagacatgtttagatttatcatcttcctaggatccttaatagtttatttttaatttccaagtagtctttgtcttctcttttttgactttattgtttcttttcttattttataaattatgacaagaatgttctgaacaattcccttctagggaggagatgggcagaataaagattttctttatggtctaatgccatatgttctattttaacttctatttgtaatcatccttacatttgtcaaggcctttttaacccgtactttctaaatatctgaatctagagtgaaaccctgtccctagtaagaagctcagagtattcagctactcctctgtttttgctgctctttgtcagtataatctatgattttagataaaatcatgtatattgtgtttttattttctttcaaaaagttttcttgcatttatattttaattatataattctatttttaacaattatttaaatcattactatttaaacggttgcattttgggtggattaatatttaacaattatttaaacttttctgtattttaattggaattggtattgacagtcatttcatacccagctttattcctttttcagaacttttctatcagttcaagtagttttatataattttttttttttttgagacaggggtctcactctgttgcctaggctagagtgcagtggtgtgaacacagctcactgcagcctcaacctcccaggctccagcagtcctcctgcctttgggctcctgagtagctgggactacaggcacatgccaccacacatggctaatttttaaatttttgtagagatagggtctcactgtgttgcctaggctgttctcaactcctaggctcaagcagtcctcctgcctcaacctcccaaagtgctaggtgtgagccactgtgcctggccttagattatgttggtaaggagtaagtttattattttttcataaccattatttcttcttatgtcttcctaaacaggaatgtttccattatggtgtaatttgcaaaaatatataattaccttaattttagggggaaataaaagataacattacagcagctttcactgatttgtttttttaaaagttaatttgaaatattaattctatttatatttatttttacaagaagctttttctccaaagagtatataaagacattttttgcttttagaatcttgataatatctgtaggatcatcagaaacgtttagattatgaaatctttttttattttttaaaatttttgtgggtacatagtaggtgtttatatttatgaggtacatgagatgttttgatacaggcatgcaatatgaaataagtacatcatggagaatggggtgtccatcccctcaagcattcctttggtttacagataatccagttacattctttaagttattttaaaatgtacaattaagtttagatggtgaaatcttgaaatgtggagaattcccacttctaaaaacatatttgtcttcctaagtttgtattgtatatatattcaaaaagagtatttttcatgacattgctttagtctactacaagaacaattgtttatagtaaaaatattactaagccttggtaaaatgaagcagttatattgtagtctggtggcttatatttgatataattgtaggtggaatttttaaaattagcaatttgttatagtttgctctattaagatttagcctaaagtatttatgaaattcctatatttttattgctagacactccaagttcaaatacttgtttatatcctcaggataaagaaggaaagatttgagctttttagccactgtacatttcttaattaaaaccagtgaggaataaattaaatagctctgattattaaaataattgtgaaataattagtaatagaattatatttctttaacttgcacagtctgttttgaaccaagtcatttaatttggtttaaagagttaattatgatgagaggatatttaatatcctctagcatatgacagcttcaaaatataaatatggtaatttattataaaatgaagaaagctagggcacatcattgttaatgcagtccttttatctctggaaaatggaactcatattaagctttgactctcaagggagagaatatggggggagggtatggaagaggttactctattctttgtgtacatcagaaaactatcttagcaaactagacttccaagtttggaatgatgggattataggaacaattatgacaaaagatttttgcagagctacatacatatagtggtggagctagtggttgattttgattttattatattggcacctattatctatgacctctgtttaaaaaaattaaccttaattgtaggaaatgctttttactgtataataacaatttaagctgtagattttttaaatgcccatataacataccagcattgcctaatataaacactacagatttaacagttgtatttatattaaattattaccatgtattctttcaatagaaacctcttaccaatgagagggtttcagtatttacagctcaaagatgctttatgttcatattgataaatggaagccactacaggtttcagaaacatgttttcagtcatcaaatgaagtccaggtaatgtggccttttgaacagtacactgtattttcatttaattgtttgaaattgatactctaaattactatagttaatatgttagtatcaagaatatttttactgaccactatgcagttacatgagttatttaaatattcatcaaatttacttctttttggtagtgttctaatatttataagtcaagctggaatatgtagtatttagatttaaaaattgcatgagcatttaagtgggttcattgtagaaggcatagaccatatcacatggtctcaagggagtgtagaataaattaactgtaaattacgtgaattcattactaaggaacaaagacctttattcatctttttcagaatctattttatggaaaagaaaaaaatggactggcttacttgtcttcaatttacttttaaactttcattgttctaagtagcagtgctagttataactgattcatcactattcagtaagcatttattgaaaaccatctatgtgcaaaccacattgttaggtgctgtgaataaaacgatggataagccctatcctggaggagtgaaaacctgactaggatggcagatataaataactattactgtgccaaatgctatactattagagtaagtaaggttagtgaaggagcctagacaattttatatattccacatataaaacagaaaaaatgtaaggtaaaatatgaaaacattktcattgttagtaataggaccaagaaggttccagagaagatggttcacttgaataaaactttataaatatgtaggaatgacattcaagacagaaagcatagcctgaaagaaggcgtggaactcgggaatgtttatctaataactagagttaatggaagtaaataaatcaggccaggatcacactgtgatagatcaggaaagccagagtaaggaattaggacttaccctggagaggtagtgaacagtagtaaatggaattgatattatctgtattttagaaggaactggctaggagatagagactgtcaacatattccaaccagtttcataagccagaaacctgtggaccatctttgcctccctcacctgacgatccaatgaggtactgtcagttttgcttcctagatactgcttaaatctattgacttgcctctgttctgtagacatgatcgttattcaaacttgcattatattgcctggactaatgtggtagcctctaactggtcttaccatattacccttgctctcactagttactacattgtttgacattactagaacgctgctatctcccaccccaacccccttctttttcattaatatttagtatttgcctggtgtagtgggttgaattgtgtctctcagaaaggtatgttgaaatcctaacccctggtacctgtgaatgtgaccctatttggaaataggtttgttgcaggtgtaattaagatgtaagttaagatgagctcatactggagtaggatgggcctttaatccaatgactcatgtccttataaagaaggaagacacagagagattatacatgaggggagaatgtcttgtgactatggaggcagagactgaagtgctatagctgcacgtcaagaaacacaaaggattgccagtgaaccaccagtaattaggaagaggcaagaaagcattcttccctacaggtgttggagggaacatggtcctgtctacatcttgattatcagacatctggcctccagaactgtgacataataaatttttgttgttttaagccgtccactttgttgtggtttgctatgaaagttttggtaaactaatactcttggtatacattgttttattttttagctttcagtatttctctccttatatttagatctcttgtgaacagcatttatctggatttattttttattgttgttactcattgacagtcttcataaatggagcatttcatccatttacacttaattaatcataagtaatgaatttttgccatcttattttgtgttatttgtcctactttttctatacttttccctctttcttgccttttattttgatttttttccttatttttttttccctgctcaatttaaagtcatactttgaaatgttggagttttcttggtgattaccctagaaattttagcacgcacatctaactctttaaatctaaagttaacatttatacttttccaagaaatgtaatcctttccaagttacgtttgtatttcttctattatagcccacaataccttattatttttgttacatacagtcaatatttgattgcttttcctacatatttacaacttcttttgctrtgtgttccttctattacttcagattttctgccagtagttacattctttaacatttcttttggctctgctggtagcaagttcagttgttttagtgacagtctttattctatcctatttattggatattgaattctaagtaaacagttattttttcttcagcatatagacagttttattccagtatcttctgactttccttgttgctgtcgacaaatcagctgttcgtatagttgtcttcttaccccaaaagaaaggtaacctttcttttctttgttcttgtttttaagattcaatctttgtatttgatgtactgtagatttactatgatgagcctcggtatggattttttttttccccaactggaacttattaggcttgtggaaagtgcattacattgtttttcatcatttctgagcttttcctgctattatttcttcaaatattacttttccccattttttttcttctttgcttccggcatttcacttgattaattggttaaacaaataaatattttctgtatttgcagttactattttaggagcttgtgatatattcatgcaaaatcagatccctgattcatggaacttacattttatttaagagagacagacaataaacataacaaataagtaaattagataatatgttgaaagctaaatcagtatttgtaaaaaaattaagtataataaggggttgagtgttccagtttgaaggggaggagtgacaaattaaaatattttaagtcccattgataaagtaagatttgagcaaatagttgaagaaagtgagggagttagccaagcagatagtagatatgagggagaagcaccagatggaagaaatagctggagcaaaagatcctgtataggccttggagcctgtgtggcaagagatgactaagtgaaggagggagagagaagtagaagagatcgggccctgtattatctcatcttatggctactgttagggcttcagctcatactctgagggaagtaggaggcattgctgggtttcaggatgataactgacattcgatttgactttttttttcttttaatttccctttgagaatccctcttggataggaaagggtcaggaaagagttcattgtaggaatccaggcaagagttcttgtgactaggatggtaacattagtaatggtgagaaacagtcagattctggatcaaaagatccagaaggtgtagtgtagtgattttctttactgtgttagtttagttaaactaaaattgcgttttccagaattctcttccttgtgtggtactagatgatagctagccttgagaaatgtgtgatacttggaaggcaaaaataaaacagcagtcattacattcagatatatacataatcattgctctgttggcttacctgttagcttctgtgagtcatgggccaaatgaatgtatagctccataggaaagggaaacagattcttctgcaggtcatctacagcatcaggtttagataagattgaaaacagacttgggttccagtttgtctccatcagttccagtttgttctcaggcattgcagtttgtcctattttatgtccaggctttcttcccaactgtctgccctgctgtcatagactttaggctcaccatcaaacacggggatacaggcttttatagacttcttcacaagctcccattaatggtctctggttagaagtatttttctgatcctccaactatctccttcaggatctttactccctcgcttctaccacagtagtataaggcctaactcttataataaactcctgattctatatcactggatggttctgcttcctagattaaagcgtaagtggtatattgagctgacagatttgagaragaggagccatgattaattccatagggaagaatgtgggatgagtggtttgggaaaaaggttgaggtttataattgttcacagccatttgagatttatatgatgtatgtatgtgcaggacggactgataattaaatgggaatgtgatagatatcaccattcctgcttctttcaaattttgatgcccaccccctgccccaacacaatattgcttttggattactattttgccaggcaaaggaagttcctagagcttttctttatctctttctactataatgacccttaacccatgtgtaagagagtgcctatggggattctgccrgttattaagtatgtctattccaattatacattcaggaataggagaaagtaccacagggtgagtctgtggactgactgggtctgctatgggtcaaacttgtgttaagacttcacccatcacctgatttctttaagtcttcactttgatgtgttgtgtcatagtagcgtgttgtgccccaagagttggcatcacttccctggaatcagtatagagtatttctgaaaggtctggatattaatttttctccatgacataatcattctagtacaggggtgcccaacccccaggccagaccagtataggtctgtggcctgttagaaccaagctgcaacagcaggaggtaagtggcggaggagcaagcattaacacctgagctctacctcctgtcagatcagtggcggtattagattctcataggagcacaaaccccatcgtgaactgctcatgcaagggatctaagttgygtgctccttatgagaatctaactaatgcctgatgatttgacatgaaatyttccccaaagcattcccccaccmacatttgtggaaaaatcatcttacataaaactggttcctggtgccaaaaaggttgaggaccgctgctctagtagatagcaataggcccttctggggatgatttggtacataatttaaagcatatacttgtggcaaaactacagggtctttctgcaaggggacctggcctccccttgcatcaggggcctttgggtgttgggactgacttrtatctgaaaactgggtaagaggggagtggcaggccacagctggaccacagggagcagccagttggttgtgaagaaacttgctggaaaatgttggaaaatcagagttggtctgctagaagccactctttggtggtggggaaatttgccatagaataccggcaggctagagctggtctgctagagccttgcaggtgagtgccaccaggcttcccacacaatatttagctgacaactgcatcatagaaaaacatccaaaccagaacccaggctatgcccttgtagtgtcccttcactgctctgtactcacaaagcctgacatttgtacctgctggcaaaggagcagggttacagggtcctgatcttgtatcacaaagcagggcaagagggtagctttggaaataagaggcagtaaattgataacttccacaattaaaattgataactggtacagttatatttgaagtatataagggggccaagttattattttgaaagccagggcaagaatctagcctttttttcttctgctttttttttttaatacgacacatacttcagatagccaaatggtaagtttctttttatgaaagttttccagccatgtaatgaagaaggaataatagactatcaccattttgtaacttctaatgtatttagaccggcactcttctatagaaatatgtgagtcacacatgtaattaaatttttctagtaaccataataaaaagtagaaacaggtgaaattaattccaataacatattttatttaactcaatatatctaaaatgttgtcatttcaacatcagtgtaatatgtatcaccccatgtgtcttttccctttgctgattttctgtgcatccttttgttgtaataacttgtaactgtgagtrcaacatctgagtcctttgagttcttctagggaatcctcgaacttgattcccaatacctcgatttggctttgtctggtactttctcataattagattgaggttacgcactttttgcaagaataccacagaaatgatgtgctgttttcagtgtgtcatatcagagtagatgatatagatatgtctcattactggtaatgttaaccttcatcactgttaaaggtggtatatgcggagtttctcttctttaaagttgctgctttcctttttctagttaataggttcttggagagtgtatgcaaatattctgtttctcctcaaactttctcctactagttgtagcttctattagcagatcctgcgtgcaaaaattatcactgcagtgttccttatggtaattttttatttccaggaaaaatactttgttttaacctctaaactgattagaactatatatacttagaaacaataagttggttttatttgtaaccaaaaatattcataatttgatgaatttccttagcttgttatttatattaagcatcatatttgtaatgtttcgttaacttcccaaatacttgaaatttatctcattttaattgtcatgatagcagatgattataatcctgagattttaagctactttctcctaaattactcatcttgtttagtatatgttataataacaatgcattgaaattctttgtcttattaagaatcaacctcatatcatagcataaaaaactattcatatgtaatagcagaaatcaggttttctagaggaaaagagctaatgtaatgattagttttctcttcttctattgtcttctgtatttataaagagtagtaagaacaggccgggcacggtggctcatgcctgttataccagcactttgagaggttgaggtgcatagatcacaaggtcaggagatcgagaatatcttggccaacatggtgaaacctcatctctactaaaaatacaaaaattagccgggcstgctggtgcgcgcctgtagtcttagctactctggaggctgaggtgggagaatcgcttaaacccgggaggtggaggttgcagtgagccaagatcaagccactgcactccagcctggatgacaagagcaaaactctgtctcaaaaaaataaataaataaataaaagaaaaataaaaaggagtaataagaacaatcctattcttaccaactattttagaatgattactagttgttgacaaagctgttttatttccttatgttaaatcatatagtcaggagatgatgaactcatgaaagcttgtttgataatgaaatttattgtatagtgacaaatgcaaatataaattcaacataaaatgtagcttaaatatggtatttttatttctttgggggaaaaaaggtgaagagtaccaacaaaatgtttttaggctttatactragccatttwtatttatcatttcaattcatcatactaaacctataaagtagatgttgttgctatcttcattaaaaataagtaaactattggcatggctgctgtggaaaacagtatggtcattcctcaaaaaattaaaaatagaattatcatatgatccagcaattctgcttctgaaaatgaggtttcaaagagatttataccctcatgtttatagcagcattattcacaatagctaaaatgtggaagggatatagtgtctgtagatgaatggttaagcaaaatgtggtatatacatacaatagaatattattcaaccttaaaaagataggaaattctgacatatgctacattgtgaatgaaccttcaggacattatgcaaaatgaaataagccagatacaaaaagacaagtactgtgtgattccatttatatgagatgcctagagacaggaagtagaatggtggtcaccaggggctggagggagtggggaatgggaagtcatttttcataggtgtagagtttcagttctacaaaacaaaacaaaacaaaacttatggagatgaatggtggtgatggttgtatgacattatgaatgtatttaataccaccgaactgttcacttaaaagtggttaagatgctacattttgttctgtatattttaccgtaataaaaaaaattggagaaaaaaacaagtaaacttctttaaagtggttcaggaacttgtctaaaatcacataagtcttaagtataggaattagtattcaaacaaatccttgttatactccaaaacttactccttttctatcatagtcatggttttcaaactgctccatgaacaatacagtgttttatttgagtgaagagtcttcactgcccttttgtgcatttttaatacaaaaattaatgtttacttcttatgttattatttcagatctagctttgggaaatatagcgtatcttcacatttggaaattgtaggactagccctgtaatgcctatttcttctgagacattgcttctgtaatccrtatctttttctccagatgaaaggtgacgtcttaaactgtgacttagcaagccacctatgcatttgccttgcatgtaaatataaataataggggtaacattctatttttcttccgaactataattctagaaaacttctctctaattgctactcataagcaccctttgaaaagtttttaaaatcacctttacactttaagtgaatgctgccaaacttcaacagttagctattgtaatgtaatctaatattggaattcatttagtgcttactggtaaattttctctcctacctgggactaactcttccaagccttgtcaatagatctgggtcacttagccacagcactctttgtcacaatcagagcatgccgtgacttctaacaagcctttctttcccccaacgtagtctcgcaacttttcctttgagattacaaaaggaaagatgaaagaagaacagattattgatggcaatgatttaaaaagctatcatgatatgttaacttgtcatgtaactgtrtgtgtaaacttcaaataatttttgaaacasatatgatatgagctagttgttttaggtcttttaaaaacattcttaaaagaaatgcctttccattgcatattttaaatatatttgaacagaactgattagcttttaaacaaaaagtcatttcctctcagttgtctgtgatttctctctttgggctattgaccttccctcctttttggaaggtaaatgctcaactttctacctttatccgatacatgttaaagtattgtttgttttggctttgctgtgtatatgtcctatttgtctgaatcagcatttttgctttacaccatatgcccatagaattcaggacctcttgtttttacagtgcagtgtcatcatgctgtaaaagaaaatgcatttaataaatgttttttaacatcagttaatgaagtatgtatgtttcagctttcttcttgtaatgttttagatttaggttatttttatgatctagatccttatgaaaagaacacacgatcctactaatagcaacggaaagatcaggtcgtcctaccagtcgataattatttggggttatttgcaattataaagctagtatatatttatgaggagatggagaaagaaaacaaaagttcagagccatgaaaaggaaaagtctgccccctacccattacccacatataaccactattaataattttttgtatctaattactcattaaatctcttgaaaatgtgctttcgaagacttcattgctggatgttggattgtgatgtcacatcatctttcagctttgtaatatggagcagtttttcatttcatttattttaaatttaaaaatttttgaaaataattttaacttttattttacattcaggaggtaattgtgcaggtttgtaacatggggtatattgtgtgatgctgaggtttggggtataattgatcttgtcacccaggtactgagcatagtactcaacagttttgcatccctttcccctctttctcccttcccttgagtcccccattgtctatggttaccatctttatgtccatgagtacccagtgtttagctcccacttataagtgagaacacgtggtattcggttttctgttctcacatttagaataatggccttcagcaatatccatgtcgctgcaaaggacatgatttccttcttttttatggctgcgtagtattccatggtgtatgtgtaccacattttctttatcgaatccactgttgatgggcacctatgtcgattccatgtcattgttattgtgaatagtgccacgatgaacaagtgagtgcatgtgtctttttggtaaaacaatgtcttttctttagatatatacccagtaaggggattgctgggtcaaatgatgattctgttttaagttctttcagaaatctccaaactattttccatgatggtcaaactaatttacgttctcatcaacagtgtacaagtgttccattttctctgcagcctaaccagcatctcataccagtcagaatggctattactaaaaagtcatttcatttcttttttttaaaaattttactttaagttccggaatgcgtgtgcagaacgtgcaggtttgttacataggtatatgtgtgccatggtagtttgcagcacctattgacccatccttgcctacgttccctcccctcgtcctccacccctcaacaggccttggtgtgtgttgttcccctccttgtgtccatgtgttctcattgttcaccttccacttatgagtgagaacatgcagtgtttggttttctgttcctgtgttagtttgctgagggtgatggcttccagcttcatccatgtccctgcaaaggacatgatctcattcatttttatggctgcatcttattcttattcttttcttttttctcttyctttcctttcttgtttttttgtttttttgagacagggtgtctgttacccaggctggagtgcagtgatttgatcacagctcactgcagccttgacctcccagactcaagtgatcctctttacctcagcctctcgagtagctgggaccacaggtgtgtgctactatgcttggctaattttttaattttttgtagagacgaggtcttactatgttgtccatgctggtctcaaattctgggctcaagcgattctcctgcctcggcccccccaaagtgctaggattaaaggcatgagccaccatgcctgatcccgttttcattttttgatcgcttttaattctgctgttccctttctgagcaggtgtaaactctagagtagccctcttgctttctcctgagtattctttcctacttgtttcacagaattcctttactttcttctcttagaattttctcttcctgcttctgaaaaaggaacattgtgattttaggaaaaatttgtttctctggaagaagagtaggatgatatctttggtgtcagcagaatggaagataactgataaatgaattttattgattcctctaagatggtattaattagtagacatattttatgtattactttaaaaaattaattctgctattccataaattatatctaaaggataaatcctcatgggagcttcatatagcagttcaaattttctatttgcttggtataataaaattaaacaatgttagtttagataaatggagcatgtgttaacatatatatatatatatatatatatatatatatatatatatatatatatatatatttttttcacaccagttacacgggagaaatatatcctaattccaaagtgtgaaatttgaactgacagaattataaacatttttaacattttaaagtattttcaatctgttctgtatgtgatgagatattttttgagcctgtctttgtcacatgttagaaaatagttcctaaaagcaaaagctctctaattactttcttgttttcatacataaacataagtttacttaaaatttttctgctctattattccagtgatgtttttctgtgtttctgtatttatttaatgatgcttttgaatttctttagtgttacaggaaagctgttttctcttagttttgccttctccctttgttcttcatttcccttgcttgcctcaaaaaaacacttaccagctggaagtgtttaaactgtgaattgctgggtattggcccaacatgaagaatcctctaatttaataagcwtcttagaagagttcttggttccataaatttgcttcaccttttgtcttaccagcttgttaataataagaatagtatcatttgtgtgtttaatgcttctaatatgcttgatttcccttgtatgtagtttatatacattatctcrtttaatcaagctttttaatgatttctgttggctacagtgaaaatttgagaaagtttttttatcttctttatataattgcatcacatacattaataacataaagtataaattggtgtcagttttctaaagtaaggaataattttaagatataattattttacattaagaattttaatttagtaattatttatacatcattcattttaaaatttcttttatgtgaatgcattatttcttcctgttttggaaggggkgtgtgtgtgtgtgtgtgtgtgtgtgtrtattttatttatagactttagtttccagaacagttttaaatttacagaaaaattgagtagatattaatagaacagaaagttcccatatacacctcttgggccccccacaaacagtgtaccctattattaacatggcacatttattacaattaatgaaccaatattggtatgttattatttatttattwatgttttgagacggggtctcactctgtcacccaggctggagtacagtggtgccatcttggctcactgcaacctctgcctgccaggttcaagagattctcttgcctcagccttctgagtagctaggacttacaggcatgtgccaccatgcccagctaatttttgtattatttggtagagacagggtttcacatgtttgccagacttggtgtgttatttttaactaaggtctgtagcttattcagatttccttagtttttacttgatgtcctttttcttttccaggatcccatctagaatactgcattacatttagttgtcatatctccttagggtactcttggctgtgacattttctcatactttccgcgtttttaatgacattgccagttgtgagaagcactgctcaaatgtattataggatgctcctcatttagaatttgtctcttgtttttctcataatcagacttggggtatgggtttagggaaagaagatcacagatgaagtgcgatttctatcacactgtatcaagagtacatactatgaacatgattttatgatttttgatgttgaccttgaccacctggctaaagtagggtttgtgagttttctccattttaaagataacccatttcttcctccttttcatactgtactctttggaaggaaatcactatgtgaagcctacacttaaacactgaaaagttacactctccccttcttagggtactgtacaattctttttatacattgttggatttaacattggtaataatttgttgaggatatttgcattcatgtttgtcttagtctccttgagctaccataacaaaataccatagactgggtgccttaaacaacagaaatctattttcttatagttctagagactgaaatttcaagattacagcagggttggtgtttggcaagggttctgccccttgagtcgcggatgctctcttcttactgtgtattcacatggcacaaggggaggaggaaaacactctctgctgtcttttcttataagacttctaatcctattgtatcaggaccccacccttgtgacctcatttactcttaattacttcgtaagaggccgtattttcaaatatagctaagggcgttagggcttcaacatatgaatttggggaggggggacagacattcagccctgcctcccttcccccaatttatatcgttctcacatgaaaaatacattcattttatcccaagtcttaattcattccagcatcaaccctaaagttcaaagtctcatctaaatatcatctaaagtggaaaggggtaagactcgaggtatgattcgtcctgagacaaaattctctctagctgtgaatctgtgaaactagcaagtactactaaaatatggtggtgggacaggcataggataaacattcccattctaagaaggagaaatcagtctatggccataccaccctgaagtgcctaatctcgtctaagaaggagaaatcagaaggaagaaaggggtgttatgtcccaaacaagtccaaaacctatcgaggaaattccattagatcttgaggtttgaaaataatctctttgatttcatgctgtgcctttcagaacaactggctttgccttctggatccactgggatggcagccccacctccatagactcctgcctccaaggctcctgggtagcaataacctagcttgttgaaaccatgaaggaaatcatccttgccctttaagactgtggtgagaatggcagctctctgatgatctctaaatcacatttggtgttgttactttttcttgaaggataatgcatgttcaccacctgatggttgtatgtttccatcttgtagaatccatgaagtctgccttccttcattcagtcctttacagttcacactggcagtgtatctgctcagataatttcgtagtctctttactgagtggtagtacaggcacaaccttggtgttctcctcagaaagccctcatcttttgaaatatgaacagacmgaatttgccacatctttaagttctggttcttttttgcctaacagtagctttatttctctttctcttgcattttactataagccataaggagtaaccaagcttctcttttaatactttgtttaggtatctcctcytaaatgatggagacacctaaacaaagtattagagaagttagttatcattctcctgagtgaatatccaatttcattgactgcgagttctacattgcacacattcagtttatgacaatgttcttgagagacactcatctgtagttttgctttatcatgtttatctgattttggtattaaggtaatgttctcatagaatgagttaggaagtatcctctctgcttctattttctgaaacagattatagaaaattgatgtcatttcttaaatgtttgtataatacacccastgaaaatatctgggcctagtgctttatttttggaaaggttawttataggttcaatttttaaaataaatattggccttgttagattatctgtttctccttctatgacttttggtagcttgtgcctttcaaagaattgatccactttatctaaattatcaaattagtgagcatagagtgttcttagtgttcttttattatccttttaatatccatgtgattaatagtgatgtcccttctttcacttatggtattggtaaatgtatgccttctgtttttttcttcttgattagtctggctagagatttatcaatttataaaaatcttttcaaataaccaaggctttggttttattgatattctctgttgttcctgttttcaagttcattgrtttctgccctaatttttattatttctttttttctgagtgctttaaggttaaattgctcgttctctagaattttcaaaaatagaagcttgtttctggttttagatcttttcaaataaatgccttcaatgctgtaaatttccctgaaatcactgctttgactgcatcccacaaattttggcaagtttgtattttcattttaatttagttcaaaatattttaacatttctcttgactgmtttttctttttctttctttctttttttttttttttaacactcgtgttattctgaagtaagttgtttaatctccaaatattctgggattttccagcgtctttctgttactgacttctagttgaattccattatcatctgaaaaaaaccttaaatttgttatggtgtattttgtggcccagaatgtgtctgtcttttagaatgttccatgagagtttgagaaaaatatttattctgctattgttggatgaattattctataaatgtcagctgaattcagtcgattagtgttgctcatcaactcaacaacatttttactgctttcctgcctgttagatctatcagttactaaaaaggggatgttgagatttctagctacataacagtggatttgcttctcttttaattccattagtttttgcctcatatattttgatgttctatttttaggcacatgcatattaaggattgttatgtcttcttggagaattgacccgtttatcattaagtaatactccactttatccctggttatttcctattctgaagtctatttcatttgaaattaataaatacagatgctcctcagcttatggtggggttacttcccaatatacttattgtaagttgaaaatactgttaagtcaaaaatgcatttaatacacctaacctgtgtaaccaccacagcttagcctagcctgccttaaatgtgttcagagcacttgcattagcttatggtcaaaatcatctaacacaaaagcctgttttataatgtgtcgactatttcatgtagcttattgaatactgtagtgaaagtgaaacacagaatggttgtataggtactcaaagtatactttctgctgaatgcatgttgcttgtacgtcaccatagtgttgaaaaattgtcatttcaactgtcgttaagtcaggaaccatctgtactccaaccttsttttggttagttttaacttggtacgtatttctccatctcttttcacttacctgcatctttatgtctaaaatgggtttcttatagaaaatattagttgggtctttttaaaaaaaatcttctctgacagtctctgttttttaattaatatgtttaggtccttaacrgttgaagtgaattttgatatcgttggattaatatcaaccatgtttatatctgttttttatttgttgtacttgttcttttcatttttaaaatcttctctttttctgacatctctggttgaaattgaacattttatattattccattttctctcttctcttaatatataaattatacttcagttttttttaagtggttgtcctagggtttgcaatatacatttacaagtaatctatatctgctttctaataacaatacagtgctttgtgggtagtgcttgtgccttgtaacagagtatctcagttcctccctttcatcccttataacattattgtcatttatttcactgaactatatgctgtaattgccccatacattatcactgttattactttgaatagacagttatttacttctgactaagaataagaaaagcaaaatattttatattaccgtcatttattccttctttaacattctgtttcattatgtagatttgagtttctgacctgtatcttttttttctctctgttaagaacttctttttaatacttttttcaggacaggtcttctggtaaggaattccttcagtttttgtctgagaaaatttttgtccttttgaaggttaattttgctggatacagaattcaaggttgttgggtttttttttttcctttcaacactttgaattttaagacactgtcttcttgtttgcatgatttctgagaagtctgatgcgattcttgttatgtactcttaccctctataggtgagaggagtttttcctctggtttcctttaaggttttctctttgtctttgattttttgtagtttaaatataatgtgcctgtgtgtagattttttcagtttttatcctgctcggtgattgttttttttcttttttagcttcctggatctgtagtttgatatttatcattaattttggaaaattcttggccattattacttatatttattctgcttcagtcgtttttcttctccttttggtattctagttacatttttaaaccttttaaaatcatcccacagttcttggaatatgctattcttttttttgctctttgcatttgggacatttcttttttcttttttttggagsgggggtggggggtgaagacagagtctctctctgttgctcaagcttcagtggcacagattaggttcactgcagcctcaacctcctgggctcaaacaatccttccacctcagccttcttccaagtagctgggactacagggatgcaccacaacacctggctgatttttgtatttttcgtagagatggggttttgccatgttgcccaggctgatctcaaactcctgaggtcaagccatccccacccagcttggccttccaaagtgctgggattacaggtgtgaactgctgcaccctgccaagttctgttttcaacctactgatgagcctatcataggcattcttcatttctcttgcagtgaatttgacttactgtatttcctttcttcatttttttgttagtgtggtamaatataaaaactgtaaaatttagtatcttaatcatttttaagtgtacaattcagtagtagtataaatacattcctaatattatgccaccatcacaaccatccatctctagaactttttttatcctgtgaaactgaaactctgtaacccattaaacattgacttcccattgcttcctcctccagcccctggctttctactttccatctatgattttgaattggcttatttcatttagcataatatcctcaaggttcattcatgatgtggtatatgtcagaatttccttcctttttaaggccaaataatattcaattatatctatataccacattttacttattcatttgtcaatgcacactcaggctgcttccacattttagctattgtgaataatgctattatgagcatgggtttacaaatatgtctttaacacacagtttttagttattttgggtaaatacccagaagtggaatctggatcataagccaattctatttttaattttttaaggaactgccatactgttttttgcagtggctgtaccattgtacattcccagcagcagtgcccatatccttgccaacatggttttctgttcttttgataatagccatcctaatgggtgtaaactgggatctcattgtagtttggatttgcatttccataatggtagtgattttgaacacttttcatgtgcttcttggcaatttgtatgtcttttttggagaaatgtttattcacatcctttgtccatttttggatcaggttttttgttattgctgttgagttttaaatgtctctatacagttgatccttgagcaacacaggtttgaactgtgtgagtctacttaacttggattttctcctgcctctgccacccctgagacagcaagaccaaccctcctcttcttccatctcctcagcctacttgacatgaagatgatgaggatgaagacctttatgatgactcacttccacttagtgaatagtaaatatatatatatgttctcttccttatgattttttaacattttctttcctttagcctactttattttaagaatatagtatataatacatatacaaaatatatgttaattgattatgttattggtaaggcttctggtcaacagcaggctattagtagttaagttttgggggaatcaaaagttacatgtggattttcagctgcatgggaggtcagtgcccctgacattgttcaaaggtcagctgtattcttgatgttaaacctttattggatatatgatttgcaattttttttccatctgtaggttgccttttgccctgtcgatggtatcttttggtgaatacatcttaaaatctttctgtgaagtccagtttgtttattttttattrttgtatattttcttttcattcattcttagagtttccatctctctgctgacattaacaatttgttcttgcatactatctatccattagagttcttgacatattaattgttgttactttaaaatcactatctcattccataatttatgttatatctgagtctggttcaggtgtttgctttgtctcttcagactgtggtttttcctgcctgttagcatacattgtgattattttgttgaatgctggacatagtgtataatattttggataataggaagtgaagtagattggcctttagtttgaggtttcttttagtctagctaagacctgtgggctgtgtttactgttttgctgcacatgtagatgccatcagctttttgttttttgttttgtccttgtttttatgtttttttgggggggcttttattctttcctttgttgtttttgggttctctaagaactttttcttaaatagagtctctgtgttgtagctctttcatttgtaatctattttaattcttctggagcccttttggtgtagtggtaaggtgtcagggaggggaggggaagtgttctacaatcctatgacaaaatatcagtcttttaggaggcttgcattcctgggctgtgaccttagtgtttcttaggttttttgtttgtttgttttggcctcttagatgagacaraagactagacagggctggaggtggttactttcccttccctcagatcagataagccattgttatattagtttcccttgagggcaggcctttgttatgttgaatgatctgggcacatttgtaaatacagtcatgctggtgggatgtccttaggagatttctccttgtgtgaacattatagagtgtcctagatgagggatccccaactcccaggccacagacccgtaccagtccatggcctgttaggaactgggctgcgcagcaggaggtgagcattaccgcctgagctccgcctgctgtcagatcagtggcagccttagattcttgttgtaagtaaagttttggtgccgcaagagaaataacacttgaatataaaattttctttttaattctgagcaaggcaaggtacttctatagaagggtgcgcccttacagatggagcaatggtgagcacacagttggacaagggatgggaagaggttcttatccctgactcatgtggcccctgctgctgtgtcattcacctattggctagggttagatggcacagactaaactaattccaattggctaatttaaagagagtgacagggtgagtggtttggcgggaaaaatggttattacagagcaggtaatgggaatgagtcagggtggagcaggtaatccaaaaaggttgctttttgaggaagttaagtttaaaagtagaaggcaaagaattttacatattgacatattgattatttgaaaagaaatttggaactcatatctaacaacccctcctcttgcatttcctaacaaactttttaacatgtcttggcttagttgttctgcttgattttccaaaagaagcttctctggataaggtggaggacagttaaggaaggttttagtaagtgccatttttatgagcctstgcaccaacccacagatgcatggtgtgacacagcacctgacaagaataaatacacccattacagctgcgagggaaggaagaattgaggatattattcttttccatttaccaaaccacttttctagccattctgtaaaggggtcatttacccctgagttgttggctaactcattggacagagcagtcagaccttgcaatgcctttgttatacttccatcaggggcggtgttgtttgggatgacggtataacattgagttttaatcatgacacaaactcctctttttgctaatatcatgtctaagcctatcacaattttcccaagccatctggctagtatcccctaattgctcagctattctttaacaacatctctagtgtagttaataaatcgctgttggttataatagatgtagtttatccaatctacatttttattaattgtcacccaccaagatattgactcaaatcctgcagctatttgatttcgggctttaaattgatctggtactccccttgggactctaattgtgtctaaatagatgtgagagtcaaaagacccataaggggcttcttttgctttatgatgtctttttttttttttttttctttttctggttgatgaaatgccagggtaaaagggatagccaattggactaaagcataagtgccactttrgttacttgacagtgtccagtaaaggtccatcataataccactacacatctactcagggatgaataaggactgattggtaagcttttgaaaatttttaagctcactgcatcccttcaggtctccaaggaactctaagtttcctgcctgtcgtgagagacacaaagtgagcttagtgttgggagatggaagctggatggccctcagggctgacccgcagggtgtcggactttgacatatagcagagagcgagcttggcatgatgtgttactccaggcggtagaatcctggaaaagagctaccatgcagcccacgcccggtcgactggaggaccaccctagtggaaaggggacaatctgggcctctggcctgccatgcatacaagcataacaattgcttttgtttaacgtgcggagggaatatttgatctatttcaaccaggcatttgcatcttagtattgtctcaattgccaaagtttgttttaagtctttaacttctacaatagctattttggtcttgttgttagacagaggaggagaaattcttccgttgtaaaaggttttggaagaaggcttagaggaaggtacaggcagcgggggattaaagaaacacatttcaaagaatctaatagggtctgtccctgaaacctcagcccccatatcataaaactggcttaaagaagggaaccaacttagaaaaggggaagaactttgagggtttaagataataacctgtataggattacactggtttagcttacagttgggggayagctgtccctctagtaaaatgaatgtatggttttaggaaattacaaaaaccagttggagcagtctattcttgctctttagtggtccacagaactttggaccagctacagcataaaagctctacattggtgggacaagactcctggttgacactggggtctttatcaaaatctccccggattaaatggtcccaattctctaatgcccagtctgacgagagtcaggagggacagaggwacttttctgaagtagagagctgtctttgccttggcaagtccccacagggtataacaaggcaagcattaaatgcaaaagtttgaagcaaaattgacttggttatgttaataactagatggtcagcaatagagtgaggaaagaagaaagagtattagaatagaagaaagagagagagttaaatttttcttagctttagtttggtagggttttcccttgggactatggcccatgaccctggaggggacggtgctttcttgactcgggtgtgatgagtccatcccctttccactataggaacagcattatcggtggttagcagcacaaggtagggtccttcccgggctgactygagttttccttctttccaccctttgatgagaacgtgatcctcaggctggtgctagtttaccrgaaattctaggggtggtacctctgctaaaagatttttagttttgaggtaaaggccaagtggcagataaaccaagtatataatttctaagaaactgaccttttgttttaaatgtggggacatcagcagtggactttatagtccttggtgccttcttactgagaaatttcctttagcacctatttttattagtttttagaccaaaaaaagccaaacaccattttatatttgacaatgcttcctgtatgatttttataccagataagctaaatttcacctttatattagtgtgttattaatgttaaactcaattttaataaaaccttgtagacctatttatccaattttaatgtctgaccataaagtaagatttttatagactccttttaaccttttataatttttgttaaagagcaggttagtgctttaagaaaaacctgttgtgcttttattttaatgtccagttcacagaaaaactggatgatacacctttaactttagccaatatgtttacacacagaattaccttcacaattaacatttcaaaacttgcttaaacctttaaaagaaaaaattttttaaccttttaatgtatgtaaaaatccacattcttatgcctacttataatccttttaccaaagatgtattttactttccttatacaccttgcacattcactgtttcttcaatagttttacattcaggaggcctaattacttttaaattatgcaacattttttgcataaattccgttttataacttttttttcacgacttttacaattctttgacatgcctcaactttctgacttgttgcaaacatccctttctttaaacaaccagttattttaggacaaaaatttaccatataacattcctttttacataaattctccccccccacccctttttttccccagagatgataatcattcttttccaaagtgaacttccttcatgtctgtggactagaccgtctaaggccacaagattagaagttaggataatgcatgttacactgttaacttttagcaaactttacttttgttgaaaaccttgtaagtttgggatttcaattattctttgcttttaataagacctcattcagtccatattaacttagaattggtatagatgggtctttcctgattctgtagtactttaaggcttggctgagtgcaaatatgccacacatttgagcagactaattattaggcacttttcctaactctgcttctacaagagtttccttatcacttactgaatacccattgtgtctttttccttcagtcacccaggaggaaccatctatcctcctgtcctgaagggarwwcctcctaggtttggtcggacctttgtatggtaattaagatttagatcccatgttaggaaacctgctgggttaagggaattttcagtggttaatgttaaatcatctttttctaatggaatagccttatactttaaagttcttaagtcagtaagctacctttttgcttttttttttttttttttttttttggacttaggatagttctgacctgatgtggtgtgctcacaatgaggtttcctctaaaagttgtttttctactttcttctgttaggagagcagttgccggtacagattgaatgcatttaggccatccgtgggttactgggttaaggatttttgataggaaggctatggattgtcagtggcctcagtgctttcgggctatgcccttatttacactgacaacaaggtggtattggagtgttacagggtcatagagaagaccttcaattatcaattataggttttaaatttaccctggcttttaaaggaataggatacactcttttctctttactacttctatctctctatctctctttgactctctgtctctctctctctctctgatttcctctttgtctttctctttatctctccgcctgtctctctctttctctctctctctccctctgactctctgtctctttctctctgtttctctctgatttcctctcccagtttctctttcctctttgctggtctttccctgcctgtgccagccgcttatgctgctgttctcccctctccttccccttcccctaggggagggactggctggagtggagctactctttcttcccctgagaagaaaggaaaggggggttctgaatatttttcttactaccggaggtttgtgtgaggttcaacccccactcatggggatttctcacctctttttgagattyaactccccctcatggggatttctcacctctttctgaggttcaacaccccgccccccatggggatttctcacctctttctgagtttcaaccccctcctgaatggagatctctcacctctttttaacctccaagacatcccaactgaggaatacttcaccaccccctgtggctttctttccctagtcctgactaaggaatgctttaccgcccctgcggtttctctctccttggtatgtcttaaccaaggaatgctttaccaccctgcagctttttcctyagtcccaaccaccaaggaaatacttcaccatctgcaacatccttccttggtctgtacacagaatcatcatggcagtatatgaggatcctttaagctaggtttctggccagtttctttccacgttgctgagggcttgggttattcctcacactgggtgggtcctgatttctcacccctgaggctgccacaagggggcgggccacgcctcctcacgagagacaaccagagaccgccccgggaagggaatgtaatccccggccagccccggaattgttataagtgaagttttggtgccacaaaagaaatagcacttgaatataaaattttctttttaattctcagcaaggcaaggtacttctatagaagggtgtgcccttacacatggagcaatggtgagcgcacacttgggcaagggaggggaaggggttcttatccgtgaccatgtggcccctgctgctgtgtccttcccctattggttagggttagatggcacaggctaaagtgattctgattggctaatttaaaaagagtgacaggatgagtggtttggcgggaaaaatggttatgacagagcaggtaatgggaatgagtcagggtggagcaggtaatcgaaaaaggttgctttacgaggaagttaagtttaaaagtagaagacgaggaattgaacatactgacatattgattctttgaaaagaaatttagaactcatgcctgacaattctcaaaagagcaggaactctattatgaactgcacgtgtgagggatctaggtcatgtgctccttatgatctgaggtggaagagtttcatccagaaaccatctcccccttcccctgtctgtggaaaaattttcttccatgaaactagtgcctggtgccaaaaaggttggggatcactgtcctagatggtataacctaccacacacctaggctatatggcatagcggattgctcctaggctacaaatgtgtacagcatrttactatactaaatattgtaggcaattgtaacacaattgtatttacatattataacatatctaaacaagaaatcgtacagtaaaaataaggtacaaaagattttttaaaatggtacacctgtatcaggcacctaatagaacttgcaggactggaagttgctctgggtaagtcagtgagtggtgagtgagtgtgaaggcctatgacattactacatactcctgtagattttataaacacwgcacacttcggctacactaaatttatttaaaagttttcttcaacaataaattaaccttagctcactataacttttttactttacaaacttttaggatttttttttaaaccttttgactcttttgtaaaaagagttaggttaaaacccaaacacggctgagcgcggtggctcacgcctgtaatcttatcactttgggaggctgaggcaggyggatcacctgaggccaggagcttgagaccagcctggccaacatggtgaaatcccgtctctactaaaaatacaaaaattagccgggcatggtggggcgtgcttgtaatcccagctactggggaggctgaggcaggagaatcgcttgaacctgggaggcggaggttgcaatgagcccacattgcaccactgcactccagtctgggtgacagagcgagactctgcctcaaaagacaaaaaacaaaacccaaacacattgtagaactgtataaaaatattttctttcttgatatccttattctataagatttttatattttcaaaatttttaatttttaatgctttttaatttttcaattttacttttttgttaaaaactaagatgttgcaggtagtgactatctggggctggtgacacaggtggtaaaggaatttatcaggacaactgtaggtaaagaaaggtagatttattagagaaagtatgaaaataatgttgcaaagtagcaacgggcagcacagcagagaaggggctgtctgcaaagaggcaggggctgtagagaagttttatagggttgtactgagggggctgcatgggtcattgagttatcaggttgtttgtgattagccatctgtcagaagaattgttcgttgttctttcctacctggggctccttcctcattgttgcttacttatcagaactccacataagacacaaacacacacattagcctaggctatatagggtcaggataatcagtttcactgtttgtcacctccacatcatgtttggtttggaggtcttcagggccagtaacacacgtggaactgaaatctataacaatgccatgttctggaatacctcctgaaggacctgtctgagttaatctctaagttaactttttgttgttgctgttaaataagtagaaggaatacattctaaaataacaatacaaatacactattgtaaatacaaaagctagtaacattttcattactatcaagtgttaggtactgtacataattatatatgctgtacttttgtacagctggcagcccagtaggtttgtttataccagcgttaccacaaacatgtgaataatgcattgcactatgatgttatgatgtcactagatgataggaatttttcagcttcattataatcttatgggaccacctttgataaccgtatatcgttgttccaaacattgttatgaggctcatgactatagttacttttcttctcccactttcttatatgtgaggggatttttcttggatctttcatgtgaaaaccttgtcaaaagcctggaaataaaacccgtcaaaatattaaggttgccctaagactaggtcaccagcaactttttactaccaagtaatccatactcacttccagtaatttgtcaaaattatcatgtaagtgttcttaccatttattatgactccagcagcttttgttcaagatacgctgatctgtgctgttcttggctatgattctttctcttctcctgtgtctttagattttagggtgacagtgtgccctgtgatctgaattctctgatgagtcttagaaaagtcatgtatttttggtttatctttttttcttgttttagagtgggaatgatgacttgcacactctgttacatgttgtagctgaaaaccaaagtctgtgttcttaaaatttgtatatatttgttctgtatttcctaatgatcacctctttaattgcttaatgaaaaaatacaagtgactagatggtagatctgagttttacaataacttgaatttactctaaacattttgctaatgacattggcctatttaaacgcagtcttagaattgttttttccttggtataatctagtatgatagatactaggtgatggaattcttgtgaatccattttaagtatataatttaataaatatttttgaggcatgtgtatgccaacctttgtgctaggtgcttaggatacaaggtggcttagacatagccaatgtcttagttgttcctaagtctaatagagagaaaacaagatttaaaaaggtagcattgtagaaatgataatgatagaaaactccactttagtgtggagaaggaagcattagagaatatttacatgagagctgaattttgaaggagaaataggaatttatcagacagacttggtaggaaggtatktccaggcagactagaatatttaaaggcagtggagacttgaaacaacatggagtaatttgaagattgtaggtggcttgttatttttggaccttagactgtaaggaaggttgttataatgagatataaacagtaggtagaggccagatcattctgaagagtttagccattatcttttagatttgggggattcagtgaaagatttgagcaggtaaggaaagcaatcagatttgtgtacagtcaagttaaggacattgtagagtgtgggctgaaagcatgataaagcaaaggacagagaagggatgatgagaacttggaaaaaatgttactatatataaaaaaagaggatgaatttggaagaccaaaaacaaacaaaaaattagatttagtggttagttgtgggggcaaggaggaaccccagcttccttctttagagaggctgggatcatcaaccaaaatgtaataaatattataagagtagattactaatttgatttttgacaggaatgtatcagtacaattgcccaccaagtggtggaatgtattaatctggaatcgagagtgtagtttggatttaaggtagagatttggaagtgatcaattcatatgtgttaaaaccataccagtgaattaaattgcttaggataaatataaaaattaggtacctttctagataaaactctgggtaacacctatatttaaggggtgttaggagaagaacagccaataaaatgcctatattgaatggaaacttccaaagagggaaagaggttcagaagagaatgtgtcttgggaccacaagagaggaaagaagtagagaagtaattttttaaaataccatccaaagtttgaactaacataaaaaacatggtttgacgtcattatttgtgtgatgatttccttaacatttgcaattttttatccaacagtttttaccactccagaagcttttctcagctagaacgtgccttaacccttaatgaatgttaaatactcatcatatactcagatttacctttttttccttataaatagtacttttgtatttgcataagtggtagaccagattcctaatctgttcgatagtacttttctttaaaagtgatcagaaaaattctttttttgaaattataatttcattaatgacatagcaaataccatattcacaacctgggcaattaacatctctggagctttagggatcaaatttaatgaaacagtaataagtactaggtaattaaggatgattgggagggtaagttttttgtcgttctttctaattaagtccagggtttggatgagaacactagactcaggagaatgttcccagagaggtggtataacttgtatgaaaaattagagtctgatgtgtgtattgtggtgtgtgtttaggtgagggtaaagggattgtggctagaaaataataaaaggctgaagactatagaaatttgttatcattgtaaagtttaggtagggcagaaaaaatatgtgaaggtcttgaaatctgaaaagtatagatttaataataattttatctcataggaactgtaacatattgataatgcccaaagtctttaataggtagtggaaaagtttaacttttttacttaggatattctatctaattaatggcaccattaaatattactagcatgcaccattggagaatgaatgctttgtaagtgaattctgactataaccaatgcaatggaaacatgttagactaggagttgagctcaaccaaggttttagttctcctctaaaccgcyagccacagagtagggatgtgtttttattctttactgtgcaccaaatgccagcctggagatgctcaacacttcttggacgatgaaatgagtagatgtactgacaggtgaatcattaaacacgaatggctttttgtttcttcatatgtaaagtaagaaagatgacaaggaattctgttaggtcatctttgaatttcttacctatttttatgataatatgtactttggtacaagtaccctgagaacttcaaattaaattcttttgaaagaaataaaacattttgttaaatacacatcttttaaatgcaaattgaaaaccaagtgtccttgtatttcagaggctttttaatatagataaaatttaaattgagttctttagccaagctgaataaatgtacaaggtaaaaatgcaatctcttcataagtttcacagagtaaacactggaagttgyaataataaatatgtaaagtatttgtttttattacaaatgtaaaggattagaggtagtttaacatttggaatgcaggtattaaagtactgtaatcaagttggaagaagcagtataaatctgaaattttctcagtaaccagttgaatacatttagactagagartgaatcatttatttcagttcaaagttgcagtgtctgagttgaaccacagaaggaataaaaaagtccacatttgtttaagaatagcagataactgaattccaagtgatagcctgtgattttcgaggcagtcagaaaagtttcacggaagctaagtgaagggaaagccaaatgtcaaatgtggcattccttcattaagtaagcatttattgataccttgcagtattctaggcagagggattgaagaaggctaaccatgatgacctctctaaggctaytgaatttgccagtaatacacttacactaagtggtcctagtgaacctaaatctcaagtctgctattttcttaatgcccattttcttatccaaataacttgtacattaggcttgaaactgctttacttagatgtttattttttgtaactctaaatatgtatcattgcttttaaccatttttatactatgaaaagggatagccttctgttgcaatgagatttgtgaacgtatattttaaaagaaatatatcaactaaacatctggttttggatactctgtatcctctcttccactaatttttaaaggttttcctcatataatctacttcttcgctgtggttcatttatttttttcctaattggaagatagcaaaagagttggcagcatacatttctatgtgactttaagcatatacagaaatgttgcaacttcagtctgattaggaataataataaaataatataaatacaaataagaaataaaatagaaggggctccaaacctctttaaagtatttttcttttgttatacccatttttttcttatatgaactcatttttatgatatagtcttgtcattagggcaaatcataggcttgaattaaaagatcagtagacactactttattttttttaatttttgtcagcccccatctattaacatatctttccttccatttctccagcctagtgccttgtaacaataggagctctataaacagtacttttttttcctttctttttttttttttttgagagacagtctcactctgttgcctaggccggagtgcagtggcacaatcttggctcactataacctccacctcctgggttcaagtgattctcgtgcctcagcctcctaagtagctaggattacaggcatgtgccactacgcccggctgatttttgtgtttttagtagagatgaggtttccccatgttggctaggctggtctcgaactcctggcctcaagtaatccgcctgcctcccaaagtgctaagattacaggcatgagtcaccacacctagctataaacagtacttaaatggcgagttagcactttcttgtgaatttctgtaatacactctattcttgccctactttgcctcctggccagattaattcagtagcagctactattgaagagaattaacctaggagtgaagttgaatggtctcctcttggtcttcactgatatctttgtgggtggctcccccactcagccttctctgtttctaccccagcagaagattgggacttctttttacagcctacagaggatggacatctagcttcaccacttggcctttgctggcagggttggtgggggtgggctgctgtttttttctgtggtggttagctagagtggagtggttattgtcgaaaagcttctgtcttgctaggctgcccgcttcctggatagagagggcatgcttttcttggggcttttcttttctgggtctcctccattggcgtttttgcgttgctggtgtctccagtayccagtctgaaatacatgagacaaaaagaaaacccaaagtattgatcatcattttgttccttggatcctgagctcccttgtcagactgccaccttctctccwtcttctgaaaacagttttgcaggaacatataatttaatttacaaaagttatattatgcataacctaagaagagttgacactgtagttgctcactaattacttgttgaattgaaatcaaaaataggtgcgtatttcttgagatatttgtatccatctgagatctttgtgatttgagaaaggaagaggtgagtaaaataaacacctaaagcagttctaccaaattaattttcaaatcaacaatttctacacctttagtaaacaatttataatttagaggaggaaagataaaaagtattatattgaacaataayctcagtcttttaggattgttacatgaaattcattttggatgawcatttatcttttaattcttctagtgctgtagattaaatgagtctggtgttgtattactacactatagctcctttgtggagccagtggaggctttctattctaaaccataagttctcacttattttgaggctgtcccacaccctgaaagataaagtttcaaatgagtcaggtgatcttttcacaaatggaatragtgctcagtttacattttttttaattatactttaagttttagggtacatgtgcacaacatgcaggttagttacatatgtatacatgtgccaagttggtgtgctgcacccagtaactcgtcatttaacattaggtatatctcctaatgctrtccctccctgctccccccaccccacaacaggcctcggtgtgtgatgttccccttcctgtgtccatgtgttctcattgttcagttcccatctatgagtgagaacatgcagtgtttggttttttgtccttgcgatagtttgctgagaatgatggtttccagcttcatccatgtccctacaaaggacatgaactcatcattttttatggctgcatagtattccatggtgtatatgtgccacattttcttaatccagtctatcattgttggacttttggcttggttccaagtctttgctattgtaaatagtgctgcaataaacataggtgtgcatgtgtctttatagcagcatgatttatagtcatttgggtatgtacccagtaatgggatgactgggtcaaatggtatttctagttctagatccctgaggaatcaccacactgacttccacaatggttgaacgagtttacagtccyaccaacagtgtaaaagtgttcctatttctccacatcctctccagcacctgttgtttcctgactttttaatgattgccattctaactggtgtgagatgrtatctcattgtggttttgatttgcatttctctgatggccagtgatgatgagcattttttcatgtgtcttttggctgcataaatgtcttcttttgagaaatgtctgttcatatcctttgcccactttttgatggggttgtttgtttttttcttgtaaatttgtttgagttcattgtmgattctggatattagccctttgtcagatgagtaggttacgaaaattttctcccattttgtaggttgcctgttcactctgatggtagtttcttttgccgtgcagaagctctttagtttaattagatcccatttgtcaattttggcttttgttgccattgctttttgtgttttagacatgaagtccttgcccatgcctatgtcctgaatggtaatgcctaggttttcttctagggtttttatggtttcaggtctaacatgtaagtctttaatccatcttgaattaatttatgtataaggtgtaaggaagggatccagtttcagctttttacatatggctagccagtttttccagcaccatttattaaatagggaatcctttccccatttcttgtttttgtcaggtttgtgaaagatcagatggttgtagatatgcggcattatttctgagggctctgttgtgttccattggtctatttctctgttttggtaccagtactatgctgttttggttactgtagccttgtaacatggtttgaagtcaagtagtgtgatgcctccagctttgttcttttggcttaggattgacttggcaatgcgggctcttttttggttccatatgaactttaaagtagttttttccaattctgtgaagaaagtcattggtagcttgatggggatggcattgaatctataaattaccttgggcagtatggccattttcacgatattgattcttcctacccatgagcatggaatgttcttccatttgtttgtatcytcttttatttcattgagcagtggtttgtagttgttcttgaagaggtccttcacatcccttgtaagttggattcctgggtattttattctttttgaagcaattgtgaatgggatttcactcatgatttggctctctgtttgtctattattggtgtataagaatgcttatgatttttgyacattgattttgtatcctgagactttgctgaagttgcctgtcagcttaaggagattttgggctgagacaatggggttttctagatatacagtcatgtcatctgcaaacagggacaatttgacttcttcttttcctaattgaataccctttatttccttctcctggctaattgccctggccagaacttcaacactatgttgaataggagtggtgagagagggcatccctgtcttgtgccagttttcaaagggaatgcttccagtttttgcccattcagtatgatattggctgtgggtttgtcatagatagctcttattgttttgagatacgtcatttcacaaatgcaattggagtgttcagtttacatttttaaaagtacttttaaaaagtacttttaggccgggcgcggtggctcacgcctgtaatcccagcactttgggaggccgaggcgggcggatcacgaggtcaggagatcgagaccatcccggctaaaacggtgaaaccccgtctctactaaaaatacaaaaaattagccgggcgtagtggcgggcgcctgtagtcccagctacttgggaggctgaggcaggagaatggcgtgaacccgggaggcggagcttgcagtgagccgagatcccgccactgcactccagcctgggcgacagagcgagactccgtctcaaaaaaaaaaaaaaaaaagtacttttactttcagcttgagtcactcttcccaggctttatccaggtggcttaggttagctagggctgtgtcccgtgatgtacagtccctttacacaatgttggagataaaacttggcctcatgtcttgcttcatattcccacagcctctcagagtcctgtggacaatgactagggagacaaaccatgcaagcaacatattttttaaaaggtcagtttcaataatgacttaattttaagttataatttcatggaacactttcatcactttctttttcacagtattttacccagttattaattaatctaagtagtgtatcttcgggaggtaagacagttatttccattttatagatgaggaaatcaagaaaagtcatttagtttatgacttatccaagagcattcagtgcattgagattggaagtggaacaacagaccaagattggaactctaaatgttttctttaaccaccatcctgtgcttagcccaatagaccgtgcccgtaaccaaattaaatttatatatctttcacaatgagagcaagggggaagaaaagattatccaattagaattttgttatagacatggtctgtaaatatctaatttttcagtctgatgcatcaagaatgttaaatcattatcatatctcctgtttcatatgtagcgtaataaaaagcccgtaatacaagacaataattttaaaaaaatattttcttgttaagaaatatggcrgttatttgaaaataaacaattccatttaattttttacaatgtaaagaaaaatgtgatacgtatataacaaacataaatatagtacatatacttgtcattagatatattctatatctgcactttatatatacatacacaatataagacactgaaaatttgggataggtttataaactatcgatgctaccatgtgaaagaatactgttgtgtgaaataattggaatttgggaacaggcttatttaattttcatttcatctttgccttcccccttagtttaaatgcatttaaatatttatctaaatacagtgtcagattgggctgctataataagaataccatagactgggtaacttaaacaacagatayctacttttcatagttttagaggatgggaagttcaaaattagggtgccagcatggtcaggttctggtcctggtttccatatggcagccttcttgttgtaccctcacatggcagagagaaaggaagcaagtgttattgagtctcatataaaggcattaatcccatcatgaggattctactctcatgacttaattgcatcacaraggccccaccacctcataccatctctttgagggttagggtttgaacacatgacttgagggaacacaaacatgcagcccataacatatagatatagtttctttttagagtagtttgttatatgttggggaaaagttaccactcaaaattaagggcctgaattctagattcatctcttattctgctaaatatgttgattatggaagcacatttgcaggattgtctttgagagttagcatcctgatgtagcaattcatttgtattgtaacatcatggagatttcttttgtgatttttctttttcacactttctcctattcctgagattctctttttgcactctattaaaattcaagtcaacatcagataaagctgggtcataatgtattgctttttcagtcagcggcttctgtttttcacattgagtattttctttaaaatgactcagtttgaggtgatactaaagaagtttaaaattagagaccatagctcagttatctaagattagcaatgcctataataaaactaaagtattatcaggcacaccagcttgtgcttacagtcctagcattttgggaggccaaggtaggaggatcacatgaggacaggaatttgaggccagcctggtgggcaacatggtgagaccctatctctacaaaaagtaaccagaaaattagctggacatggtgatatgtgcctgtagtcctagctacttggaaggctgaggtgggaggatcgctggagtccaggaattcaaagctgcagtgagctatgatcacaccactgcattccagtctggatgacagagtgggactctatttttaaaaaacaacacaacctatttattataccttttatttcccgagtccaaattaattcttcctatgtttgaagtcccatagtatttgattattagcatttattttattttgccttatatgwgctgtttacttgatcctcacagtgtgtaatkaagtgttttacactttgcctattctcaagtacatgttttagattaaatttatccccctaaaggaaagatcaacatgtgacccctttctgatatctggtcctttggtgtggatatgttgattttgtttttattccagcttgcttctctttagactatcaaattatagattcatttttagttttactttctattaatagtgtacttcacctagttagattgttttcccagtagtcttaatttctcatggtaaaaatagattatcatttctcaattacttctaaatataaattccattctaataaatgccatttagatatccaatccaactataacagtgcctaccacacaataggtgctcaaaaaatgagtaaatgggtgaatgagtgaactaacaaatgctccttactgcctgtccatttaatagtttatccgtktaggtatttatcagtatggttgctatgttcatgtatttgcagttactaaaaattcttaaactccttagcggtaaaggctgactctctgcaagtgggcgtgaacatgctacctcaaacctattaatttaagatgtagcaagttaatattatccaaagtacattgatagtctaagacccactaagcagaattgcatggaattgttatatagattaaatgaggtataatgtgtgtttgtaaagggagtctatataactgtaaagtactacaccaagattagtttggttaagaacacttttattaatatggaactaataatacatgttatataatattactgaacagtaactacatttcttagaatatgcagtgtatgtttgagcaaatagactggattgtataaattgtcaagattggaactaagctcttcackagtatctaattcttggtaaggtgtcttcaggtgttcctaaataattggaagatgtaattatgagaaaagttataaatgaataataactaagtatgtactgttgacagatcattattgaaaagcaaatttctagatgtcagcactacaatttaaaagtgaagctttttattttgaatgaaatattagtagtttgggtttatttgcacaaaatattcaaagactggatgttgaaagattaaatttgtctctagagattatttaagaacaagactagattttctgttcatttgaaattagaaatgaaggaaacaagtaaaatggtttatagttgaaaacatattgtgaattggaaaggatttccagttccactcaagaaaacatttaagtccattagtaatgtctggccttttaattttaagccaagaacaatttactaargatagtctaactttaaaaaaaatcactgtgaaatatgtttcttggtttacaattttgagtgtttggaaagctatataatttttttcttacctcatacaaaaagagagcatttgtcatttttctataaaattttattttcactgatgtcattttgttatgctccttacatttgtacaataggatagtacaaagtactgtggtcttattattcaatggaaatgtggcctttcagggatcatttgctttctagaactctatttaccagtagttatgaacaggttgtgcttcaccgttaggttgatgtggttgcaaggcagcattttaaaaagagaagagttttaaatatcatgcttggaaaagatctgaaggacagttaaaatctaatgtctaataaataaccattttaatgcagatatcatttttaaattgttatatttcgttccctttctttagtataataagtccattagtcatgatttcttttaagaactacttaggattttaggcagataaaggcaattgtcttaactgctagacaacatacagtatatttaaatacatatgtatgataaaaccttacacttttagatcagacccttttggaagtccaaatgtggtgtgcacactggttgaatagaaattcactattttttgtttgtttgtttgagagacagggacttgctatgttgcccagggatcctccagcctcagcttccggagtagctgggactataggtgcactctactgcacccagctccaaagttcacctctgtattgactttgtggagcaacttgcttaacaaatcaataattatacatacatttcaaaaaatatgtttagccttgctaagagaaaaacaaaatctttcaaagaatcattaagcaatttcaattgcatttgtttatatacaaacaatacactacttacagtttctagcataacttctttgtatatgctcatttctgtaacagtacaaggctgaatgagggaaacatataatagagaaatggcaagctgactgaaagatagagttaaaatagtttcttaattctgtttgtactttccaatatggtagccactaatgatgtgtagctgttgagcacttgaaatgtgactagactgtagtgagatgtgctgtaagcataaaataacacaccacattttgaagatttgatgcaaaaagaaagaatgtaaaatatctcactgataactgatatgtattgctatgttgaaataatgttttagaacatacagttaaatacaatgtattattaaaattcatcttttttaatatgactactacaaaatctaaaattatatatgtgcttgtatttctagatagcactattaaacagcactgatctgtatgatcttaaacattacaatacaattatatattggataactgcagctttagcttgcgttctaaaaggagttcagatgttgtacctgttttggcctcattttccttctttatattctckytctcagcctcggtccagtttgagagctgttagtgttccagcataagattcttttcttaatcctccttttttttttttgaagactgagtctcactctgtcacccaggctggaatgcagtggtgcaatcttggctcactgcaacctcctccttccgggttcaagtggttctcctgcctcagcctcctcagtagctgggattacaggcgcatgccagcatgcctggctactttttgtatttttagagacagggtttcaccatgttcgtcagactggtctcgaactcctgacctcatgatccctccgcctcagcctcccaaagtgctgggattacaggtgtgagccactgcacctggccaatcctcataatattttaagatgatttcatcttccttcctctagaggtcacagacattggaaagtcattccctaagtgaatatgaataatactatgtgtttcgaagaggtgaaatgtgtggtctagctacctttcagattctccttttctctcagaggaaggcttttgcctgcatggttgtattgtcacaatctgtaacttatagttcagattcaaaaaccccttttcttactggaaaacgtatacaacaacagggaaaattaaaaaattaaaaaaaatagcataaatgccatttttagaaggcagaaaaaagtctgcaaaccccaaagtgctacttaaagtgattgaaacccagcagagccatgggtaaaacagcactgccgggcagagagctgagaggccagcgtggtgacagatttcagaaagcaccagcactaagggactacctaaaggcctggcaccagccctaaagaccaaaggctggagctggagctaccatggtcaaagctgagatctggcattaggcaatagccacttagtcaggggaaggaggagagagaaacagaaggtgtgggaaagtatctagtaggatcagacttcagccagcaaacagagatacattttctgaagttcaggggtcatcttgtagagtagggctgttactcttgggacaatggtcagtgagctaactaggcaaccccggggagctaagctggctgcagaagccctcctggacctagtgatgcaaaaaactaatttgaaaaagatagtttcacctgtggcatggaaaagagagcccttgaagattggaaaaggctgcctttatccctcctttccccagcccttccctctctggaacctcctacctggtccaggaaaatctaatcttttcagccagctttgtaaccataagttacaaagtgtattcatatggcatcagttcaagcatactattaaaacagaagaaaaacacatgagaaagaagcatactggcagatgaattcttctctggtccactcctcgaaactgagtgcgctagtgcttctgcttgtctacttagatcttgatttttttggtttcttttattaaaacataatattttgaagagtagaatctgttgttccagcacaaaatgtagtatctacatcctagaaggccttttgtactttagagatcgtgtgaatgctttgggtaatagcatttatcatgattggaaaaggattgccatcagtctctctagattaggaaaaagtggtctcagaatggtggattttttacagtttgccttttttttttttttttaatgttagggaagctatgaagtgtgcttattattgccaaattcacctactcaaggctactttatgcatagtgtgtgrcattcacccatgagtttcaggcagggaaacaggcactgacattaaggatcccagacagtttgctactttgaagcattaaatgggtagttacctgttcaattttttctgcctttttacttaggagacttttcatatgttgaaagcacaaagaaccaagtgtaatagtgttcacatcttttctagatagcatgttcctttcaggtgaaggctcaagacctgtatactccctcccccgccccacccctccacccccaaaagaataaaaacatactccaaattgcatgtgattttaggtggtttgaagatcctttaaagcttctccatgggccctgagttaatagctcccattttaaagagtatactttttttttcttcacacagtggaatcttttggacttcttgtttctagagggtcagaaaggcaggctctggatttctgatgtcatcttttcagttagttgttatatttaaaattggatttacaatttactcatcttattgactgatacaataaaatgtaaatgattattagtgttttgcttataaattgcttgactaatttttgcctactatctaaaacatttgccaaaatttctcaaataatcaatgctaagcttaattcatcactgttaagtttaattcatcaccttcttcctctttaaaggaattgacttctctttgtgtagtcatattaacaacaggtattttaatgtcttcgtcgtttgatgaaggattggcagacctaaatatataccagtttggtattatttagttttaaagtaatgattcgtgtgataggttcttgctggtttttaaagtgtgtatctaaaaccatttatgagtaaatttttatataggtaatttaattccaaaaactatgtcaagctaagttaaagaagttataaaacatttatttgtgtcttttagacatagaaagttgtttcactttattttaagcttccttgatatttgcttaagttacatttttaccttgtgaaatagttggaaacaagcatgccattttcaggtattayagtagaattctatttgaaaaagtgctagtcgaaagagttttttttctaactttcagattgctgcttggaaccctttaaattacagaatcatattaatgtgcctatgttacctgatatctgacaaggaatctattagtgctsttccttatagtgccagttctttgtatccctaagttatttatataaaatagataaatttacagtgtctttttttcttcccactagtcatgtgttttatctaatagtaaagattataccttgaaaaataaaatacagagggacctctattttcttgtaaaatttatctgatctcagagacaacaccttgctttacctcattttaccaccaaatacagagttatttcttttctaccaaaaaaaagcacttcaatgcattgatgacatacttrtctcattgatgcatattcattctaagacttgtctcatgatgcttgcttgctgctgctgatttgcttatcttaattttttcttaaagtcatgagaacaatttttgtgtttttggactcaaggaatattggcaaattcagtttttgcttggcttcttaactgaagtctctttattgttgggatctcttatggtattctactcatttctctttccttctctactctccattcttcctactgccccaaataattcacatataatcacattagactcctgacacagaagtgttagtcttagagaggctcttttacatatcaaccccattttgagtatcacctgctagaaagtgaaaggaggctctgagtttttgagttccataataataacaaccaaacttcagaaaatgaagtggaaaatttcagtttgaccacagcaataaattcactttatctgtgctgaccatagtcagaacatttgcaaagtgatgtttcttgactcttataccacagatgacttcagatgtgttagtaccagctaaggatgtaataccacagcatttaaaamttttgcatgaatacctctggtttctttttcttgaactaaattaaggaagaattttaggaagctgttaagcttcttcattacatatttctatttatgcttcatctgtcatctcatttataggaatccttccttaaatttccctaagaccaggtaatctttatcttgttcagatcatgtcagaactttagctgtcagttttggttttgcataccaaaatattttagggaaaagtaatctacatataagtttgcttcatattctttcactaaaaaatctgtattacatttctcaagtatgttttagactgacattataccactggttagtttttctacaaggagatatgtgtcattttttgtttgtgttgctttttcttatctaccgagcaaccattgatcacctgccatgtgtcacacactatgcttagaggcttgggattatgatataaaatgtcttatgatgacacttgacagcttttgataagagactcttaaaatatgaaatttttatcagtggtttcaatgttgagtcatagtgcatctaaaggaattccataaaaccagcaatttagtgttagggttgagaagtctttagtaatgagaagactactttactacatggttcatgtgagcctgtaatcaaatttaccagtttttttttttaggtttcttcaaacttgctgccctttaagatgatgagctcccatgagttgggggagctctacctggtccagagtctgacatatcctataagtaatatataatatgatcaattaatggatgactcaaagagggtgaagatgggaaagagccaagatgaatagaagtttggcctagttttcctcccctgttgttgcctttctctttttttctctatttccctttttgagaagcagaccatgttgaatgaagataccctctgaagaggttggatagagcttttcaggcccaaactgattttatcacttagatttgattatgttctgggagattatccttaaccaaacttcttaattattatttgttaatgaatttggggagtatccatgatttattaagtggaaaaaaattaagatgctaaatgaaacatttcatatcttctcattaggttaacacacacttagataaaagtttcatgtctctttgatcataaaggagagtgaaatgattcactcctgtcttgatcatattgaatatcataggaaggaaaaagagaagattattaatagttgcatgacataccttttattgtttggcttgttatgggcaggtattactctggtaattaaacaaaatcaataaaatacataaaatttaaacaaatcacagcaacaaaacaaaggattgaagtctgtctttttttttttttttttttttttttttgagacagagtctcgctctgtcacccagggtaaagtgcagtggtgctatctcggctcactgcaagctccacctcctgggttcatgccattctcctgcctcagcctcccgagtagctgggattacaggcgcccgccaccacgcctggctaatttttttgtatttttagtagagtcggagtttcaccacgttagccagcatggtcttgatctcctgacctcgtgatccgcccgcctaagcctcccaaagtgctgggattacaggcgtgagccaccgcacccggcctgaagtctctcttttaatataagcagtcacactggcctctatgcaagtttgcctatgtacaacacaatattagatatattagaaagaggccaaagcttgccaagcttaaggtgggtcctggtatatccttccttgaaacaaggtacctaataatctacattagctaaactgagagataccacattagtgattctttccagataaagtggttcatcagcttcccctggaaagaattgtggcattactcatgcttgtttacttatttatttatattttatttttcaaacttttattttagattcaggatgtacatgtgtaggtttattacctgggtatattgtatgatgctgaggtttgagatatggacaatcccatcacccaggtactgagcatagtacccaacagtttttcaacccttgcctgcctcccttcctccttcctttagtagtccccgttgtctgttgttgccatctttatgtctatgagtacccagtgtttagctctcacttaggagaacctgcgttttctgttcctgcgttaattctcataggacaatggcctccagctatatccatattgctacaaaggacatgattttgtcctttttatggctgtgtagtattccatggtgtatgtgtaccacatgttctttatctagtccaccattgatggacacctaggttgattccatgtctttggtattgtgaatagtgtcacagtgaacatgcaagtatgtgtgtctttttggtagaatgatttgttttctttggatacatccccagtaatgggattgctggatcaaatggtagttctgttttacgttctttgagaaattgccaaactgcttcctacagtggctgagctactttacattcctcccaagtgtagaakyatttccttttctccatagacttgccagtatctgttgttttttgactttttaaataatagttgttcttactggtgtgagatggtatttcattttggttttgatttgcatttccctgatgagtagtgatgtggagcattttttcatatgtttgttggctgtttatgtgtcgaattttgagagatctctactcatatcttttgcctatttcttaatgggattatttggtttttgcttgttcagttgtttcagttactgatagattccggatattagacctttgttggatgcatagtttgcaatatattcttctattctgtaggttgtttactctgttgataatttcttttgctttgcagaagctctttaattaggtcccgcttgtcaatttttgtttttgttgcaattgcttttgaggacttaatcataaattctttcccaaggccagtatctagaattgtgtttcctaggttttcttctaggattcttatagtttgaggtcttacatttaagtctttaattcatctcgagttaatttttgtttatggtaaaagataggggtctagtttcattcttctgcatatggctagccagctatcccaggacaatatattgaatagggagtcctttcctcattgcttatttttgtcaactttgtcaaagattagatggctgtaggtgtgcagctttatttgagttttctattctgtttcaccagtttatgtgtctgtttttgtaccagtatcatgtggtttggctactgtagccttgtagtatagtttgaagttggataatgtaaagccttcatctttgttcttttgcctaggattgctttagctattcaggttcttttttggttccatatgaagtttagaatagtttttttctaattctgtgaaaaatgatggtagtttgataggaatagcattgaatctgtagattattttgggcagtatggccattttaatgatattgattctttcaacctgtgagcatggaatgttttctatttgtttgtgtcatctgtgatttcttttagtcatgttttatagatctccttgtaaagacctgtcacctccttagttagatgtattcataggtttttttgtgtgtgttttttgtggctatcgtaaatgagattttgttcttgatttggctctcatctcgagcattgttggtgtatagaaatgctactgattttaataccttgatttgtatcctgaaacttcactgaagcccaaacttattaaaacaatgtctctacagcatgagaattagaaacaaagagccagagaaagtgaagtttgattaccagttgtacttacaatctgtgtgcctttagataaattggtcatttccattagcttccatatctattaaatgaatataatcrtgggacctaattcatggcattctttaaaaagattaaatgacaatcctaaattcataatactaaaagaatattcaaattaaattaatagcagagagaaaagcaatgtaatataaaattatacttaacacagagccttgcatattgaaattctcaataaataattttttgttgttgcatttgtaattatcagtactaatttacagaaacatatgcttactaatatatgctatatatataaatatacacacgcatatataggataaagtacacacatacacatacatgctcagggctgccatttagaccatcttatttgtaatctaactactcaggaaacttaattagttatcagaagttggctttgtgaaaatgtgatcaaagaaaaagagttagatgatcctggaggatagttcatccaggctttagtagagcttggaaaattaggccttccacattactacatacctttccagcattcatgttactcatctttgctaattatatcagtgagtctctgccttcccctctatccatctaccttcttcttcttcttctttattctttcttcttcttctcttctttcttcttcttcttccacttcttcctcttcttccatacgtaacattcatacatacattcttctttcatgcatataccatttgaactctgacagatttatatttttgaactcttgtttgtcattaaccatgaacttcaatatttcatgcaaggcaattaatttttgcttccctttttaatatcatgtattttccaaatatgtataccatggttttttaatgcatgcaactaatttaaacatcaagtaagcatgtatattatttcatttaatcttcaaaacatctttgtgaaataagtcatatctattcatccaacaaaaatactgaggctaaataggagttaaatgagttgcctgaagttacatagttaataagcaccacagttaggaatcctgtctactccatgatttcaggcccacctttccacagcttcaccacaacctgaacagaaaggtcctagaaatccccatttatgaatcatctctcttaggatggattacttctataaatatgttcattttgtagtggtttttacttgactcaacttcataataacctttcctgaccttgtaactgcccccccttattaactggcataatggaagaaaataagagattacagatccttgagaaaagaaagaaaaaagaatgtcgcaggtgggacggtatctaataattggaggacagctttagcaaggaggagatgaggaaggaaaactgagaatatatgtctagaaataacaggtgaattaagggtggaaaaacctggagatcaagattggatgttctccattcaattagaaatgaaagtttggggaataaagaaagggatgaatatgagagataaggaaacttggaggaaggaggcagtctgtaacaatttctgtgggaacctcagcattgaatcaagcagagaagtgtgtttgaagttgttgataaccttgtgctttaggaatagatttttctggccatttttttattgtgataagatccgtgaaccatgaaatttaccattttaaccaccttttttctgtcatgacagcctactattcagcattgaaaccattttcaaatgtacaaatcagtggcattaagtgcattattaatttcctgccactattttcactttccatttccagaactttctcatcatcccaaacagaaactctgtagccattaaacagtaactcctcattcctctctcttcttcacccctggtaaccactattctattttctgaatttgtgagtttgcatattctgtataccttatatgattcaaaycatacaatatttktctttttgtgtctgacttatgtcacttagcataatgttttcaagttttatccatattataacatgtcagaatgtcattccttttaaggctgaataatgttccattgtaggtgcataccacgttaaaaaaatccattgtgtttttttgtttgtttgttgagacagggccttgctctgttgcccagacctgagtacagtggcactatcatggctcactgcagcctcagcctcctaggctcaagtgatccttttactgggactacaggcgtgtgccaccatgcctgggtaattttttattttttgtagagacgaggtctcactgtgttatcaggctgaacttaaactcctggcctcaagcaatcttcttaattcagcctccaaaaatgttaggattacaggcatgagccaccgtgaaaaatttattattgatgggcatatgggttgtttctrccttttggctactgtgaataatgctacagtgaacattggtgtacaaaataatcaattttaaaactacagtaaaaatcttttatgaaattgctgttttaattattgtttcatactatttaagtcattcggaaagtctgataaatttgtgtgaggaaaagagagtattatatgactacttttcacatttttgctgagcatattctaaggttgtgatgaccataaactgcttcagaagttcatcatctaatagaatggaaaaatattattattattagatctctgtctcactttttgggaataatctaattaatttcaccacgagggtaagtgagactttaagtcacttataaagagtgatcctagtcagctatgtaattgtttatactcatsattttaagacattttagagttatgcgtactacataacattgccagcgctgtgcactgagagttactttattaatggacatctcatgctttctcctgttatcagctcagcacatgagattctagaactttgccttgaatgcttagaatagaacttagtcatgctacggaggttgaactccctcatactttatgttaacttttaacktttagttgaacaatgcatatatctaggataagtgtagttatttataaacaaaaaacttaagactgacaatatagccttctagttaatcgcttttaaatttgaagttattaaaatagttttagtatatattattagtataaatgtgtttagagctgatatcaaaagaaaagataaaataaattgtaatagctgaaattattttacatgagatactcagctaagtaaaaagtttgttcaaggccttttacaaatgatagctagccagtagttactctgtttgaacacaagaatataatgactcagttaaggtaagtactgtctgttaaactaactcagtaggctgattcatatttatacagtcatgaaaatgataaggaattaattacttaaaaatcaagatagctagcaatttttcatttctaataatgataattcaatacctaccaaaattcatatatatttcatatatatatttcatatatatatsatatatatgaaatatatatatcatatatatttatatatatatttcatatatatatttcatatatatatgatatatatatttcatatatatcatatatatttcatatatatatcatatatatgtcatatatatcatatgtatttcatatatatatcatatatatgtatttcatatatatatcatatatatgtatttcatatatatatcatatatatgtatttcatatatatatcatatatatgtatttcatatatatatcatatatatgtatttcatatatatatcatatatgtatttcatatatatatcatatatatatttcatatatatatatcatatatatgtatttcatatatatatcatatatatatttcatatatatatatatgtatgtatgtatatatatttttttccaagacagggtctcactctgtcacccaggctggagtgcagtggtgcagtctcggcttactgcaacctctgccccctgggctcaagttatccttccacctcagcctcctgagtagctgagaccacaggcatgcaccaccacacctggcttgttttgttttgttttttgtatttttagtagagacagtgtctcatcatggtgcccaggctgatgtcaaactcctgagctcaatctgccgacttcgacctccaaagtgctgggattacaggtgtgagccacagcacccagcccagaattcatatttatttttattttattttttttgagacagtcttgctttgtcacccatgctggagtgcagtggcataatctctgctcactacaagctccgcctcccaggttcatgccattctcctgcctcagcctcctgagcagctgggactataggtgcccgccaccacgcctggctaattttttttatttttagtagagacagggtttcaccgtgttagccaggatggtcttgatctcctgacctcgtgatccacccaccgcggcctcccaaagtgctgggattacaggggcaaaattcatattttaataaaagggatgcatatctaatgtttastaatgaattattcaagttaaaattaatagtcactatagtaaagaccaatttaacttatattctgtaagtgagactgaggtgattctttgtattttgattatagttcatgtttctgtcagcattttgtagagagttctatgaagctgaactcatccttgaaatttagaattgccataattctttttaatgtggaatataacagtcagtctttctgggatctgtaatttcaaaaacaacaacatttttctttttgattgatcatagctattattggaacagctggtaacatgtgacatagtactataatttagactgaaaaaaattgatttgtgaattatatccactcagcttaaatttctctgtttctagtctccagagcatcttttgtacttctttttctgcagaaacggcttcctaacataatgttcttacattttcccaggggaagaggaaaactccatagtcaattttcttacttgtctgaagtataaaaaaagaaactctttacacaaaaatagagggaaaaacaaagtaagattcagaatttcccaacacaggaaataaaagatttattccatttaaccttttaacaaatgcactttacacattttgtgtgtgtgtgtgtgtgtgtgtgtgtgtgtgtacttcaggatttctgttcatcctgcagtcaatgtcaaggagatgagaatttatgaatatgatgattcagatgatttcagatttgagactaattcccacataaatcattctcccctctcatcttttgtaggtaaaagtaagccatagaatagtttgtaggatcattagataacaagttaggtagggaactattttgtatttaatgatttccctgttaaaattcacttttcaactatttacttaagtattcaaataataaatcaactatccatttagaatgatcaggaaggatcaatttagagatttttttattgtaaattgacaaattgtcattacgattacaatatttatgaggtacaaagtgatgttatatgtatacaaagtagaattattaaaccaagctaattgacattcttcacttcacataattacacttttttgtggtgagcacgtttgaaatttgctgtcttagcaattttgaagtgtagactacactgttattaactgtagtcattatgctgtgcagtgtatcccaaaaacctttttcttcttgtctaattgaaactgtacgctttgatcmacatctccctgtttcccccatcccctaacctttggtcaccaccaaccattcaactctcgtctataagttagattcttttcaatttcacatgtaagtgagaacatcatgcagtatttgtctttctgtgcctgygttatttcacttagcataacatcctcaagattcttccatgttgtyacaaatgacagaatatctttctttaaaggctaaatagtattycatttgtttatgtataccacattttctttatccattcatctgtcaatgaacatttaggttgattccataacttggctattgtgaatagtgctgcagtaaacacaagagtgcagatatctctttgtcatactgatttcaaatcctttagatatatacccagaagtgggattgctggatcatatcataattctacttttagtttttggaggaacctctatatagttttccatatggatgtactaacttacattcccaccaatagtatacaaaaggtttcttttttccttgcaaaawctggttatcttttgtcrttttgaaaatgtggtggtaggtatgaggtggtatctcattgtgattctaatttacatttccctaatgcttagtgatattgaacaatttttcatatacctgttggccatttgtatgttgtcttttgagaaatgtctattcaagttctttgcccatttttsaatcagattgttttcttgcttttgagtttttttgagttccttatatattttgggtattaatcccttatcaaatgtctcgcttacagatattttctccaaatctgtaggttgtctcttcactttgttgtttttttgctgtgcagaaggtttttagtttgatgtaaatccatttgtctatttttgcttttgttgcctgaacttttagggtcaaattcaaaaaatcattgcccagaccaatgttatgtagtttttgatctattttttttccagtagttttacagtttcagatcttacatttaagtctttgtcttagtttgtttgtgcgctataacaaaataccacagacygggcaatttataatgaacacaaatgtatttctcagagttccagaggctgagaagtccagagcagggggctggtgtgttaatcaaggggctagtatgtgattagggcctttgtgctgggccatgctgtggtggaaggtggaagggaggagagagagggagagaacctctgtcaaaaatcaattgaccataaatatgtggattcatttctgagctgtctattctcttccattggtcagcgtatctatttttatggcagtaccatgctgttttaattactatagctttgtaatacagtttgaaattagtagtagtgtgatacctcccactttattctttttgctcaaaattgccttggctattcagggttttttgtagtcccataggaattttagaatttttttttctatttttgtgaaaaatgtcattgtaatttcgatagggrttgtattgaatctgtaatcactgggtagtatggactttttaacaatattaattcttctaatccatgaacaaggagtatctttccatttacttgtgtcttctgtttctttcatcagtgttttataatttttcgtgtgtaggcctttcactttctaaatttatttctaagcattttattcattttttaactattataaatgggattgttgatttcatttttggatagtttgttgttaggatatagaaatgctactgatttttgtgtgttgattttatattctacaacttgactgtatttgtttattagttctaataggtttttgtttttgtttttgtttggtagaatctttatagctctctccatataagatcagcaagtatcgacaatttcactacttcctttcctatttggatgccttttctttctttctcttgcctacttgctccagcaaggacttccagtactgtgttgaagagaagtggtgagagtagtggtctttgctttgttcctgatcttagaagagaaggtttcaactttttattgttgaatataatgttatctgttggcctgtcatatgtggtctttagtatgttgaggtacattttattcgtacctatttgagaattttttctatcatgaaaggatgttgaattttgtcagattcttttgccatagctaatgagatgatcacttgagttttgttcttcattttgttaatgtggcttatcacatttatagacttgtgtatgtttaactgtcctttcattccggggataaatcctactgattgtggtgtatgatccttttaatgtgctattgaatttgatttgctagtatttcattgaggagctttgcatttacgttcatcaaggatattggtccatagttttcttgtaatgttctgtctggcattggtatcagggtaatgctggctttgttaaaagaatttggaagtattttctcctcttggatttttgggaagagtttggtrgtatattagttctttaaatgtttggtcaaaatcagcctgaagccatcaggttctgggattttctttgatgagagactttttattacagattcaatctccttacttgtaattggtttgttctaattttctatttcgttatgattcagttctgataggttatgtatgtccaggaatttacccgtttcttctrttatctaatttattggcatatagttgttcataataatctcttatgatcctttgtatttctaaggtatccgttgtaatatctcttctttcatttctgatttcatttatttgaatctttttttctcagtctaggtaagggtttgccaattttgtttatcttttcaraaaatcaattcttagtttcattgatttattcttctattttctagtcactaatttttaaatttctgctttgatctttattgtttccttctttctgctaactttgggctttttctttttctgtttccttaagatgtaatattaggttgtttgagatcttttttgctctaggtgtttattgtgtttatttgtataaatttccctcttagaactgcttttgctgcatctcatcagttttggtgtgttgctttttgtttgtctcaaggtaattttttgattgccctktttatttagaattatttgcagacttatttcgctgtatggtctgtgaacagctgtagattttcttttatatatrtatattttaaacaaaatttgagagatgaagtctgtattgtttacaggtttgaggaataattgatttataataaactgcacatatttaaagtttgcaagttaatcagtttttacatatgaaatcactgttcccaggataagatgataaacatgtccatcacccccaaaattttccttctgtctttttctaatccttccctcttttccttcttcccttttttcatatcctcactcccttctctggcaatcatctgctgtttagtattcattttctataaatttatatcagtggaaacatacaatatgtgttttattgaggtagtgtgtctggcttctttcaatattacattcatccatgytgtcacatttatcaatagccctttttttttttgctgagtattattttgttgtatgactatatcaccatttacttatccatttactagttgatggacatttgagatatttctaatttttggctattatgaataaattgctttgaaacttgggtacagcctctttgtggacatacaatttcatttatttagggcaggggctggcaaataaccagagagcaaatattttagggtgtataggcttgcattcttctttcttgcactgtggtctgaaagctccasgtagtaagccagagtagtcatgggctgcacttcatttgcctcctctctttcagttatcactggcttgctctacctgttgttcagtttctgaaaaccatcattttgttgtgtttgtggtcttgtaactctatcttggctgagtctgtacattttaatgtagttatgtttctttttaaaagtttaatgtatttgtatttaaaatcattatgccaagattatgtgagatttttgtttctatrttatgtttatgcagttctttactaagaaagggatgaatgacttcagggtttcctggaagctcatctcttaamatattcatctatcactattaaaatatgttaatatatcaattaatattataccccttgtttaggagtcaatctgtctctcttactgattgcttatgttggttttttctttgtgctttttgtattatgtattacaaccttttatattatgaaatacaatacccatgtaggaagttcataaaacataaatatacagcttaatgaaattttatgtaactaacacccatttaataactacttagggcaataaaaataatattgccagcatcctagaggccctaacatgccttttttcaatcacagctttctcccacccaaagatagccagtatcccaacctctgtggtttttacttctttgctcttctttacacttttactacttaggtagtcatctgtaaaattagtgtttgctgttgcgtgattttgatccttacataaatataactgtattagtttgttcttgcacttaactgtattggttcrttcttgcattgctataaagaactacctaagactgggtaatttataaagrggtgtaattgactcacagttgtgcagacggtacaggaagcatgcctaaggagggctcagaaaacttacaatcatggtggaaggcaaacaggaaggaggcacatcttacatggccagagcaggaggaagagagmgcaaagggggaggtgctacacacttttaaacaaccatgtctcgtgagaactcattcactattatgagaacagcaagggggaaatccattcccatgagctggtcacctcccaccaggcccctcctccaacattggggattacaatttgacatgagatttgggcggggacacaaatccaaaccacactttgctctttgacrtgtagcttcttttgttcagtattaggattttgaaattcattcatgatgttgtatggaattcattccttttcattggtgtataatattatatataggcacttgatggatagcagtttgaggtgcttaccagtaatagtcaaacataatgcacatgtactttaggacacatgtattcacacaaaattggaattgccagatcctagagtagtcatatgttcaacttaggagataatgtgtgttataaatttcatctactcagtggcttctttcagtctctaaatgatctcattttaactttttaaaatgttatttatttatttttgagatggggtgtctcactctgtcaccgaggctggactgcagtagtgtgatcatagcttattgcagtctcaaattcctgggatcaagcaatcctctcacctcagcctcaggtagctgagactacaggtacgtgccaccatacctgactaacttaaaaaaaaaaatcattgtagacataaggtcttgctacattgcccaggccagtcttgagctcctggcttcaagtgatcctcccaccttggtctcctcaagcgctaggattataggtgtgagccactgccctcgaccaatttttttttttttaattttaaaataattctagacttacagaaaagttgcaaaaatatttcatagagtattcctgtatatctttcacgtggtttcccccatttttaatatcttacataaccataggacatttattaaaatctgaaaataaacattggtacaatgctatcaacttaygtacatttattgttctaattttgccagtttccccaataatatactttttctcatctaggatccactctaagatcctatattacatttagttgtcatggctctttcatccaatctgtgataatactttcttcttgtttttcatgaccttgatacttttaaaagaatactggtcagttattttgtagactgtcacttagttgggtcttttgcattttttggcaagaacttatgaaaatagtgcttttctcagtgcattatatgttggtagtgaagggggtgtgttgataagctttaatactggtgatagttaaccataattacttggttaaggttatttgcagtgtttctctaaagttgctattttttttttttttrtaattgttacgtgtttttctggggagaaactttgagactatgcaatataatgtttctcactaaactttcattttctaattttaataccttttgatgttttttgcttgcaacaattattactgtggtggttttaaatttcagtttggtaaatattttaaatattggtgaatttaaatttttctcattattttttcatgtattaagataaattttactgtaaacaaraactgtctcttctcataaatttatttatattggtatagactttttttttttttttgagacagagtctcactctgttgccccaggctggagtgcaatggcgcgatctcggctcactgcaacctccgcctcctgggttcaagtgattctcctgcttcaacttcctgagtaactgggattacaggcacctgccaccatgcctggctaatttttgtatttttagtagagacggggtttcrccacatyggtcaggctggtctcgaaccgctgaccttaggtgatctgcccacctcccaaagtgctgggattataggtgtgagccaccacacctggcctggtatagacttttwaaaaaatgtacttgtttattttttatagagacaagttctcactatgttgactaggctggtcttgaactcctggcctcaagcagtcctcctgccttggcctcccaaagtgctgggattatagatgtragccaccacacctggcctattggtatggacttaagaataaagwtgacccatgaayaatgcaagggcactgactcccttgcagtagaaaatctgcatataatttttgactcccccccaaacctaactactaatagcttactgttgactggaagccttaccaataacatacacagtcaattaacatgtattttgtagttacatgtgttatacactatattcttataataaagctagagaaaagaaaatattaagaaaataacaaggaagagaamataaatatgctattcattagacttgagtggatcatcctaaaagtcttcatccttgtcatcattgtgaaggctgaggaagaggaggggttgttcttgctgtctcagtgaggacagaggtggaagaaatctgcgtataagtggacctacgtggttcaaacccatgttattcaagggtcagagctgtattttattttatgggttataatccaatactataattttattttagtgttttgattttgaccattgggaactctttcaagttggcttctgtgtctttttgacatgctttccatcatttttcagtacttccttactttctagtaccataagatgttacagaatcttctattttctttcctcggcccaggaattagctgtttctctaaggagccctggtttcttttattggtgaatgatagttagaaataaaaatctaatcctaggtgtggtcattgcttctggttgtcattctaagccctctctgttgacagagctaggaatgtatcatatactaacaagcacctacgtgtatatttgtatttatttcttcttccatctgtcagtatattaaaaggcatgaggccttactgatagtccttatccaacatcaaaatgttaattctgtcctttctccttttcttatttgtaactctttgtacagtgagaaacctgcatctctttatccatgatatatttgtttgttaaatcctagtatatattttcataattactaaccagtacccatatgagaaacaagtttattgacttaagtacagtgtttgtctacatttctttttgttggtagccttagagaatatagtcaaaatactattttctgaagttacttaaattagctccttttcgtccccatcccccttcatgtgtattattcatttgtaaatataattattttcattcctttttaggttctctcaacatactgattgattttaattgatcgtttggtatatgaaacattgtaatggttctaagtcctaactgtataaaaagatactctcatagatatgtcactcttcactcatcctgctgccctatttytattcccccatgatttctacctgttttcacctatccctcatgggaaaccagtctctttagtttctgttttagccttcctgtaattcctttgtacaaagaaacagacacatgaatgttattgtactttttctttaccaaaggatagcatactatatatcctctcttgcgccttctttttttcacttaacacagtaaatatatcctggaaatcatttcctattggtaagtagagattgtcctcattttttaccgctgcatattattccactgtgtggatttaaccgtagcttatttaaccactctgccatgtctgagcgtttgggttgtccttaacattttgcaactgcaaacagtgctgcaataaatagccttgtgtatatgtattttttagtttttggaggtacatcttcaaggacattgtcagaaggaagatgactgggtcaaaagctaagtgcatgtgtagttttgccaaatttccctccagacggsttatactagtttgcatttccaatagtagtatacgagagtgtctgttttccacagcctggccascagaatgtgtggtccataccttttaattttgccaatctggtaagtgggaattgtatctcagtgttgttttaatttgcatttttctagttacaagtgagtttgaatatttttacatacgcttaatgtccatgttttatatttttgaattatctttttaatgtgtttttcccatttcttctcaatgtttaagagttctttatatattaaagttagtagtcccttttctgtggtatatgttacaaatrttttctcccagtttgtcagttatcttttgactttgtttatggtgtttttttgccatgccatttaaaaaaawttttacatagtatgatttaccaacattttctcttatttccttgttatatcaagattgaagaggaatttactcaggttttcttttaatacttgtaaggtttctcctttttttgtacttagattcccaatccatttggagtttattcttgtgacttgtgcgaagtttggatcttagtctatctcttgataaacataaattattaattttaatgtagacagatataccagtattttcctgtatggcattattttcatctgtgtggatagccagttatccctgcactatttattagaaagattatcctttcacttctgctctgcagtgccacctttgttataaattcagtgcctatgcgtaggtctgtttctaggttctctgttctattctactgacgtacttgtttgtccttacgtcaatcacattttcattattgctaaagcttcatgagaagaagtcttgatatctagtaagcaagtcctcctactttgttcttctttaggatgatttttaatatttttgttgttttgcttttcctcatatattttcgaatgagcttataaagtttctcatacaaattctgtcaggagtttttagattgcatttaatatataaatygggttgtgaacattttatgtggtaacagtgttgtaatttcctacctatgaacatgttgtattctttcatttacttaggttttcttaaatttcttgcaataatgtttgatacttttattaattaaggtctttcacttcttttgttagttttattcctagattaaaaatattttttatcatttcattttgaattggatcatccatagtttcattttttaactgcatgttgctggtaatacaactgctatttttctctaattgatctagtatccaggaatcttattataaattcattgattaatcctaataatttttctgcattttggggggaatacatatgtatatatattatgtttatgaataatgtgagcttttttccctctaaaccttagatcatgtttttccttgccttaatagactggctaggacctctagtacattgttaaacaaaaatggtgatagaaggtgtttttgcattcttctccatctaaaattttaaaatttccccattaagtgtgtttcctctaggatttgatttatttatttacttagatcatttagataaaattgaaaaagttagcttctcttccttatttgctgagagtacttatacaagggtgtttagttttttcaaataccttttctgccattataacaatacagtctttccccccatcctgtttctcaggtagttacaatggtgagttatttaatattaaatgatttttagaataaacccaatttgatggttttctttgcttcttttttcttccctttccccttcccttccctctttcctccttttccctcctcatcctccccccttctcccctctcctctctgaagttggcctatattgtatgtttcctttcttttacttcaacattgcattttttaaaaaaattaatgacattttcataggtctttttccacatttatggaaaattaaacaaagtgcagagatttcctagataccctttctctttcggcatacagtttcccttatcatgttgcactagtgtggtacatttgttacaattgatggacaaattggttatattactaactaaagtccatagtttccattgggtttagctgtgttttatagtgctatggatttagacagattcatgatgtacagatgatatcaaccattacagtattatacagactagttttctgctctgaaaatttcctgtgcaacatccatttgttccttttttcctccccctgatctcctggcaatcactgatcttgccgctatagttttgcctcttccgaatgtcatatagctagaatcatatagtatgtagtctttttagataggcttcattcacttagtgatattcatttagatttcttccgtgtctttctgtagcttcataggtcatttctttctttaaatagacttgatcttttagagcagttttaggttcatagcaaaagttgagcagaaagtacagacagttctcatatgctacctgccccacacatgcatggccctcccccactatcagtactctgcatcagagtgctacatttattagagttgatgaacctatgttgacatgtaattatcactaaagtctgtagtttgcattaaggtttactcttggtggtgttttgacaaatgtataatgacatatatctagcattatagtatcatacagaatggtttcactgccttaaaaaaatccttttgcctttctcagaatatcatatagttggatcatacaatgtttaggcttttaagattgacttcttatactgttactttcctctgtgtcttttcrtggcttgatagctcatttatttttggcattgaataatattgcattgcctgtgtgtaccatcatttattttcacctattcaaggacatcttggttgcttccaagttttggcaataatgaataaagccgctataaacacccatgtgcaggttttttgtatggacatacattttctatttatttgagtaaataccaaggaagatgattattgggtcatgtggtaagggtatattcagttttgtaagaaaccactaaactgtcttccaaaggggctatgctattttgcattcccaccagcaatgctcgcgagttcctgttgctccacatccttgccggcattggtggtgtcagtgttctggattttggccattctcataggtgtgttgtagtatcttagtgttacttcagtttgtatttccctaatgacatatgagacttgagcatcttttcatataaccacttgctatctgcatatcttcttttgtgaggtttctgttccagtcttttgctcatttttaaatcagattattatttttttctttttctaaatttttgtttttagagacgggtttttgctgtcactcaggctggagtacagtggtgcattcatgactcactgtaacctttaactcatggactcatgagatcctcctgcatcagcttcctgagtagctgggactacagacacatgccaccgtgcccagctactttttatactttttgtagagacgaagtcttgctatgttgcccaggctggtctggaactcttggcctcaagtgatcctccaaccttgtcctctcagagtgctgggattacaggcatgagccaccatgccaagcaaacttgtttattttcttactgttaagttttaatagtttgttgaatattttggatgaaacttatttttcacatgtcttttgaaaatatttttttcccagtctgtggcttgttttcttattctctgaatccacattgcattttgtgtccatgtcaaagttatgctaactttataaaattaattgggaaatattcttttctattttctggaaaaatttgtgtgtaattagaattaattttggtagaatttgctggtgaatttgctagaccttttgcttgctttgtggagtaatttaaaattgtttatgggagacatctaagattttctatttttttcttgtgtcarttttagtgcattatatttttctaggagtgtctctattctgacttttgaaacttgttgggataaaagtatttataatatcctcttattatttattactacatttaggctgttttcttttttctttgtcctactgattatttgtgtgttttctttgtcagcctcattcagaatcaattcaattattgtcttagaaggaatagtttttagtgtttttgatactctccagtgtgttttccrtttcatgaatttctgctaattgttatctctttgcttctatttttgttgggtttcagttactgtcatttttctaatttcttgaggtggatacttaactcatcaatttctataaagyatttcttctttttcatatatatattttggattgtaaatttctttataacttggatttaactgcaacctacaagttttgatatattgttattttgctatttggttgaagacatttcataatttcaattatgattttacctctgatctatgggttatttataagtacacttctgtmtttacagacatggagatttttctggttacttatatgttattgatttctagcygagttatgttctgaggctatgatctgcattattttatttgttcaaaatttgctttatgtgggaggaaggagaggatcaggaagagtagctagtggatgctgggcttaatacctgggtgatgggatgatctttgcagcacaccatcatggcacatgtgtactgatgtaacaaacttgcacattctgcacacgtaccccggaacttaaaataraagttggaaatttyaaaaaaaggaaaaaaaatktgctttatggaatacactttttaaatttacatcccactagaagattcaaagagtaatgtagaccttatcaatgatatgcattttcttaagttgaagatggcactactgatcctatattcagtgtatttgctttctatttgtttggttgtttgttttctaatagtagatgtattggatgtagtctggtctttggataacttcctaagcagtggaattttatgtaagtcagtattcaaggtgctataagttgtttcaaggtattttgttgcaatttaaaaatatatctgataacgggtactatagttatggcttgtagatagaacagttaattttgagttatttagcttatttttagaaagaatcccttgctccttttaaacttttaatttgaaataattacagactcaatttacttttaaagcagtttttctgtgtttgatgtatcatcaatattgggtgagtgaagttcttttaaatgtttattctattacctgacaagttctactttcttttatgagaaacttttstggaaacaattttggggctttcttttcagaatasatattggttaatgtttgtgtttggaaaattgaaagcaaaatggatattagtcttgcctattaacttctaaagctgtgataaattgtttttgtccaacaatgcctccttattgctactttccaaaacatcctctttggtagccacagtatagaagtatttagttgcaagcaaatatcttacagttgttagcatttgtataaaggttatggtaatgttcgcctaacttaagggcaaaacaattacctggtaccaagtgagtcagggtttctattttaaaatatacatataaatgtgtttattagtgctgaattaatgctttactctgggaatttaaaatgtgtgattgctatattgtatataagcaccgtgcatgatgaagtgktacatattacttgactataattacatatacaatttgttaaaataatttttgaaagttaaaagtatttaaagaaatccattttaaaagtgagaatttgtgttctcaaagtattatcttatgcatagcaggcctttaaattatgacacatgttaaaatccactcaaacaaaggtggtaatataatatatggtaagggataatgaataagaaagaagtatatgaataagaaagaacagtgttttttaaaagtgaaatatacatacatacatatatatgtgccaactgatatatttaagaaatttcttatttagggaaaggtagttattaggcaagttggagggagggacacactaaatagtatattggcaaacttcctgaaatgcatatgcatagtaatttagaggcatattgatttttaaatatcaggcagcttttattcttttccttttctagcatctatttgtatgaacagtgactgttcctgctgctaaaggaggttttatcaagctttctgtgaacatttgttatataggaaataaattaaactactgctatatataactaacattcaatttatgataccagcaatgatttgggagcgatttaaagttttgttggttaatttcttatttgtcaaatgatgggccaagaaattctccatttcttagattaggggacatttcctatttgaatctactaaacaaatgcctttagtcgtgtttgtaaccatcaacagtatgtttcaaattatgatgtcatcacttacattccaaatgtaagaaaaactttttgctaagttggcttaattcagaattgtatttagcagctatwaatattctcttagtgaccctttaatactttgtaggcttttttttttttttttgagatagagttttgctcttcttgcccgggctggagtgcaatggcgtgatctcggctcactgcaacctctgcctcctgagttcaagcgattcttctgcctaagcctcctgagtagctgggattacaagcatgcgccaccacgcctggctaatttttgtatttttagtagagacggggtttctccaygttggtcaggctggtctcaaactcctgacctcaggtgatcccccctcctcggcttcccaaagtgctgggattacaggtgtgagccaccacgcctggcctgtaggctcttatagaacgtaggggacaggggatattcccaggagactaaatatctaccttatttcatagaatctaagttgctttgagactgctttcgtggtcttagtagaccatgtcaatgaagggtaatcacacaactacctcacaacaatcacctggttattattattataccacctagcatcacagacatttcaatttcagagaagttaaattatgaataaatgtatatcctggaattgttgaagtagggttttgaaatcactaacagaatttaaaagagatggttacgataatcttgtgttctaattttctatgattatatcagtatggcatgccgagaactttttgattgttttgagtttgcagttgttgtttagttttttgttttgactctagataccacacagtgttccattctcagattcatgcaatggaatttatagtcatcctagagatcattagaattctattatgttaaaaggccattaacttttaatgttgagactctgagaagtgacgttgcatagttcctctgggcaaggaatatgggcagtttttttcttcttctttatgtgtaatcgtrttcagactggagttgtatccatttattcacaatgtccattatgaaaagatttgtgataaaagaaagatgagatatatctacatttaggtcagttaaacacaagaatatttaattatgtccttcctataccctgtaccactaycagttccttacatactccacaagcacagttataatgatagtatttcttcattctcaatgtttcattgcatttaagagagatgggcatattagaactgtgggaataagaaggaagggataatgcagagaccataaccattaccatttttttatattagacctctatttggtttgatttttattttcatgtttattgttttataagaaataagtacatctttyaatatgactccatattgcgtgcaaaataaaatatatgccatttgaaattcttcatggttaatttgaaacttcragttctcatctccaactaaattatttcttactctgtccatacttgtgccctctttatctcaaatctttttctcaggacattgtgtaagtttctccctttgtgtacccactctttgagtgaggctaatcccaaatcccatctattcaaacttttccagatcccttcatagcaaatacctttattccgctactttccaatggtgagtttctctgttataccccttattggagggtaccttttgttaaggttataggtatttgtcaggttttcctgttagattttggtacgatatatttaggtttatattatctcctgtacagtgcatagtggtggtgcatcatcatacaggycttcatccttgttatcttcacgttgactaggctgagaaggaggaggaagaggggttagtcttgctgtctccgtggtggcagaggcagaagaggtggaagaggtggaaggggaggcaggagaggcaggcacactcagtgtaacttttattgaaaaacgatccctgtataagtggactcatgctgttcaaacttgtgttattcaagggccctctgtaattttgttagaattactaatatattagagtgttctacatttttcattctcaacattttactgatcattattattatttgagatggggtctcgttatattgcccagactaaagggagtggctattcacaggtgcagtcatagcacactacaaccttggactcctggagtcaagcaatcctcctgcttcagtctgtcgaggtactaggactataggcacacacaaccacacttggctcccattattttctgaaatataaaattatttattttctggttactatctcatagtgtgaaagataagaataattacacagttattacttttctcacagcatccatytaatatattttatagtatatctatattatatctattattcaaattttgataattatacaaccttatttataagaaggagtattttataaataatgcttttttttctttgtaggttacttcctcagaatgttggcctcctgtatgttggaggttatgaaagaccctttgcacaaatcaaggtatgtttgttcattttcagtgtacttttcctggatgttctcttatctrgaatccatcaaaaccttgctaataataatcaacatataaaaatatcgtgttccagcactttgggaggctaagacaggtggatcacttgagcccaggaggttgagaccatgctgggaaccctgtctctacaaaaagaaaaattttttgtcattagccaagttcagtggcatgtgcctatagtcccagctactctggaggctgaggtgggaagatcacttragccccatgagtttgaggctgcagtgagccgtgatcacaccactgtactccagcctgggtgacagagtgagaccctgtctcaaaaaaaaaaaaaaaaaaaaaaagtgaatgtgaggtgataatttcataagcttttgcatatttctgctgaagaaatctttcagcttttcaaaggaattgattattttaatattcttgccatagtaaaattgactttgaccgaaacagttcagtgattcatttagaagagtacatttagagattaatctttgagatcatcccttttgccattaaaaaaatgtttacaagtcgggtacggtggctcatgcctgcactaccagtgctttttgaggccgaggtgggagggtcagggctggaagattgcttgggcccagaagttcgagactagcctgggcaacatagtgaaacctcatctctacaaaatagtaaaaaaaaaaatttcgctggccatggcagttgtcccaggtttttggaaggctgaggcaagaggatcgcctgaacctgggaggtcaaggttgcagtgagccatgatcacaccactgcattccagcytgggtgacagagtgagactctgccttgaaaaacaaaaatgtttttaacagcttttttgagatctaattgaagaacaataaactgtacaatttgataaattatgacatgcttgtagttgtgaaaccatcactgcaatcaagataattaacattcatcacttcagaaagtttccttgtgcccctttgaaatttccccctcctgcccttcctttttttttttttttttcctggtctccaggcaaccagtaatctgatttttgttattatagattaatttgcattttctrgagctttatataagtgaaatcatatagtgtatattcacttgttctsttttttgccttcgttcactcagcataattattttgagattcatccacattattgcacttatcgctagtttattattttttgttgccaagtatcaggttggtgtaaaagtaattgtgtttttttgccattagtagtatggctatagcactgtttgattatcctttcacctgctgatgggcatttgcrttgtttctagcttggggctattacaaataaagctgctgtgagcatttgtgtacgagttttgcatagacttatgctttcctttctcttgggtaaatatctaggaggggaatggctgggtcaygtggtagttgtattacatttccgtaatgactgagattcttcgtgtactttttttccatctgaatctagtgaaatggatgttcatatcttctctagtgaagtatttcttcaaatcttgttattttaaaattgggttttttgttttcttactgagttttgaacattttttatatcttctggatataagtcctttatcagatttgtgatttgcagttattttctcccagctatcgttgtcttttcatctcttaacagtgtcctcaaagagcagttcttagtattgatgaagttcagttgatttttctttcatggctcatgcttttgttgttgtatctaagaaatattttcctaacccaaagtcacaaagatttttctcgtatgtattctgctagaagttttatacttttaagttatacatttaggtttattgtccatttgaggtaatttttatagaagagtcaagtatggattgatgttctttttttttktcatcttttttttccagaatgttactctcaaacatatttttttccaagacgtggatatatagatgttccaaaaagcactttcgaaaagaataaagaccttacagctttgttgaaaatcagtttatccatatatgtgtgaatctatttctggactcttccattccattgacctatgtgtttattcctctaccaataaccacactatattgattactgtagctttataacaaatcatgaagtcaagtagtataaatcctccaactttgttctttttctatgttgtttggctaatctaggttcctttcatttccatatgaatttttataatcatcttgtcagtttctataaaaatgcctgttcggattgtgattgggattgtgttgaatgtatagatcagtttgcagagaactgaaattttagcaatatcgaatattccaattcattaaggccacattgctctctagttatttaggtctcccagcaatatttcgttgctttcagtatattggtcttagacattttccaagcaaatttatctattttgtattttttatgctattataaaagttttcttttaaatttttttttactcaccctgacacttgggcaggatttaattttaatttctgattgtttaatgrtagttgctagtctgtaaaaagctgattgtttttttttttcttttcatgtattggctttaaactctatgatcttatactcgattattagttcagtagcttttatgtagatttcataggattatctacataaatgattgttctctactaataaggacagttctcctttctgatcttgatgccttttattgcttttccttttttaaaattttcttttttatacagacagggtcttgctctgttggccaggttggtcttgaactcctggcctcaagcaatcctcccgccttggcctcccaaagtagtaggattacaggcatgagccaccacccctggcctgctttttctttattgcactgactaaatcctacaatacagagttgagtagaaatggcaagaacagacatacttgtcttgcttcttatcttagtgggaaagcattatttaatcttttatcaaaaattgtttttatagtaatattagttgagggttggttaattgattccattaagctttgttataagaaatgaaaaaatattagcattcaaggcaatttataaaaaggaaagagttgagacactcagtttttttttgtaactttctgttaatgttttctgagaaacctataattttttttttttttttcttctgagacggagtctcactctgtcacccaggctggagtgcagtggcacaatctcggctcactgcaacctctgcctcccgagttcaagtgattctcctgcctcagcctcccgagtagctgagattacaggctcgcaccaccacgcctggctaattttttgtatttttagtagagctgtggtttcgccatgttggccagactggtcttgaactcctgacctcaggcagtccgcccacttcagcctcccacagtactgggattacaggcatgagccactgcacctggccagaagccaatacatttgttttgtgatttttttgttgttgttacatagttttctgattttttttttcacatttgtttcttggctccatgtgttatttttcttctatccgtttgagagttgtgagttaaaactcctttccacctgcttatatgacatatttttatgttttgaaaaataaggatttttcagagtagactaaggctaaatagaatatgcaagatacttaatactgaagatgttcagtcatcatatcaacatcttttttttgagacagagtctcactctgttacccaggctggagtgcagtggcacaatcacaactcactgcagcttactgcagcgttggcctctcaggctcaggtgatcctctcacctgagtctcccargtagctggaactacaggtgcatgctacatgcctggctaattttttgtggagatggggtttcaccatgtygtccaggctggtctcaaactcctggactcaartgatccacccatctcagcctccgaaagtgccgggattacaggtgtgagccaccatgcctggccaccacaatatcaacatttttaaatgaaaaatcttatcttagttaccatagcattagcacctctttaaataactccattaatttaacctaaatctaaacrttctctaaagttcatcattaggatcttgaattatggaacctcttgacttttctagttccttaaataatgacaagtattcaagtacatttttgtcttccatttttaatatccctgtaacatgaggggaattggcaagattctcttcataaacccccctcgctatcccattcaccgaattcatcagtatagccaggaatcctaataggtttcagcaggaacatttctgacagctcaatatttttctgtccaatgatttggaaaatcctgtttctctttattagagctgaagtaactaaaaagagagaagcttatctgatatatttcagtaaggagagaattttttgtgtgcatggtgtgagttacatggtgtctcaaaagcacagtctcagagttatgtgtatcagagtggtagttgccctaccacttacctgatttattaacataacattttctttatctgcacatttcctaacaagctcggtgacaaaagtcaatcttttgtcaatcctttatgcctggataatcaatcctgtagaaaaaagttcatgattttagggtgtccttttcttttgatgttgttgtgggaaaggtttctttcattcactgttaaaagattcttatccttattaattgttgaagttctttcataattcctatggctccaccaaattacatgcatattaattagaatgtaagttaatgggataacaattttaaaatcatagttcaaatgtttgacattagattataaaagtaaggttcatttcctatgttggcttgtacctgacttgtgaatatgaaataccagtatttgttatgttcacttttttcccattaagctaaatgtgatgataatatgttgtgtcataaatatgagatataacyttttaaaaatggagactgctttgcttttcttaagaacatattggttgttgatttttaaaattaaatcaggataygaaattgttcacttgatcatggaggaaaagacattctcattcattaacatcacaggacttaagttcctcagtgtgggtggcttggtgttggaggcagtgtttgctagagatattttacaactatatttctaaaaacgagctccattttataaaggtcagaaagagaaaagaaagaacacaaaaagataatagatatttggccacatgttaaatgaattcagaaatttgctatagcatgccaataagtatctgtacatctgtactgttagtattaaatatataaaatggagcattacaattattcctacagctgaacacacacacactcttccattatttactcatcttttagttttagttttctatctaagccctacataaagatataaatatgtgtaaacttgggacttcagcatagtcttagactggtgcatcttcatgctagtttcagatttcattgtggttaggggaagttatttcaactttttttgaaaaattattactttaataggttttgggaaacaggtggtgtttagttacatagataagttctttagtggtgatttctgaaattttggtggaccccatcaccagagcagtgtacamtgtacccaatgtgtagtcttttatccctcaccctcatcccacacttccccctgagtccccagagtccattatatcattcttatggctttgcattctcacagcttagctcctacttatgagtgagaacatacagtgtttggttttccattcctgagttacttcacttagaataatggtctccaacttcatccaggttgctgcaaatgccattattttgttcctttttatagctgagtagtatttcatcatatacatatatatggagcattacatttatacatatatgtgtatacatttatatatatgtgtatatatatgtgtatacatttatatatatgtgtgtgtatatatgtgtgtgtgtgtatatatatgtgtgtgtgtrtatatatatatatgtatatacattttctcctactctgtgggttgtctgttaattctgttgattatttcttttgttgtacagaaactttttagtttaattaagttccttctgtttatttttgtttttgttgcatttgcttttgggttcctggtcatgaactctacctaaaccaatgtctagaagagtttttccagtgttattttttagaatgtttatggtttcaggtcttaaatttaagtctttaatctgtcttgagttgatttttttataaggtgagagaagaggatccagtttcatttttctacctgtggcttgccaattatcccagcactgtttgttgaattaggtgaatctcagcactttttcccactctgttttcatttgttttgtcaaagatcagttggcagtaagtatgtggcrttatttctaggttctctgttctgttccattggtctacctgcctgtttttataccaggaccatgctgttttggcaaytatatccttgtagtatagtttgccgttgggtaatgtgatgcctccagatttgttgtttttgcttaggcttgctttggctttgcaggctcttttttttattccatatgacttttaggattggcttttctagttctgtgaagaatgatgatggtatttttatgggaattgcattgaatttatagattgcttttggcagtgtggtcattttcacagtattgattctactcatccatgatcatgggatgtgtttccatttgtttttgtcatgtgtgatttctttcagcaatgttttgtagttttccttgtagaggtctttcacctcctttgttaggtatattcctaagtattttattttatttgcagctgttttaaaagggttgacttctttatttgattctcagcttggtcactgttggtgtatagcagtgctactgatttgtgtacattagttttgtatcctgaaactttactgaattcatttatcagatctaggagctttttggataagtctttagggttttctaggtatacaatcatatcatcagcaaaaagtgacagtttgacttcctctttactgatttggatgccctttatttatttcccatgtctgattgccctggctaggacttccattactgtaatgaatagaagtggtgaaagtgggcatcattgtcttattccagttctcagggggaatgttttcaacttttccctgttcagtataatgttggctgtgggtttgtcattgatggcttttagtacctgaaggtgtagcaggaacagtcacagacaaaacctcttagacaccggttctatgaaggaagaggctttaatcagctgggagcattggtagactcgcgtctcaagatccgagctccccaaagtaaagattcctgtcccttttaagagcttacaactctgaggggtccacgtgaaagggtcatgatacattgtgcaagtgggggctacatgactgagagctacatgcatcagtgatgggggctagcagaacagaacagaaagtttcacaagtcttcctcatacaatatctggaatctatggatagcacaagcggttaggtcaggagttgatgtttaactaccaggcctggttcttggcactaaaccatctggccattgatctcacttctgcttctttttttaactttttgctttctcatgaaacaggagacaatgggagaggtggtctccttccttattccccccttttagaatctcacttattagtgggaattttcactttcatcctcactatctaggtctttttgcgagacagaccgatagtgattcatgtaatacacttgtgctgaactattttggtgaattaaagtagtgacaaagcttctcattatttgaaggagcaaaggcagcaagcaggggagcaacaagcaggttcctaatactgttattactcctattataagagttttaaatcctaatgctgggaaccattttccaaatacagacccaggatcaaatccatgccaaacctgcacaggcatatgtgctagctttgtcatgtctctgacgatgttttcgactacttggccttggtcatctatatgcagacagcaattggtcaggttgaattttccacagacccctctttccactgctagcaagtagtctagggccaatctattttgataaatagcatttcttatctgggtttcttgccgggctaacagtcaaagttctgccagtttcattagtgattatttctaagacagcttggaaccatataatccagttgagcatgtaaatgggggtttggtatccccacgaaccatcttgtgcccagttggcaggcccatagtactatatgattctttcacgggaccactcatcatctttccaattgcctatggctatgcttctgttttctcaggaagcatagacagggaagcctaggagctcatcacctgtttttatgggcagcaggaaaaaggatggcttaatggtgccaatgacacaactgcctgcccattgatcaggtagcttggcataggctctatgtccacatatccagtatagtctagctggagccgtccagtccyggtgagactctggatgggcccaaacagtttgcaacttagtaaacttactaaatgggttcttctcaatatggtttagaccccaccaggtgactgttcttcttgtgccgttatacagcttttgccctaggcaattgagcttcctackgggatggtgaagtcttttccttctctagctawgcagtattgyccaataattgaggtttykaagacccaaaagttaccagtgtgggccttctggactggaattatatcaggaactggatccatgggcactaattctcgggcctcccaaggccattggtctcccatagtagttcccctgcatacataacaggaagtaatgttgagggaatgggctatattttctgctaactgcaggaacaaatcttttgtcttccctggcagttctggtattggcacatttagttcatcataaaaggtctggaacactggtttgggggagcgcttgtggatctccccttggattaaaaggttgactcgggggtcaagcccagttccatcaattcctaggtttacattttctcctgtcttccagtggggatcctgggggttagtaattattaattctaatgggttacagttaccggaggtgcaagatgaattactttttcctttttgtaggcaaacagggtctttttcatcctttttccaggtggcccaaatgacataggaccaataactacattcaataataccatatagtcctaattcatgacaaatgtacttattttctgccatatatagctttttttttcaccccgactgagagaaccacatcccatccctagcttgttactattaatgactgcacaggcatcaaatcttaaggtgacttgtttgggagctcctttttcttctgttctggtattactttacttgtatctttcatgagtccccaccagtcctcagttcttaatcttatttcaaaaactgtggtcataggaggctcagacaggttgtaagacacatgargttggtcattccctgggctacacacattatactgagtggcattatataagcagatccctttcaaaattcctagacattcataataactataaaacagaaaggttattttaacttgttgccctacctctgtaacctgatgaatacactgggtacagtcctccatgtggggaaaatcagctgaagttcttattgaacaagtccaaattttgagaaaaatgagtcccacgatgagtttccttatgctttggctgtgcatagaccagtcagcttccaggtgtgactggagcagggcttgttgtctttttcagagtcactttgtagggattgtccgggcttggtctcacctcccaggtctcargtgctgtgggtttmacgtggctgtggtggatccaggccggaattccttctaccttcatggtggtgggagtggtcaggatgatggtctggcrtcctttccaccgtggccacaaaggggctatgttccagtctttgatccacactcgatcacctggggagaaagggtaaactggggagaataagctaatkrggcatctctcatttacccaagctgaaattgtttgtgtaactttttctaaagcctgtagctgtcattgcagctcaatttctcctagctcctgaggagtgcctggaagtcctcgtaatatgggagggggtctatgatacaatatctcataaggggaatatcctgttcttttagaaggagtacacctgattttaaacaatactgtggggagagcctgtacccatttsttgacacactttccctaagcctaatcctgtttcttgacacactttccctaagctattttttatagtccgattcattcactccacctttccggaactccaaggttggtagttggcatgcagtttccatgtgatccccaatacctttgccgtcttctgtaccaagtcagccacaaatgccggcccattgtctgagccaatccgtaagggcagtccaaacctagggatgagatctcgaagaagcacacgggttacttcacgagctttctcagttcgtgttggataagcctctacccacccagagtatgtacacactagaaccagcagatacttgttacctccacatttgggcatctcggtgaagtctacttggagatcttcaaagggggctgctccataagcttgtatgctgagcgggatggttggaccctgcctagcattttgctgctggcaggtgacacattgctgttactgttttggcaagggccgacaagacatgaaatgtagaagtgccagcctaacaacttttcaagtgactcttggcctagatgggtggtctcatgcacagccagcacaactgtggcccctagtagctgtggcatggctactcttctgtctggtaaccagatccatccttcctttatcacttgccccccttctgccttgaaaaagtctctttcctctttagaataagtaggcactagatgcggtgcctgagagagcagaggggccgtgactgatgctcggaagggagtggatgctgctctgcgagcttaggagtctgctccagaattccctaaggcaacagaagtggtgactcactgatgtcctttacaatgcattactgccaccctccgaggcttccatactgcttctaataactgtaaaatttcttgctgatactaaatgtcctttccccctgagttcaataggcctttttctttgtataatgccccatgcacttggagggttaaaaaggcataccgagagtcagtataaatgtttacagtcttaccttcacttagctctaaggcctgagttaaagcaatgagttcggccttctgggctgaagttccctgaggcagcgatttggcttcaataacagtgtccaaggtttaccactgcatatccagcggacatctctctctgtgggttaatgaagctgcttccgtccacatayagctcccagtctacagacatccaaggtttgtcccggaggtccrgtctgctagaataaacttagtcyaacacctctacacagttatgttcaactgggctctctgataccagaagcagtggcggggttcattgttacaaacttcagtggttatatggggattttcacagagcaggctttggtacttggttagtctggcatttgtcagccagtgatgtcctttggtattcattaaagtcaccactgcatgaggggcctttatgtttaagttttgcctaagagttagtttatccacttcttgtgttagcagggcagttggtgctaagaccctcaaacacgggggccaacctttagaaactctgtctagctgtttagagaggtaggccacaggcctcagccacggccttacgtcttgggttaaaactccgactgctattttttttctttctgacacatacaatgtaaatggctttgtcaggtcaggtagacccagggctggggctgacatgagtttttcttttaactcatgaaaagcctgttgctgttgggacccccattcaaatggttccatgtcacccccctttgtaacttggtaccagaggtttggccagtactgcaaaatttgggatccataacctgcagaaccccacagctcctaataattctctcaactgccttctggtcttaggctccagtaggttgcaaatgacctgctttctttctgatcctaggctgcactcccgctgtcggatagtaaatcccaggtagcgtacctgctgtctgcagatctgagctttcttcttggacaccttatacccatagtcctccaggtgctgaagcagggcgtctgttcctttgacgcacccgactgccatggggcgtcccagcaggaggttgtcgatgtactggaacaacacgcagcctaggtctctggcaggaaacttttggaggtctcgagccagtgcctccccaaagatggtgggggaagttcttgaacccctggggaagccgggtccaagtgtaatgagtggtgacacctgaccccggatcctcccactgaaaggcaaacagtttctggctctctggagctaatctgatgctaaagaaggcgtccttcaggtctaggcaggtgaaccagctgtccttagctggcaataaccccaacaatgtgtacgggttaggtactgttggatggaaagtcactgtggcttgattgaccaatcgcaagtcctgtactggcctgtagtccttggtccctggcttgggaacaggtaggaggggggtgttccatggagactgacaaggcactataattccaaaagtcctcaggtgcttaagatgaacctggataccttccagggcttctctggggactggatactggttttgcctgactggctgggcctctggcttaacttccctgagtacaggagcttgattgactgccaatccaggagggttgtcttctgcgcatacttttggccaccactgggccagagctggccctatctctttgcctggtttggttaggaagagtcgctactcttcctctcggggaactgtcagggccatgataactcctgttccaggcaacttcagttgtaaagagccttgcttggtaaaggaagatagctctcagcttgctaagcaggtcccttcctaacaaaggcaaggggcagtcagggatgtacaggaactggtgaatcacttcatgtccccccaccgagcaggtccggggcaaacagaaagcctgctttgtcaaaactcctgttgctccaattatatcaatagcctttttagacaagggggcgaccggggtggtcactactgaatgttcagcaccagtattgaccagaaacttaatgtccttgcccccaactgtcattctgaccatgggctccttgggggcacgtgagcctggtccccttcggtccaataacccctcagccagattgaacaaggctccttcgtccttgtctggggtcttttgctctgaaccaccttgcttttctttcagctgagggcacttatctttccaatgtcctrtctctttacaataggcgcactggttacgttgcaagcgtggacggtcagactgggtatttttcctggagcccccattcccttgtcctttcagggggacccctctaatagctgcagctagtaggtcagcatttcaccgggttggcattcaccttctttgcggctctctctgcggcttgctgcatctgtatttacaaacacttggttggctatttccagtaattggcgacgtattcatacctgcaaacccagcccgtttcttcagctttctcctaatatcctctgcgctttgactaactaaggccatgttaatcatgcgctgattttcagggctgtctgggtcaaagggagtgtacatgcgataggcctcacacagtctctcataaaattgcactggactttcttgctttccttggataacctcggagaccttgtttacgtttgtggccttttgggctcctctcctcaacccttctaagagtgcttccctataccgcattagcctttgcataccctctgtctcgtttggatcctattaagggtcagttcctggtagctggatcctcacatactcttgggggttctgataatcagctggaacatgctcttccagccacttagttgctacctcgagcactctcctccctcatccgtgttaaagaggtacatgagcaactggtggcaatcagcccaagtggggttatgagtttggataatagtttggagcaagtcaatcagagcttgcagcttttctgtataggatgggatgttatttttccagttgaggagatcggcagaggtaaaaggttggtacacaaaggcacccctaccatatgcccctcctcatttaccccagtataccgttgctctcttaggggcatttgtgtcccagttttaggttgcaagcaagctgccaagggaggggtttctcccaagcttcatatcctcttttgtctattttaggtggccttggggtgtgcacaccttgcagaggctcaggggctgtgggcttcgatgtggggagcctctcttcttggtaaggaggggcaccattggtgccatttctgccatgcatcctctgatgtggggtcggacagaaccgtaggagctgacttccctyggcgggtggagcaagacttttccttggctatctgtccctttgctactagtactgctgcagcctgtcctcttagccactgtgrggggtctaaaactagctgcaaccaagtatctatgtatggtaactggtctgggtgtcctgatttatcagttactttgtgccatacctttgaaactagggacctgtctaggcttccttctgatggccatctcacctctaatgctggatagtctatctcacataaagccttaagctttccaggtgtcatagcaattccatagtccccattgaatcctttcttgaaattctttaacatagttcctaacagggtaggcttactttgtattttacacattttcctctctcaggagacaaaacaacactcttaccacaaagggggaagggaaaaaggggcaaaaggtcactcactcaccaagcaattcacactaaaatcaaagtatggataaggaattactcattcatcaagcartttgagccaagtcagagccgaaatcatagccagaacagttcaaatccaaaagtcaatagtgaaatctaaaccaaaacagttcaaatctagtcaaaatgaaaaccaaaaccaaagtgccaagaaagccatgctgtgggtgatcagcccacacttccactcagatggagtgggcaagttccaaggccagtcttaccatgttccagatgtccagactccaatcgccgattccttcccggtgttcaaccgctgtgttaattctccacgggggtctgccgcacactgctgtggcaaggcatttgaccagggcaattgcctacgcgagagtgctcccaggatctgctttgcttaagctcgccggagtcctccccagggatgctccacagggcaggcctaagccgcctaagaggctgcctcaactgtccactaatcacctcgcttccaggtcagggaaccaagaaatgtagcaggaatggttgcagacaaaacctctcggacactggttttatgaaggaagaggctttaatcagctgggagcattggtagactcgcatctcatgatctgagctccccaaagtaaagattcctgtcccttttaagggcttacaactctgaggggtccatgtgaaagggtcatgatacattgtgcaagtgggsgctacgtgactgagagctacatgcatcrgtgatgggggctagcagaacagaacagaaagtttcasaagtcttcctcatacaatgkctggaatccacaagcrgttaggtcaggagttgatgtttaactaccaggcacggttcttggcaccaagccatctggctattgatctcacttcttcttttaaccttttgctttctcatgaaataggagacaatgggagaggtggtctacttccttaaaggtgtgtttcctctatgccgattttgcctagggttgtaatcacaaggaatgctagattttgtcaaatgctttttctggatccattgatatggtttttgtttttaattctgtttatgtggtgtatcacatttattaacttgcatatgttaaaccaaccctgcatctctggtatgaaagccacttgaaagtgatgtattaccttttaaatatgctgttggattcagttacacagtattttgttgaggattttttgcatctgtgttcatcagagatattggtctatagttttcttttttgttatgtccttccctggttttaatattagggcaataatggtttcagggaatgatttagggaggattccctctttatcttttggaatagtttcagtaggattggtaccaactctttgaatatgtgrtagaatttagctgtgaatccatctggtcctggactttttttgttggcaattttttttattactatatcaatctcactacttgttattggtctgttcagagtttctgtttcttcctggtttaatctaggagggttgtatatttccaggaatttatccctctcctctaggttttctagtttgtgtgcctgaagttattcatagtagcattgaatgatttttttgtatttctgtggtatcagttgtagtatctcccatttcatttctacttgagcttgtttgattcttctctctttcttcttttttggttaatctcactaacggtctgtcaattttttttaaccttttcaaggaaccagcatttcgttttatttatcttttgtattgctttttgtttgtttcaatttcgtttagttctgctctgatctttgttatttcttttctgcagggtttgggtttggtttgttgttgtttctctagtttcttggggtgcgagtttagattgtctgtttgtgctctttcagactttttgatgtaggcgtttaatgctatgaactttcctcttagtaccgcttttgctgtatcccagaggttttgataggttgtgtcactatcatcattcaattcaaagaactttttaatttccatcttgatttcattgttgacccaaagatcattcaggagtagataatttaatttctatgtatttgtatggtttggagggttccttttggagttaattttcarttttattccactgtggtctgagaaagtacttgatataatttcagttatcttaaatttattgagacttgttttgtgacctatcttatggtctgtcttggagaatgttacatgtgctgatgaaaagaatgtatattctgcagttgttgggtagaatgttgtgtaaatatctgttaagtccatttgttctagggtatagtttaagtccattgtttctttgttgactttctgtcttgatgacctgtccagtgctgtcaatggagtattgaagtcccccactattatggtgttgccatctatctcgtttcttaggtctagtagtaattgttgtataaatttgggagctccagtgctaggtgcatgtatttaggattgtgatattttcctgttggagactaatccttttatcattgtataatgtctctccttttctttctttttttttaccattgttgctttaaagtctgttttgtctaatataagaatagccactcctgctcacttttggtgttcatttgcatggaatatcttttttcacctctttacctggagtttatttgagtccttatgtgttagttgagtctcttgaagacaacagataggatacttggttggtggatttttatccattctgctattctgtatcttttaagtggagcattttggccatttacattcaatgttagtactgagatgtgaggtactgttctattcatcatgctagttgttgcctgaataccttgggcttttgttttgttttcattgtgttgttttataggccctgtgagatttatgctttaaggaggttctattttggtgcatttcgaggttttaagatttagaacttttttagcatttcttgtagtgctggcttagtagtggcaaattatctcagcatttgtttgtctaaaacagactatctcgccttcatttatgaagcttaattttgctggatacaaacttttttcctgacagttattttgtttcaggagagtaaagataggaccccaatgcctgctggtttgtaaggtttctgctgagaaatgagctgttaatctgataggttttcctttataggttacctgatgcttttgtctcatagctgttaagattatttcctttatcttgactttagataacctgatgactatgtgcctaggcaatcatctttttgtgatgaacttcccgggtgttctttgagcrtcctgtatttggatgtctagatctctagcaagaccagggaagtttttattgactattccctcaaataagttttctaaatttctagatttctcttcttcctcaggaacaccagttattcttatgtttggtcattttaacataatcccaaatttcttggaggctttgwtcattttttttttttaattctttttctctttgtctttgtctgattgggttaattcaaaagcctgtcttcaagctctgaaattctttcttctacttgttctagtctattgttgaaactttccagtgtattttgcatttctctaagtgtgtcttttacttccagaagttgtaattgtcctttctttgtggtacctatttctgtggagactttttcaaccatatcctgtatttttaaaaaatttctttaagttgatttttacctttctctggtacctccttgagtagcttaataatcaaccttctaaattctttatcagacaattcagatttcttcttggcttggatccattgctggggagctagtgtgatctttagtgggtgttataagaaccttgtttcatcataccagaatcacttttttggttccttctcatttgagtagactgtttcagtggatagatctggacttcaagggctgctgttcagattcttttatcccacagagtaatcccttgatgtgttgctctccccctgtatgtcagggttctctagatggacagaactcataggatagatgtatatatgaaggggagtttattaggagaattgactcacacgatcacagtgaagtcccacaataggccgtctgcaagctgaggaaccaggaagccagtctgagttctaaaacctcaaaagtagggaagctgacagtgcagccttcagtctgtggccgaaggcccgagagcccctgacaaatcactggtgtaagtccaagagtctaaaagctgaagaatctgggagtctgatgtttgagggcaggaagcatccagcacaggagaaacatggaggccagaagacttagcctgtctagtctttccatgttcctctgcctgcttttattctggttgtgctggcagctgattagattgtgcccacttgaattgagggtaggtctgcctttcccagtccacagactcaaatgttaatgtcctttggcaacaccttcacagatacacccaggaacaatactttgcatccttcaatccaatcaagttgacactcaatattaaccatcacaccatcatccccaagggattgggcttcctgagagccagattgcaatgattactattgcccttctaggtctagccacccagcggggctacctggcccctggctagtgctggggagtgtctacaaagagtcctgtgatgtgaaccatcttcagatcttccagctgtggataccagcacctgccccggtgaaggtgacaggggactgaagtgaactctgtaggaatcattggttgttgttttgtttagtgtgctggttttcttgaatgtggttatgctagtggtgacgttgtcatatggacagactctggacttctggttggccaaggtgttgcaggtggtggaattagctgttgttttctgcttcctcagtacaggattgttctgctatgagctgctgtaatggcttgagttggctggcctccagacaggaggtggcgctttcaagagaccagctgtggtagtaggaggggaatataatcttgccctacattggccaggataagtacttgggtttctcaggtgatcgcggggtcatagaggkcccaagagtttatgtcttttgtctttgcctaccagggcgggtagagaaaaaccatcagrtggggcaggattgggcagatctgagctcagactctccttgagcagggcttaatgcagacactgtgggacatagcaggtgattcttaggccagtggatttatgttccaaggggaattatggctgcctctgctgcatcatacaggtcaccaggcaagtggggaaagctggcagtgacaggctttatccagttcccatgcagccagcaatgccagtcttcctcccactgtgccccaccgacagcaccaagtttatattcatggagcgggaagcagaactgagatcttgacccaagctacaagtctctccactgagaaagcaagcagggctctcaggcctcrccccttcccacctgcctgcaccatcagctgcagtttctgtgctcatatctgtattttccatttgcctccccaccccctgattctgtttaggaaaacttgtgctcatttgaaattattacagagttcatctaggagcttctttcactctgtggctccttcccaattctgctggctgccttccccaaggacctctctcagataaggctaacaatggcttccctgggctcaagctggagaccaggagtgcctacagggctcttsctgctgcttcttctactttagtattttcctcagctctctaaatccatttcagctctaagtgaggttaaatccttctcccatgatctggattttcaggttttccagtggggatatatgttcagaagcagacttttcccctgtcatactttgggaactcacagttttttggctgtctcatggagtttgcagcagcaagccacttctttcaaagggtctgtgacttcttttggttttcctggtatgtttctttggtggttcttgaagcaagagttcacagtgtgagtcttcacacactgttctgttcatccaagtgggagatacacataagtcctgtctcctagccaccattttctgcagctcagcctctcgagtagctgggattacaggcatgttgccaccatgttcagctaatttttaaattttttatagagatgaggtctcacattgttgcccaggctggtctggaactcctgggctcaagcaagtctcctgcctcagcctcccaaagtgttgggattacagatatgagccactgtgcctggccttcctcaacttactttttttttttttttaatctcttaacatcttcagtaagtcatggggaaggttctttttcaaagaagctcagtcctcaactttcacccaaggcagagactctactcccagatgactgacccctttcaaaatcctgtgaaaaccatgaaccctctccctagaaaagtttacatacatagacatacttttgcttataatttcagaggtttcatgaaccccactggagtgcattcaaggaccccaaattgtgaaccataataagtgaataaaatgttctctcaagttttctattaaccaaagagatactagattcataaaaaattaagttttcagagaaaattttttatttgaacttgattttaaacatgcttgattatcctcttgtttatcctaaaatataagctacataaaacaccaatcattttataatgagtggtaacatggagtaagaaaggacatgcttaacatatccacaactgtagttttatactataaatgaagcagatttcatcctcatccaagacggtaactcctttgactttattgagattaaatttctaaatgtactgggatgtatgccacttaggattttattaagtaagcgatatagttcattatacctttatatgcagtctttgaaattaaaaagggaagtttttcagaagtcctttatgtgaggattggggactgggtatttctatatatcttttcataatacctttatcttaatatatatattctatttttcacatcttatttttgtagatatgttctagtttaatagtttacattttacaccagttactctgtgttgttttctagagcatgtcaaagtctagtaaaaatcttratgctaattctttaggtttctcattatgaaagcttcacttaccagccagaatccataaaaaccaagaaggattgaagcctctcaagatcacatttaatcagccaaagggttgttaatggagagacacaaagctacagggccatctcttgatattagttgtcttttccagttctgatagtccaagaattgtgagtggctgtaaggctgagtcagacccaagtttccactttgacactgcagaaaggcttgaaaaaagtcttctatattttaagtaggaattttttgcagcaaccatatgtggaaagtaaggactataaccattatatgggatttttttttaaggcagttatttttcagtcagtacagcaacattattccctgcctcagtctggttctgtccctgctgagtaactgggtgccattagtcacagtcagatactctaagctttctgaacttgaattttaaaaaatctctaccaccaaggaaacgtaagagtgatgtttgtattcgtgtgcatatgcaatagatgcaaagaaatacttatctcttcatttttgaagtcaaaattgaaaatctatcaaaccatccacttggacatcatttctattttttttaaagtagcatatttttcctttaaggtatttcaagctcagattgttatttgatatgttaaaaatatttttaagattattaacaagtaaatgttaatatttagcctaaattaaatttaagagtaaagtatttatttggaatctttctattataaaagactgaaatatgctaggaaacctattagtaatgatttggtttgtttgctgactgatgatcttttagaaaatatctggcttattagatcaatacttatttttactaaaagaaactaacgttcatattttaaacctctaaaatatctgaagaataactgaatgttctagttcgatgacttccaaacttttgttcataacctgcacaaaatatatttccttcaggttctagtatatgcacacatacgtgtatttatatacatgtaatgtgagctgaagtttcaaaatatgtgtgatgccattttgttttgtttctttttcttttgatttagtttttagatgctggtctcaacccactaaattaatttctgtattggaaaatgggtcacgactcacagtttggcaaacactgcttcagggtaggacttgtccagctaatgctgccatatgcttctggcaggagagtgccacattttgtgatacagatgatagggaggaggcttacctgtccctgaactcatgattaccctcagaatgtctttggaggggaagaaaaagatgagatctcatagttactgggaagagggaggaaggaaaagatgaatgagaaatgaatttaaatgttttatggagccaagtaaaaccattttctgtttcaaaagtacgaattctcaagaacagaggggagccttgcacatctactctgtctcccaagtgatttcatgttttttgaggatagagaaagaaataaaggtaagatcttccttagatgaaaaaattagaaagaaaaggaggtaggtgaaaacttgagagaaaggaatgaaatcaggtctagatctgtgtgacatagtcgttgaataatggctaaattttctgtaatactcttaatgatgaggaaaattttcagtgtttcatattacagtaataaaagatgaagtatttatccctttgttgaaaatagcttcaaaaagtaaacgaaggttaaaggaaaaccttatggatactaaattctccctacttccatgcaatagctattaagttgctgacagagcattttgggattactgctgagtgtcgagcaaccctacactgtaactttctggatgttaaaaatcatgcagtgattactaacgagtcatacagtagttgtagataaaagttctaaaagatagtctataatggttgttctcctacccaggtgcttttggtagcattattgacaaaacagaatgccacataagtcctaaaatacacacgtttcaatctcaatattatctttatgtccttagacaacttatcaaaagactaagccctatgaggctgagctgtttcttgtccacttctgtatcctcagcatttagcccagttgctggtatatgaaagcactaataaatatttcttaacattataattgaagaatgactggaaagccaagtgggctttgttttttgttttctgttgtttttaacattaagtatataccatggagttcatcaaactatttaaaagctctggttctaattacatacatatttactgcattgaaaattttaatttctaatctctgttacatcttgggcttagtatatctttgtggcaatataaatcaattttattttctaatttaaattgtggttgtaagttattattaacatcaactttatttggaatgtagattttgtgaatacattcttctgagaacactttaaatatagccctcaaattgtttttcaattaagaaatttagcatttttcttagctggaaatttcgatgacttttgagctagacattttgtagaaaactgtkggaaatattttggcatattctagtgttttttaaaacattataccactatattaaggtgagttcttgttaaacatggcttgaacaaagaataaacaattttattttgtatctttgaaaagttttccaaaaaaggaaatgcaatactttacctacttaggtatttacagtgcagtcagtggacctcctattttgatgaaaggaactagcatggtacttcttatcctgttgttttctttaaycagtattttgcttctaaaaagaagtagttctcttacttgaatttcagagacactaataaccatgtaaatataaaagattatgtaaaaatccctattgctgaagtcatgtctgataaataatgccacagtttcggatctagattcatattaaatgtctagaagttatgcattttacttattacagaaaggagaaaaatcattccttcagcraatactaatccattataaaagagtgttctcttgtcctcttgcctaataaagtctcaaaaaacaaaataactctccctccatccttaccctaaatgcaggcacaacagtaaagacccatttcaagtggtgtgtggttgtaattcatgcatttaggaaagctccagacctgcgcttgttttggttgactcttcttacaacatgcacattgtgaacaaccccaagcaaaacaagacccattttcctgataattctctctccgcctccaccccaaagagcactaacaaactccaagtctagatcatagaaatccacacgttccccaaatttgtaataggaagtattaacttggtatgtgagcaccttcagaagtttgagattgctgctgtaagtgacatcttgtcattaatgttgtggtgtgtggattggagggatctttaattttctaaaacaggaataaagagatgtattccagtaaatctaataatctcttaaaatagttttttttctaaattgtgaactaaatatttgtcttctccatgtcctcaaattttattatctacagaattaattgcctataaataaaatgacaagtttgcagttcagaagatttgcaaactatgctaaatgcaatgaagtatgagatttggagaaacttgtaaatttgtaacattgaaaatagaagtcagcattaagttaccatttggatattgacagttttactaaaatatgttaaatatttaactgtatatttaaattatttttacagtgtcacaagatcagagcatttccagtactcaggaaatagcttcacaagtgatcattcatctgctaaaataatatgttgcttctgattagttgactcagttaataatagtgaaaaattataagatatttaagttttttgctgagatttaagtttggtaatttgcaaaatattaacagtgaacacacattttatttacatgtatatatacatatttacatacatactcttttaaaaattaatctatccaccgcctatgtgcacagacataaaatgacattttaggttgtttgatgatccrtaatttcttcttaatagattttagtattttacatcagatttgctttctaagtgttattagccagtaaaagcaattatctagtggaaatttggtttaaaataaaaatttgggggggcaagaaggctgaaacatagggaaatgaataatataaaaggatatttaaatttaatgtatttatatatagtaatttttacatcttattgtgaaatgttacaaccatattgatatatttttggaaatctgatcctttttttctttgtcagcattttataactttaatatgaaaaagaaaaacaggataatttatttgtttaaagccaaaaacatgaataattatgtttttaacttttaaagttagtgcttttatcaaatagaaaaatagccaacatttgttgagtattatatgcccagcaggcactattctaattaattctcaaacaacctgtaaaagtgtaggtactttaaacattccagttacagatggggaagatgacaacatagttacattatgttgccttgtatgcagagttatttttctgtatactattttgaagtaattagttactgtttctattgcattattgtcatatatagtatattattatagttcttgaaccctttctgagttctgcttgtatgccaaaattatcctagtccactgactggactaagtgacttgaccaaagggatgtggttttaacracaaagaccaaaatagagaatcgttgtgttgttgttgttgttktttttttaacataaaaagagatgggagtataaagagagctcaaagttataatctcacctctgctgctcatttagtcatgttgagtgtttatcttccttagttgttaatagcaaaagctgagaattcttgcattgggaataattgtgaatctctgagatattaaagggcttcttattataatattatctgatatcactatgaagtattttctgttcccagagcatcctgtttggaagtttactatgtcatgtatttctcctacctgtcatttttagaagggtcagccctacttgttgtttttcttttacttttagttgattacttcttcatgtccacaagatttgggtaacagtattatatagttattaatttgaaatagtctctagaagtctattttatttctttaagaactagctggtaggagatcacttatgtaaataaatcacctatgcattttgagtgccctgattagctcagaaagataaagataatatctcattttcacgattttttttcaagtaggttttgccatcacgctagattcagtgaaaacagtttctcatttttttgcccaaagttgagtatgccttgtgtgagcatagctggaattaaaacattctaatgtttttcaagatcagtctttcttggaggcattttgatgactcagggctgatttcagctgcaaaaagaattgtagcagaattgcagggagaaggaacagatgtttttaagtttcggaatgagtaggttggttgcatagcacatggttaattgggtgatgtaaaaggcagtgactgtgagaataatcaagaaaaggttcccagggtggttatagtttagcaaaagaatgaatgaagtaaagtaacatgcaygtaatataggtcattagatgtcactaaatggagatatgcagagaggaatagccacacaaggaaaaagtagaaattatattagtgaggaaaagttactattagtgatgaactcttccatgctattccgtgcaggctcccagacccttttaggagtcattcttatccataataagtaaaaatcttaagcaaagtctgacaatgattttcaggtgcttttactggtttgaacgatctaatcagtaaaatcatgaaaaattatagtttgggagaaaaaaagtaaagacaattctgttcatttgaattctattcattcgtgttagagtactaggaatacccttacttggtccactctccttgaggcctggtctctccttcagtcagcactgttggccaggacagttaacatycacctcttctgaatgccctgggctgggtccacatcactttcctcctgaaaaccttacactctatagtctttattttgggtatcttgatactctagcacaaattcattctcctatttatggcttttagaacctttttttttttgagacttagtctcgctctttcacccaggcgggagtgcagtggcgcgatctcggctcactgcaagctccacctcccgggttcacgccattctcctgcctcagcctcccgagtagctgggactacaggtgcccgccaccacgcccagctaattttttgtatttttattaaagacgtggtttcaccgtgttagccaggctggtctcgatctcctgacctcgtgatccaccgcctcggcctcccaaagtgctgggattacaggcgtgagccaccgcgcccggctagaacctttttatgctgcattaattcgattttggccacttttacattaaaatgaactgttgcccactgtagcaaacataaattcctttcatcatgttttcccctcccatcatacccttattttacctaacacccacttctgtctaatgcatgaaatgtgtttacagtccctctttctgtgactatacatactattttcttgtctgttacatgtctcaaaatttacctgctagtcaaaaacaaacatacaaacattaaatatacagtaagtcctcacttaacatcgatgataggttcttggaaactgtgactttaagagaaatgacatataacaaagccaagtttttttccttgcccacattttaacaaaatgatgttattcaaggacctgctgtacattgctttgcttaaggtcgcagtttccaagaacctattgatggtaagttaggacttactgcatatgtacaagacactttggtggagactgggcatataaagattagtaacattttatctgccttcaacttactcatagctgatttacaaagaaatcgctctgtaaaaaggtaattataacacaaagttggatgtgatgtgtcagatgcctagaattggttataaatgtcaaaagctgaggaaaacctgtggactgaggcagttgaggtaggattcacaaaggaagcaagaactgttttgcactaccaattaggagaatggtaggttgtgagtgaatgcatgcatgcgtgtttttatctttctctgcctctgtagaaataaaaggatggacagataatttaggaaaatagaaagcaaagtgtggagctttgttcgcctggggtacaagaggcatagttgggtaggtgcagaggtttgtatagggagataataggatgtgaagaggtaaattggtgttagaatttwttattattattattattattattataatactttaagttttagggtacatgtgcacaatgtgcaagtttgttacatatgtatacatgtgccatgttggtgtactgcatccattaactcgtcatttaatatgttgacaacaatgcagactgccataagaatttctaaattaatattgggggtactgatattttcttggtaattcataccaataattcagatggcttctttaggccccagcttaaaaaactagtaataaatggtcattgccatggatgataacaraagggtcctggattcctaagtcttacagtcttactacctgtcaggtagcaaaatatttttatatcttcttcacattatttgaagtaatggttcctaagagaaagaaatggaactcatataaaaatagttgaagttagtgtttctgtttgttgtttctgatgttctgttactgctcaagttgagctattatttgtgacaggaagtgaatgcaaacgtagagatcctttcttaatgtgactgattatatctttgaatctgacaggtcaagccatggaagattcttcttttccgtagttgttatttcaggtattttcatcgttgttttgtgtcttaagagtttaaaatcaagcctaagtctgttagacttacttttcataagagratttgattcaggaaaaatagaacagattgattggttaagtttgttcagggcatgtttttcgttccctcccctcctccctctctcccttcctcccttccttcttttcttcttcttctttttttttttttttttaacagggtgtcggttctgtcacccaggctggagtgcaggtacaatcactgcagcctcaaactttcaggctcaagtgatcctcctacctcagcctcctgagtagctgggactacaggtgcatgccaccatgcccagctaatttttatagagacaggacctccctatgttgcccaggctggtctcaaattcctggcttcaagtgtcacctgtcttggcctcccaaagtgctggcattacaggcatgagccactgtacccatcttgttcagtacatattttcattgtgaaagagaaatcagatcattgcacccttttccccattgaagatggtaattaccctttgttattacattcacagctttttcagaaacttcacaattttgaaaacatagcatcaagagtttgtgttgaaaataaataattattatttataaactataagtaacatataaatctaaaagtcgagcttctgtagcatactattaccattaaacacttctttcagtgtgtctccatgttaatctggaagaagaaacctgtactctggtgttagctgccctataatagaatttgcatatatctggttcaatatataatactgatggtccctgacctcaatggttcaacttatgatttttcaatttatttatttactttattttcatatacatatttttattatgctttaagttctagggtacatgtgcacaacgtgcaggtttgttacatatgtatacatgtgccatgttggtgcacattaactcctcatttacattaggtatatctgcacccattaactcctcatttacattaggtatatctcctaatgctatccctccccactccccccaccccacaacaggccctggtgtgtgatgttccccttcctgtgtccaagtgttctcattgttcrattcccasctatgagtgagaacatgcggtgtttggttttttgtccttgtgatagtttgctgagaatgatggtttccagcttcaaccatgtccctacaaaggacatgaactcatcattttttatggctgcatagtattccatggtgtatatgtgccacattttcttaatccagtctatcattggtggacatttgggttggttccaagtctttgctactgtgagtagtgccacaataaacatacgtgtgcctgtgtctttatagcagcatgatttatattcctttgggtatatacccagtaatgggatggctgggtcaaatggtatttttagttctagatccctgaggaatcaccacactgacttccacaatggttgaactagtttacagtcccaccaacagtgtaaaaatgttcctgtttctccacatcctctccagcacctattgtttcctgactttttaatgatcgccattctaactggtgtgagatgatatatcattgtggttttgatttgcatttctctgattgccagtgatgagcatgtttccatgtgtctgctggctgcataaatgtcttcttttgagaagtgtctgttcatatcctttgcccactttttgatggggttgtttgtttttttcttgtaaatttgtttgagttctttgtagattctggatattagccctttgtcagatgagtagattgcaaaaattttctttaggttgcctgttcgctctgatggtagtttcttttgctgtgcagaagctctttagtttaattagatcccatttgtcaattttggcttttgttgccattgcttttggtgttttagacgtgaagtccttgcccatgcctatgtcctgaatggcaatgcctaggttttcttctagggtttttatggttttaggtctaacgtttaagtctttaatccatcttgactaatttttgtataaggtgtaaggaagggatccagtttcagctttctacatatggctagccagttttcccagcaccatttgttaaatagggaatcctttcctcatttcttgtttttgtcaggtttgtcaaagatcagatggttgtagatgtgtggtattatttctgagggctctgttctgttccattggtctgtatctctgttttggtaccagtaccatgctgttttggttactgtagccttgtagtatactttgragtcaggtagcgtgatgcctccagctttgttcttttggctgaggattgtcttgacaatgcaggctcttttttggttccatatgaactttaaagtagttttttccaattctgtgaagaaagtcattggtagcttgatggggatggcattgaatctataaattactttgggcagtatggccattttcacgatattgattcttcctacccatgagcatggaatgttcttccatttgtttgtatcctcttttatttcattgaagagtggtttgtagttctcctttaagaggtccttcacatcccttgtaagttggattcctaggtattttattctcttgaagcaattgtgaatgggagttcactcatgatttggctctctgtttgtctgttattggtgtataagaatgcttgtgatttttgcacgttgattttgtatcctgagactttgctgaagttgcctgtcagcttaaggagattttgggctgaagacaatggggttttctagatatacaatcatgtcatctgcaaacagggacaatttgacttcctcttttcctaattgaataccctttatttctttctcctgcctgattgccctggccagaacttccaacactatgttgaataggagtggtgagagagggcatccctgtcttgtgccagttttcaaagggaatgcttccagtttttgcccattcagtatgatattggctgtggctttgtcataaatagctcttattgttttgagatacgccccatcaatagctaatttattgagaatttttagcatgaagcgctgttgaattttgtcaaaggccttttctgcatctattgagataatcatgtggtttttgtctttggttctgtttatatgctggattatgtttattgattagcgtatgttgaaccagccttgcatcccagggatgaagcccacttgatcatgatggataagctttttgatgtgctgctggattcrgtttgccagtattttattgaggatttttgcatcagtgttcatcagggatattggtctaaaattctctttttttgttgtgtctctgccaggctttggtatgaggatgatgctggcctcataaaatgagttagggaggattccctctttttctattgattggaatagtttcagaaggaatggtaccagctcctccttgtacctctggtagaattcggctgtgaatccatctggtcctggactttttttggttggtaagctattaattattgcctcaatttcagagcctgttattggtctattcagagattcaacttcttcctggtttagtcttgggagagtgtatgtgtcgaggaatttatccatttcttctagattttctagtttattttcatagaggtatttatagtattttctgatggtagtttgtatttctgtgggatcggtggtgatatcccctttgtcattttttattgtgtctatttgattcttctctcttttcttctttattagtcttcctagtggtctgtcaattttgttgatcttttcaaaaaaccagctcctggattcattgatttttttgaagggttttttgtctctatctccttcagttctgctctgatcttacttatttcttgccttctgctagcttttgaatgtgtttgctcttgcttctctagttcttttaattgtgatgttagggtgtcaattttagatctttcctgctttctcttgtgggcatttagtgccatacatttccctctacacaccgctttawatgtgtcccagagattctggtatgttgtgtctttgttcgcgttggtttcaaagaacatctttatttctgccttcatttcgttatgtacccagtagtcattcaggagcaggttgttcagtttccatgtagttgagcagttttgagtgagtttcttaatcctgagttctagtttgattgcactgtggtctgagagacaggttgttataatttctgttcttttacatttgctgaggagtgctttacttccaactatgtggccaattttggaataggtgtggtgtggtgatgagaagaatgtatattctgttgatttggggtggagagttatgtagatgtctattaggtccacttggtgcagagctgaattcaattcctggacatccttgttaactttctgtctcgttgatctgtctaatgttgacagtggggtgttaaagtctcccattattattgtgtggagatttttcagtttgtgatggtgtgaaagtaatatacattcagtagaactgtgctttcmgtgcccatacaatcgttctttccctttcagtactatattcagtaaactatatgagacattcaacactttgttataaaataggatttatgctctcttttgtgtgtgtcctttttttttcagacctggtcaacaggaagtataaattagggtttatattagatgattttttttcccaaatgtaagctaatgtaagtgtcttaagcacacttaaggtaggctatgctaagctgtgaggttaggtaggttaggtgtattaaatgcatttttgacttaatgatattttcaacttacagtgggctaagcaggatgtaactgtattgtaagtcaaggcgcatttgtacttcccttttggaaataataatctttgacattattttcaaggttagacatttgcgttgagatcaaagataattttttcaaacttagctctggcataaayaattacatgactttaattgtactaggtatagaagaaaaagtatttttataaataggcaaaataaatcatttttattgagcacatattatgtgcctaagacatattataccttctagtgtttatagcagtcttactaagtaaatattgcttttattttcatgtgagaaaatggaaactcagagaggttaaataacttgcccatggtcataaattcagcaaatgatggaattgagattagaactcaggtttttctgcctttccaaccccaccctttttgttcttatgacactgttcttgtataaatattgctgacttacatttgagaatgtcaggtatttcacgggagccagcacatgcaagagtgcattttaaagaagaacctctatagaaatgtcagactgtatatacttacttcagttatccaacatcatcatttaatgaagtattttccctgtagctttttaaagcaagcatttatgtaaaattttccctttgatatgttagaagtatccctaccttcttaaagtgttctgtaatttatataacatttatttggggtatcatattaggctcttgctgtgtgctttaataaggcagtggcctcaggatttgttaaatgtccttaagtcagttactgccttgaaaagtggtccatgattagtatatttttgtagttagtgatttgctgtcagctgtcatttctcaaggtcaaattctggcagttccttgcatcctattatatacatccataagctttgacctgtgagcctaaaggtatctctacaccctcctggagaaagatatagtactttgattcactgacattacattcctattttctctctctctctctctctctcaaatgacaaggtagctaattcttctgtgtgttccttaaggcactattaacactctagtagtgccagtgtttgtatgtttaaaagacctacagacttactttttatttcttttaaatacatatacttctcctgtgatcgtaaatatttgaatgtgatgctactgtatactggctgtgtatgtgtgaatacagccaagatgacaaaaagcagctgcagttatgctcagaaagagtgttgtttcatttacagtggtttcttttcttcaatgagtctgctgcctttactcaaaaatctccctttcttcactgtggcagcagctggagtctttgttactgtcactcacagccataccaagtgatgaaaaacaggtttgaaacttaaaatacttctctttccaacttagcttgtactcattgtaaattcaagtctctccacccaaatgactgaatcagttctgctttctattttgtctgtcagtgctttactggaattttcacttttgtcttagcagtaatagtgtagtgtgatttataatccacattcctctattaagtcattctgcagatttagatcctttgcttgtctctacagcacggagctcatctgtggtacctgagtgtttatggtatataatcatgcttacagtatatttcagcttcaccatggttaattttttttttttttttttttaagacagagtctcactctgttgcccaagctagagtgcagtggcgccatctcagctcactgcaacctccgcctcatgggttcaagtgattctcctgcctcagcttcctgagtagctgggattacaggcgcccgccaccgtgcctggctaatttttgtatttttagtagagacagggtttcactatcttggccactctggtctcagactcctgaccttgtgatccacccgccttggcctcccaaagtactgggattacaggcatgagccaccgcacccggccrgtcgtcttaacacagcagtattaatatgaactgggagctttttatccaactggaaacatggtaatggcagattctagggagtctcatagaagaaatacattattaggtatgaaaataacccaagcagcttattatactatgcagaggaatctcttaaagaatagtttcatctacttctttccattaatagggaccttatccaaatttttattttgggagcttacaacrtaaatatatagtgttaagttctcctgaatatacatgtaatacatattcagaaataggtgaactgtaatgtcacagctttgtcatggtcatttgtaactggaataataatatgcagatgactcttaattcttcacctctaatcctcaatcctcattcttttttaaaacctcagttttgaatcttcagctgcctactgggcagttaaattgacaatttcaacatcacctcagatccagttatttttgttgctcttttttttttttcttttcttttttttttttttgagacaaggtctcactctgtcacccaggctggagtgcagtggtgtgatcatagttcactgcactatctcccaggctcaagagatcttcctaccttagcctctcgagtagctgggactacaggcacatgccaccatgcctggatttttttttttttttttgtagagacagggtctcggtatgctgcctatgttggtctcaaactcctgagctgaagttatcctcccaccttggcctcccaaagtgctgggattacaggcatgagccactgcactggcctttattgctcgataaatgacatttaattaatacctaccacatgttatgcatcattcactcattaaactgacattcattaagcatctttatgtgccaagtactttgataggcactgggattcaagtggtgaataagactgaaatggtccctgcctttatggagtttaatgtctacagcataggggctgctaattgaataaatacttcaggattgactaatacaatgataaggaaaataaggggactcttcagatggagagcaagggtagctagccctgtctaatgagtcacagaaggcctccctgattgaagtcatttttaagccacgaattgaagggtgtgaaggagttagatgattgggggcaaactatttttttctctctatgccttagtttcctcatttgtagagataaaaagagaaaacaaatgaataaattccttaatgcatgtgaaggtacttagaacagtacctggctctgagtgtggctgctgtcttcatcatctgtatcgtcatcattaatcattcattcaggttttcaaataaacatctrttgagcacttacaaagtactaggcatttttcagtattgtggtgggattcagaaatgaaaatcataaaaatctatccttccaaggagatatgtatacaaatagctacaaagcagagagtaatacagcaagaactataagggaagtatgagccaatttctgggcaggagcattcctttttatttgggagtggtgtatgatttgtgccacttacttggcaagtgcttgtaaactgcctgtgaaatcttattttttcttgttttcttatttactttttgagattttgcctgtgtatatctttacttgccactgaaatttttcatgttgaagtgaggaagtatatatctcacagactgagatatatgaatagtaggtgctctgtatgctgatgagtagtcttaaaagcctattaaacttttaatagtaacccagtaccatttaatagtaaaataagtaacccaaaagggttacttactttaaaagcctcgtaactgcttaaggcctttattataatagtgtcacatgctttagagggactcagtgtagatgaagaaatagacgttacctcctctaaaataaaaaaagttattcatggatgcatcatctgttgattctaccaaatgtctgttctaatatttgctgtastaaagtgacatctttgacatcatttttgaaatgtattaccatatttaactgaaaaaaacagagtaacagtcaaaattggtaataattttaaattttgtttaacattaccaaaagtcgtataattcagtttggctgatacaaaatatgaggcttagcagacagttacatatttcaacaaattgaagttttcaaatgttgcttacatttctgtcttgagagaaaacagttattgtgtggcaaataacttattgcagtttttgaggaaagtgtatattaaaaacatctgtaaagatagtaaagtacctctgtttaactggtaagagatcagagttaacgtctcactttttgtagccaataatattctagctctgatttactaaaagaaaataaaaataacgaatattttattttctagaatcttttgttttatgtcttaatgtgttacattcatgattaagatgccagctttgttttcgtctaaactttaaagcataaaactgttctttctaaattttctttacaattaggtagaacattgaacttatcacaacaaagataccttctgtcttagagataatagatcatccataaaagctaattaatggatttcttagttaagagtagacttcagaaatgccatggtaataggtctttgtagtggcttttaatctcttaaaacatgaggcttgcatgggatgaggcatgaattaattttccagcttttgacggaattgaattctaaaaccatccacatacatatgacaatcacgtctaaaaagtaattagcttgctataaatacaaragatttcctgtgagaaaattgctcatactatctaaccaatagagaaatttggcagattagagaaaaactatatgttatctgaaagaatagaacccttcagttttttagtttgttttggctcttgtgcttttttgcttagattccattgtgagagaggtggcaggctggtttgacacaggtttatgtccaaaatcttcatggaaattttctaatgaatctattaaaatgcacaagggtgatttgtcatccaattgaaaagcagtctaatccttaggacaaactttagaactagaaaaacctggtggggttctcattcaactaagtagtagtgggtatgccttggctttttgtccataatgggaatggcaatatgcacttcttagaattactttttgaattgtatggagttgtgtggataaagcacctagcacaataccaggctcataaaagtcatttttaaaaatagtatttctttaccacaatcatccctctcccctaaagcagttacaaaccattgcagatggggccttattttatcatcttgggattcagatcattaggattctcagatgcactttctttttacgtgtttctttcccatgagaaattatgacatgacacgagaaaccgagcaagcaaataactaaaaccatagggtgttcctttgaatatttgtttcagggactctggctctctggaatttggtatacatttccagaaagcgtaggttgcatggggcactgctcaggagttacatctgtgacacagatatctaacttgagacattttgagatcaaagcgttctgtttcaaagccatgttttactttggttttagttcataagtaacctcatggaaaagccagccttttccaattcagtctgaactggaacaacagaatgaaaataaaccaaatagtttattatttttcttcatttactgccattaatagttttatgctaaagaatatattgaataagagtgaaccgaatggcatttatttcttcagtttagttctgttttcttgttgtttagttgaaggagagggaatggaagaaaattcttctgtttatgtgatatatcatcatacttttctacataaattgagtgcagaataactccaggaaataacaggaaagcaaactaaccaagttgagaccccccatgtctaccaaatggtttgtatgtgttaactcattcagtcccagcagccaccatctggcagattctgagcactgtgcttcaggttacattgcttaaaaattgaataacataaggattgtgaagtatggagcccagtgcacatttatcaaaagcatctgattcaagattttaatctagttccacctttttcaaagttctttatattctcttgtagtattctttcctaaattttctcagtaatgtagcaagatgaggaagatactagatagaattgtccttaaactgcctgctatatagttatctgtgaagaagcaaaagggaagcagtgtggtatgttgaaaggaactcaggattggaggtgagatttggggttcttgtctttgtcttaaaaaaaaaaagttgtgtttttgttttttataattaataatgtgttttttcattaaatcatgtccaggatcctttctagtttttttttttccccttaaaccaaaaccataataccatcattaataattatttgaccttaaagatctataaaagaaaggtgaaaatatttaaagccaaattaaattattgctttgagaatactattcagattatatggataagagctttggagtaagctttggagtaagaggaagtaagtttgaaaccttccatgactagctgcctgagttatacaaacactatctgtgacctcctggtaatatatatctgctcatttttataggtttgatctagtttactacaagggtgatatattagcaaaaataaattggaattactctaaaacagccttccttataccacagaattcagaataagttaaatctgcaggaggctataaccaaactggttttcctaaaggaactgcatcaaatccaaggtactcaacaaatgtatgtatcagagagagctttccaatgaagttccaggggtgggccttcctgctcattcaacagggaggtgctggagatattcttaatggtagaagaattgtagttggtttctttctgatataaatgcactcccaggtggtggtaagkgaggttctgttgattcatcagaatatgactgcacagtagcaggagctgaaraaatacttgttgtataaatgacctatatctcttaaaaaggaggatatgctcccatttctgtaccaaagaagagaaggctgagaaccctccatgactagcaaacactatctgtgatctcatggtagcatatatctgctcatttttacaagtttgatctagtttatcataggagtgatatattaagtagcaaaaataaattgraattactctaaaacagccttccttataccacagaattcagaacaagttaaatccacaggagactacaaccaaactggcttccctaaaagaactgcatcaactccaaggtactcaacaaatgtatgaatctatgagcattttcagatgccagagtaaatattagaaaccacgattataaatctacatatctggaaattaagaataatcacatacatacaaatgatgaaattaagtatgtgttgggcagtgtgatatagaggagagactgcaggacaataatcaagaatgccagattctgttcctgaatctgtcatattttgactgtaagggcaattgtatatatgtgcattgagggactgggagttgttcatctttctaggacttggaaggttaaaagatgaaagatgagttttctgttcctgtccactcctcagttggaaggcctgatttattcctctgtgtaaattttagaatgttcgtgtaaccaaataacagctacatgttttctaaaatctctggattttgtattttcaaatatgtgtgaacacacataaacwtcgcatatacatgtttatcatatacataatacatatacttgtaagcatacatacataagcacacacacagcccaaacacagaaaacaatacaaaggaatgattgcttctgtgtttatttttgccctgttattttatctaggcattttatagttttctgagtgaataaaaagaatggaaaaaggagtgagcctagcaaaccactactcaaatgtaacctcaattctccatccacaattattagctcattcaggaatgttttttcatcccttaagagtctttcctccaaaattcggtatcccattagagtaacataactctctctgttaaaaaagaaagaactattaataataacaataatgtataatacttcattttaaccttgtttggattttctrtcatttttctctccacattgattacaacatttccattttcactcacatattaaatatttactagtacttcatcttttatattttttaagttatattttattttctgcagttattttttgcaaaaatatctcctctaagattctttcgttgtagtacttattctaatgaagattcaaaagaacctccgaatttgaattttggtcttatcagtmggctrttcgttaagtcatctattggatgattaataaaatgatgaattttaagggactcgaagccaaccctttatacactcagggcagactcacagaggtttgtcatatgtcttttctctgtctgtagccttttagccctatgcattcttagtgaatattattactgaggccaatttgaactaatttggcaagtcatatttcatgagacaatttgctgatccttctctttgtagatttggtggaaaattattatggagatatttcttaagatttttattgtgggaaatacatggaaaattattttaagaaggaaatttaggctcattttagactggcagacagggaggcagaaacttactttaaatccatccttatttacatgtatcctaggtccactgtttaaaataagaatcttgtaaaactagcttataaaaatgtgaagagttaatatttataaaacctttgagttcctattagttgtgttgtataaatgcatttcttatttaaaatttgcatgtttaaagtatatattatccagtgcactggatacaaaagggaatgatgcatttatcttttttctatcataaacaatattgataagtgctggatggatgagtcattatctttcatattttaggaagcagaaaattattggtatgtgatgaatatgatgcaataggatgccttagctattttggttgtttgtttcccatctgacataaaaacacgtgtgagatggtttgcttgcttactttcttctctctgttcctccgctcccctctccccagtagatgatattgtatgtcctaattttatgtggcagcatggttttaagggacttcttaaaaacaaaaacaaaaacgtgcagttgatccaactactaattacccttatgatttggccattaggttgggctgattctgttttgatttggttttcagtcctaagtgtgtaactttttattaatatatatatgcagaattggaaagagactgtattttttaaatgttaaaaaaaaacattttagttgagcacttactgtgccaggccatttattaaagttccatcccgattgagcttattgtcaggttggagataaagcgcattcaacataccatctttccaagatgtgggaagaataagatattcttatcaatgaagcacaagaacctgtggaatcagaaagggctttccagagaaagtgatcctggtggaagaactggctatccagaggggaggatgcaatgccattcagggggaagagtaagaacagagtcctagagcaagagaccctggtccaaggatgaaagccatgtaatgttttaaaatctgatgtcatttctataattcctttgtataatgttcatcaagcttttttttttctacacatacttattgagcaccttttatgtattcagtggggggatctggcaatgaacaaaatgacttgttttgttcactcaaggagcttaccatctaatgggggtgcatgtaaatgaaaggaagggattataccctgcaataatatgtcatgatatttcaggatttgacaaaacagactcagttctgtagagaaaaatgctatctgaaatttaaattaaagccaagcatcaactatgctttggtagcaatgttataccagaaggactacagaagaaatgggtgagagcatttgcccagccaggacagcctctttacagtgtagtcattgttcgaaaagagacaatatgtgggaaaggaaggtggcagaagccatgagacggggtctgatttagcattctgagtaccaagactcctgtcctgagagttgtctacctttattgtttataaaattcaagattagaattatactagactagaattaacttccatgctagttgcttgaaatcaatccattattctgtttgatattctgtgagatttttttyccccctgactttgatggttggtttcgaaatccattaagtggatctcaatcaggtttgtttgtttgtttttgttttaatgaaataaagtagaagagaaaatagcacaaagaaaggaaataaattgctttatgaaatgtacgtgtgtgtgtgtgtgtgtgtgtgtgtgtstgtgtctgtgtgtctgtgtgtctgtagttggttgctatataaactgtttttcttgcattagataaactggatcaaacttaaatgactgtaagtaaacatttgccctgcaaagttataccttttgtttatgaaggattgtcttatagatgactccatagtcagtgtgctggactgggatgctgcaagtctggaccctggtgctagttctgcacccaaagaggcatatgctttggataagttataggctttctgtgaaccttagtgttttccatctaaaaagagagttggggctgagcatggtggcttatgtctgtaatcacagcactttgggaggctaaggcagatgggttgcttcagcccgggtgtttgagaccagcctgggcaacatggtgaaactcccatctctacaaaaaatacaaaaattagccaagtgtggtggcacacgcctgtagttccagctgctagcaaagctgaggtgggagtatcacttgagcctgggaggttgaggctgcagtgagctgtgagcgtcccacaccrctctagcttgggcgacagagcaagaccttgtctcaaaataataaataaagagttggcctaggtggacttggtactctttcagaagcagttggctataaaaaatcagttgtcttaaagttgattggacattttcacagttctctgttactaactcagagaagtgtttctaggaggttaaaaaaaaaacttgaaacaaaaaatatatatagcctactatcacatgattctggttcctgacggatgcttttctcccaacctccatccaaaagtatatggtccactgcaggcaaacagatcttctgaatgaaataaggggcataaaaacacatgggatggtacctgcatcatagggccttaaaaaaaaaatgtagagttgagaaaatgttgctcaagatctcagctcctgcactggccaccatcatatgggctacttgtcacaaaagcgaggaagtcatgagagggagggagggacacctctagagcctttattcatttccatttatcggatctgcatataagtgctcccttactcctttgtgagatgtcaaggtgatagaaggcatcttccaggtaccttttcaccactgcatgcagtagggaacatcaaataccagagggattctgcagtctcaacccctttggtgtaaagactacctaaaaagacaatccagccatataaaaagtaacagcccatttatctcattcatatgtttaaggtcagttttcctgtaggagatctctgagacagtagcaattaaactgagctgtatgtagcaacatagtacatgctacaaactaagttaaaattgtcaaagaacttttcgtttgtagcagtttcttaatgttatgaggcacagaactgtgtggccatcagaaagacagagctgctaacaactccatttggggcattgttaggcagttctgttgacacatgaatacatttcatatgattatcataaaattgtggcctggaaattgagcagccatggtgctgcattttagacttcacatttataataagctgtaataaagtaaacattttaaatggatataagaatagacattacttgcaatcacaaatgtatgttcaattgaagtgcttttgaagctcaatttaacaaagcaaacaaatttcctggcattattaacataattgttctcattgttgggttttgatttctaaaaaaatatttaagcaaaaaaacaagttactaaaaaacaaaattcacagaaggaaatgtaactaagaatgagttactttgcctttatcatgtcggattaaagttaaaaaaaaaaaaagtctcagatgttcattctgtcaccccctccccaccgacttgctgaactattgcttggcctgtttaactcagagctgtttaactcagagctcatatatcaggattaatttaaggttaaattcagctatttgctctgccatcagtaagctttgcagtgggcctactcaacatttatctactagtgaaactccaggctgtgtgatagttaaaacacggagcttacagaagaggactagaatatccattttacaccagagtggaggaagcatgactatatgcaaatttagcaccaattagatggtaggatttgaaggactgtggtccstggaatattccaaaagcaaaaatggaaatgatagtgataacatctgaagtgtggtggcaagacagttaaaacagtgctaatttggagcctctgggcacagaacagtaccaggaggcgatccactgtgtcttctttggcagctggcagctggcagacaaagcaaataatgagtctttggcttgttacttttcaccattccayagttttctccaattttgaataaacccccaaaacaaacatccttcctgcattgtcgttttactgtagcagaccctcatatagcaagtgtgctactggcccaacagtctaccacagtggaaaccacaggaactcagggttgccggtgtacttgcttaaaggttagcgtaggcacagcatggcattggtagggggcgcattcttcaaagactcacatggtgatttcttatagtcagggagttgagctgacttaatcaagattagaaggaggcatgctagtgtgagaatatcctgtaaaatactcaccacttgaaagcattcctggcaagcatatcatttacctgatatataatttcattaagcaccaagattgtgctrgttactttctagagaaaagatgaaaagctayctaccttaattatcctcagacttaatttcatatacccagaaaacaactttccagaaaatagtggtaaccacagctacctaatttagaatagatcctctgaaaacttgctaagagcagttgagtggtgaacgtccaaaaatgtacaacttttttctttgcctgcgtaattttgttttttttctttattcccactagaacacattctccttaccctcactggaacaactgtagaacagaaacctaaggaaatataggaagtggggaaggagggaacaaaatgagaaatttaatgtgattccaaatgtaatctttaagaacgtgaattgtgaaaattctgatctcccaaagatcaggcaatcagatacttctaaatgtagaaatctttagataatagcacgtattttacctgcaggctgaattttatgtttgcatcttttttccccctgcatctttgaaagtgaaagccggtaaaccagttgccagaacggaaaagactgttttaatcactggagcctgctaaaaatgtaaataatgctgataaatcagtaaaatttttgtatattactcaaccgaattgcacttaatccccatttcacagrcccagtttaggacacttagaactttcttcgtcttcttgtccacaccttttccctacccacttttgagatttctcctactttgtttgtcctatcttctttccagaccccttttctccaaactagtattgaccaacacatggcacttgaggctcatggttttgggattttttttcttcacatgcagcctatgtttcttatttctattctagaagattatattacattaaactcagcatgacctatgagagttcacatgtctctcctttagtttatggtgactgcaaaggatgctccattagctgaactcccttagctctttaactgttagtcatttcttgatttggagtaaacaataataaaattttccttttcctctagtgtgttgaatttcccagttagtaccaagaggtagtgcgatgtagagctctagatccaaatgctgtcttgaagaaactatttaaatattctcattcttaatttcctcattattataaaaaggataacagtgtatgtaaagtgctcagctacatcacaggtagttaataaatgttagtctctccccttcctttccctatgaaggaaaaaatcttagtcaataatttaaaaagtaaatatctatgatgaatataaatatattggctataaaccttaaattaattttgagtacaagttaccaaagtaatgaatttgctatttcctctggttttataacaccccaatatgtgaatgttcacacatacacaccaattaatacagataattggggagggcactttagtacttgaatatttcagaataaaagggttttatttgatgattttaaagtttcctgcttggagtttcagctctaaaatgtttatcagagagaagttattgtggtgtttttgggttttaggggagaagatatttagggaatgtgatacttgatgcagataatttattgtaatcattttcagattttcaacattttctgagtggctttttaaatagccgctatacctggagctgatgaggaaaatttaaataaatccatcatgaatgtttttcaaggagtgcatagagacacaaaatgaaactctagggmtctgagcaatgtgattatcactctgtacttacgtaatgcctttgtcaataacttcaagatttctttctcaaagtagaagaaatatagttgttgagaaagcatatataaaattgcaatgatctatgcatggcaaacagtaaaatacccaattggacatatcaaaggcaggttatagctgcaagttacagttggtcagaaggtctcagtgagactttgcattgacttgaggtacagacttgtaagaaaggaatcctagaagtttgtttgctcaggtgagtccagatcaccaygagaacattttttgctaaactaaagagttctgtgtttttagtctaatggttcaaggctgtgtgagtctgtggtcttcggtgcctgtaagtgccactaaggcaaattgagtgattttaaaggagaaagagtttagaagattaaaaggagaaaacctcaacattattgttggtgttctaagtgacaggctgaataagaagggaatctttatttattttttcagcattttggtttactcccacataaccacattagatctatccagaggacagttctcttgaggtctctctgtcctgtaagaaaggcakagktgaatagttgagtttaaaatgggtgagaaaggagatagttatatgtaaccagcacacatttctaaaagaatgataaaaaaagagaacactattggatccaaattgttagcatgtccttgaaagtaaatgtaaggactccttgaagtaatctgaactatacattgacatcttaatgaattgcctagttcaaatattattaggtctaatacattgtgaactttgttaaacatggatatttaataatcattaaaataaacttagttatttgttactgccagaagtaggtagaccatttattaaattcaatgtgaaaaatatactttatgaaatatttgcattagttgtgtaacagacatcttaaaaaatgggcaacatcaaataagccagtcattgtatgtataactataaagaaaaaagtgttagacatgcatattgcattttttagcctcctcctcatgttaatggtggatgttaaagctttccttggttgtatatcgattttattatcccaagcatgtattgaatccatgatctgcttataattctcatcatgcttggtattagtactaaacagagaaccaatatattatgccgtagagtttggcactctgtttagtaagtcattaccactacctcaccttacctggcagagctgcttgttttgtccatgtgacttcttatttttgctagttatgcctatagaaaggtcattcaacccaataatggcttctcatttagtctagaaatcagacaaaagctttgcagctgtgaaatgcagcccatttaaaaattaacctattgtaaattcttaatgattgagaaattctgcaatttgctgtgatttgtggtttgtgctgcaattagaatagcaaacagcagagatgatgcagtcagaatgacgtgcatttgggaagtgaagagaaagaaactttagcagatactgtgctgggttcaagccaatgtattatgcccttctgccctcatcagtcatatatcactttgtctcccacctttagactctyccaagtgaaatgtaatccttggaaataattacataaattactgttttaaatacttaaatactcaagaggtaaaattgtccataagtgtagtctaccttttcctcctttaatattttctcamcctagagcctagattcttagcggaaagaaggacatagatttttgattcatgaagacctagaattcaaattttgttaataaaacaaatcagctctgtatcctcatgcaaattacttaaactctctggcttcagcttcyacatctgcrtatctcactggactcttgtacagattaaattagatactgttttacttagtagggatacaatatgcttcttcaccatttastgtctattaacccctgatcaaattatataactcctctatgcctctgtttccctctgtgaaatggggatattaatacctacttcmtagggttgttgtgagcattaaataaataatgcagaacccttagaacagtactctacatctagttagtattccataattattaaccagtggattgacaaatcaataatcaacaaataacttacaatgatagataatgtaaatgaaacatgtagggtacactaagacaatttattagagctagaaaaataagcagggctatgtcatttagtgctttgtaatgggaagccactgacaaggatgacgtgattgaaattactttttttttaactgacctgtttcttgttttttttgtattatttttgtttttattcaccttctacatacagtaattcactccttttggtgtttgagcttagacaagtgcatataggcatagagccactactagaatcaagacaaaatagttccatcaccagcccccaccaccgccattaaaaaagagccccacatgacaacccctttgtaataaattgctttccccactcctaaatcttagtctgctttctgttgatatagttttgcgttttccagtatgtcatgtaaatggaatcacatactctatagcttttaaagtcaagcttcttcagttcagctcaaagcatttggaattcaaccatattgttgtatttatcaatagtttactaatagttcttattcctgagtagtatttcattttatggctatactgcaatgtgtttattcaccatttgaagggcatttaagttattcccagttttggatggtcacaaataaatatactgtaaacatttttattcaagtttctgtgtgaacaaatgttttcatttatcttgggtaaaatatctaggagtaaaattgccggctcttatggtaaatgtatgtttgactttataaagaaactgccaaactgttttccaacatggttatacaattttacatttccactagcaatatatgagagttcagttgccttgcattgttgtcaacactttgatattgtcaatatattttattttagacattctaataggtatatatagtatctcagtgtgattttaatttgcattttcctaatgactaaaatgattttgaacatacagtatttttatttgcttatttgtcatctatatagcttctttggtaaagtgtctgttcaaatcttttgcccattttttaaatttagttgtttgtttcttactgagttttaagatttttttcatgtgttctggtacaaattctctgtcagatatgtgatttgcaaatattttattataatctatgctttgtcttttcattctcttaacaatatatttagagagcataagttttaaattttgatgcagtttatcagttttttattttatgaatcatgtttttggtgtcatttctaagaaattttgcctaaccctaggtcacaaagattttcttttatgttttcttttagaagttttataattttcagttctatatttatttaggtgtactttacactttgatttttgtgtaatgtgaatgatgtagattgagatgcgtattttatgtatgaatatccaatttttccagtaccatttattgaaaagactatcatttcttcattgcattgcctttgtgccttggtcaaatatcaattgaccttatatttgtggatttatttgtgagctctctattctgtttcactgatccatgtgtctctctgcttaccaataataccacactgtcttgataactatagctttatactaagttttgagatcagttagtatcacttcttcaaatttgttctttttcaaaattgttctagtttctttggctttccacataaatcaggttgttgatatccattaaaaaatcctttggggattttgcttgtgattatgttaaatctatagatcactttgggaagaattgacatcttwacaatattgaatctttcaatccatgaacatggtgtatatctctttttatttaggttctccttgatttctttctttcatcagtattttgtagttgtcaacatgcagatcctgcacagattatttttagatttatacctatttcatgttttttagttgtgttaytataaattatactttaaaattttaaatttccaactgttcattgttggtatatagaaattcaattggttttagtattcttatagtctgcatccgtttatgtatgtatttaacatctttggattctgcagccttgttaaacttattggttctaggagcctctttgtatatccttctatgtaagtaatcatgttgtctgtgaataaagacagtcctatttcttccttttcaaccggtaggtcttttatttgtttttcttttaagcaagagaatgacttgattggattaacatttttcaaaagtaattgtggcttcagtataaggaatttatgggatggaaaaatacaaaagagaccagtttggaagctgtcacaagaatctgagacactgtgataggttggactatgatgatgacagtaagagaagaaacacatatactaagattatattttggttgtagaattaataggcctgagtaatggattgaatattaggggaaagaagaggaagggatcaggaggacaccaagatctctgtcacaaggaattgggtggatggagttgccatttactgcattggagaagacaagagaagaaacagatttggaagcaggtgaaaagttgagttttgaaaaaacatatatttaccgatatagttaattataggatataagaagaagagcttggaaatgagttagatctatgtgggaccccattcaaaggcttgtagagacattatttccattgcattgcctttgtagcttcagcatccaagatcataagatcttttttacctcaggcctttggacacgttgttaatcactgtcttaagtgtgtgtgtctcccctccccttggcactcccacttgcttttgcttcctttctactgccttccctccctcctttctttccttctttaggctggggtcttatcatcctatgggtcttagcttaaatatcatctccttagaacccacctaaagccagatatttttctctctgcattagtctctgttacacaatattttctccataggcattatcattttgtaaacattttgtagttgttttcttgtttgttgtctgcctttcacactagactacattccaaagatcagagactgtgtctaccttgtttaccattatgtcaccagtccacaacaccttaccgggcacatggttgatcagtatttgtcaggtgggaggaatgatggttctagagctcaggaactgtggcaagaaagaacatttgggagttattcacatgtagatggtatttaaaactatggaggtaaataagattgctagagaaagaaaagaatccagtaccagcccctagggacttgtcaactttaaaagagaagtagttagcaaagaagcctgagaaggagtagcaaaggatagaggaggaaaaccagattttgtttcctggaagcctagaaaagagaaatgtttttaaagaggcagaatttaaatgtgtaagacaatgctaaggggtcaaataagatgagtccatttgatttagcaacagaggtcattgacaaacccagccagagttttgctagagtggaaaaagtagaagccacatgagagtagatgaaagaatgatagtcatcatagtaaatacaaactagatggatatttgactgtaaattttgtgtatgagtatccacaaaatatttgccatccatcaaaactatcttttgggttagctctgtatatcagctaacactcatttgcctatataggtgtttaatacttgagtatattttataaacttggtgtttaactgaaacatttgctttcattttgatttgtcaaaagacaaaattacaacaaatttaaagatcttaattgtctttaatttgcaattctagaatcgggcaacactgtattccataaaatagaataagtgttctgaggagctgagcaagggaggttagttttatatacagaaaaaggctgaagaaagcagaaacaaatgacaaaaagtagattggtcatttaaagttactgtccttgtgagatgggaacagggaaacacaacaacagaaaaataactggttaacatcaggttatttcaggttactttttctgggataaggattaaagcagagggaactttattatcatgccaactgaaactggcctgtttcagaattttggctattatctccctctgatttctcaggtcaggtaacaactaagtttcagtttggtgctgtggggcttcagtataagtgactccattttggtttttaatctggtctgttggggcttagtgtaggagcttagtccaaactaatggcctcgcatactttttatttaacagattgtggtgctggaatagatgccaccttagacaccgagaaacaagaatagatgccatcttagtcactcagaaatagagtacaaatgcatgatattcattcttgtgtcaaagggaggatatttaagtcttaaaaccttttrttttgtttttggggaggtggggaaggagtaagaaggagaaagggaggcagagaaaagcttagagataatactagcctcctttacttaaccagctatcaacagtacaagctggttgataagctgaggcacatgattctggaatttaaggaaatgtctttcctgaggatctcctctactctaaactggtacaaccaatgaagagcacatattttattgatctagatcagagttaatgaaattaacttcatagaaattctgttttgtaccatgatctggtttctgcatctccagcaaagttcttcatactctggttgatttccactaagtgctagacataaatctgtgtgtaggttttagagataggatcagaaaggatgaatgaaaaggacttaggccagaggctagcaaatgtgcttggttcatgttgcytcatacacagcacctccaagccaaaagaaatacctaacaattccatttattaagcagatagatccaaataactaagtgtttatgtccaaacaacttagcatgtgttaaagagcatacaacttctcaaacyttggaatcagattggacaccacaactacatgtcctgttacaccttgatttttttgcacaatatgtggttttaatcaaaataactgccccagacccagctttacaaagacataatgtcgtctaaaggaattctgtattaaaactgtgaactcgcttcaactagtaatttttatggtgtccaactcctgtcactgtctttccctaaaaatgtaaaatattccacaatgctcttgtgaatttgctgtagctctmtggggtgcctcattgcagtttgcaagctgtggactcagagcattattccaagactttttgttttccatttaaatatttatttcttacgttttgtacctctacattaaaaaccaacctgatgtttatcatcattggtgaaacgtagtttattttaggattttttgtttcaaaaaaagtatgatagttaaacatgcatatgttgaaagtttggaaaatacagcaaaacatggagaagaaaataaaagtcacttctaattccaccatccaccaataaccactactaacatgtttttgtttatatctgtccagttattttctatgaaataatagctatgactaactctgattttattggatggtagaaatatgtagtttagtgtgaatttcataccctttagttgtgacttgtctataataacttgggataagtaaataaggtagagttatagctgcttctttcctaagtaactgctttcattagttgcgtatctgactgaagggcatgaagacaccaccattcatgaaggagaaacttcctgttgctgggtttctaacctagcaaatgcaagatgtgccatttacacagtggttcctcattatagaggcacaaacaccaatagatttcagcagaggaacgttttttgaagtactagtctaacgtgttttaaaaaggtaacgtgacacgtattttacttcttttagtaggcggacacactttcttaaagtaataatacgtcatggccctgctataaggtagtagttctagaagactgtttatctaataattcagactaaagctatttatattgctgtgacaccacgtggaaaacttttataattccatcttatttctgatgtatatgttttattttctctgccttcataagaactaaaaaccaaagttatttacgtgaaaacaagatttttgtttgagttcatttacttgagatatgtttaaaaaatccaccttctgtcacactatagaagtagattttgaattatcaaaaggtagaattataacttcagaaaagaaaaaaatggtcaatttagtttaactctatgtacaaaaatttatttatagtctcatatattcattccacacccccgttcttctttccttctttctccctctgtccttcttcttaataataatttttaattctgaccaaaataagttgtggcagtactttcttagcataacctggactgttgaagagtaattctgttctttaaaaaaatccccaatgggctgggtgcagtggctcacccatgtaatcccagcactttgggaggccaaggccagaggattgcttaagcccaggagtttgagaccatcctgaacaacatggggataccccatctctacaaaaaaaattgcaatattagccaggtgtggtagtgcacaactgtggtctcaactgcttgggaggctgaggcgggaggatgacttgagccaaggaagttgaggctgcagtgagctgtgaccgcaccactgcactccaacctgggtgacagactgagactttgtctcagaaaaaaaaaaagaaaaatctgtggtagggagccccatggagaaaaggtggaagcaagataaaaagacatggaagccaacctgagagttttcagtggccaaaactagaacaatttgagcaatgaaataagtgacgagtattttattataaaccaaataataaaataaatatccatgagtccataccaatacagataagcaattaaatgaataaataggggagaagggacaaatctttcttatggaagaactctagataatagatgtagaaggaatggaggatacagaaaaatcccattagaacaccgcaggaataattgctcaggcaagagttacagatgaatgccaaaattaataagtgaaacttttctttgagctgctaatttaaaatcttgagaagtactagatccgttttcatctgatagtttcttaaccccagattatttatagattcaaatagtataaaagtgtggtatgcaatcagatggatacaggcaacaaatttttttcaacataaaatatatggtgtgttgctctgtttttttcagaaacagtaaaacctcatcagttcaatgtaatttggggtacagatgtgaaatcttgttttataaatattttattctttttactttcaaggtctcattaactcaaactaggataacagttgattagaagacctgatggggtcctgttttagtaaataataatatgtaattggctgaggatgattattgtcatagtaacaaattagatctaaaattaaactcctctcccttataccggtcattcttttgatccgaccattattggaaactgtttttagtttgtatacatgtgggagatattatttttattagttaaatatattttaccacctaaccaaatgagtaacttgtagtgcatctatcttgggactataactggtgtgatcaatgaagaatgatgtattgttcttaaatacggaaatacgtttaggttagtagtggcaggtacgtgcattttctggaaagctctgtttaccagatttttagtggccaaggagatacacagatagttaatagtactgcttaattgttacagtcagattgagtaacataatttatagcaattctgaaactgagaacacaagaatgataagctatatgataaagaccacagttgctagtcagcaaaagtgcagactacacattgttgactagcaagccattcttgtaaagtacatatgataaaattttcttgacagctgttttcaaagtcagccttcctatgtcatcatggttcctttagtaaatttacttstaaggttttttttttttaattaagcagtgtttcttgctgaaagaaatcaaagaagatacaaataaatagaaagacattsgtgcttgtggattggaagacttaatattgttaaaacatctatactactaaaatgcattccacccctatcaaaatcccaatagtattttttgcagaaattaaaaaactatcttaaaattcatacagaatctcaatagaccccaaaaggccaaaacaatcttgagaaagaacaaagttggaggcctcacacttcctgatttcaaaacatacttcaaagcatctaatttagatggcatacttaattactggcataaagatagagatacaaatcaatggagcagaatagagagcccagaaataaatcattgcatatatggccaaatgatttgccacaagggcgccaatactacacaatgggaagggacaatcaatatcttcaactaacagtgttgggaaagcaatatccacatgcaaaagaatgaagttgaacccctaccttacaccatatacaaaaattaacacaaaaataaagaccaaaacataagaccttaaactattaaacttgtaaaagataacataggagaaatcttttttttggagatggagtctccctctcttgcccaggctggagtgcagtggcacgatctcagctcactgcaagctccgcctcccaggttcatgccattatcctgcctcagcctcccgagtagctgggactgcaggcacctgccaccacgcccggctaatctttttgtatttttagtagagacagggtttcactgtgttagccaggatggtctcgatctgacctcatgatctgcccacctcggcctcccaaagtgctgggattacaggcgtgagccactgtgcccggccaggacaaatctttaggacattggattaggcaatgatttcttgtgtgcaacaccaaaatcataggcaacaaaataaaaaatagacaaagaggactacatcaaagttaaaaacttatgtacatcaaaggaatcaatcagcagtgtgaaaaggcagcctacagaatgggagaaaataattgcaaattgtacatctgataagaagttaatgtccagaatatataaggaactcctacatctcaacaacaataaacaacccaattaaaaaaattgacaaagtttcttgtatactgaagaaagtatactgaagaaagtatacagccaataagcacatggaaagattctcagtcattagtgaaatgcaaatcaagaccacaatgagatagcacctgacaccatcaggatggccactatgaaagaacaaaaagtttaaattagagcacagtaaacaatgggcgtcaatttttttwaaaaaaaaaaggaacaaaaactaacargtgttaaggatgtgacattggaacccttgcatactgttagtgagaatgtaaattgatgcagccattatggaaaacaaaggggtcctcaaaagattaaaaataaaattatgatccagtgatactgcctctgggtgtatagccaaaataatttaaaaccggatctcaaagagatattttcacacccacgttctttgcaacattatccaaaatagccaagaggtagaagcagcccacgtgtccattgacagatgaatggctaaagaaaatgtggtgtatacatacagtggaatattattctacctttaaaaagaaagaatttctgtcacatgctacaacatgaataaacctcaaggacattatgctaagtgaaacaagccaatcacaaaaggacaaatagtgtgtgattctgttaatactcgtatgaagtatctaaagtagtcaaaatcatagaaacagaaagtagaaaggcagttatcaaggtctgggtagaggggaaggggggcaattagtgtttagggagtatagcatttcagtgttgcaagatggaaaagttctagacatacacttagcaktgctgaactgtacacttaaaaatggttaagatggaaaattcaatgtttttttaccacagattttaaaaagcaatgtttcattgcctaattttatatttggttaacaattttactgattgttctatgtcccaggcactttcaattattattctttcagtgacccagtaaattaggaacttgttccccattttagaaattaggaaatagacactgaaaggtttagaaacttatttctgttagaccttacatgtggtatagcaaaactgtgtttacctaactgaatgagttgtccaatacttgcatatacacagtgtttccaaaataaaagaatgggtccctagaaagcaaggcaagagaattgagactaaaataatgaatatttgaggataaatttggcaagtttgctacttggaatatcacttttttgggcatgtctagttccaaaaccactgagtgtattgcacctgttggatttgttgaaaatgcagatggtacaatcaaatgtaaagggaaaggaatatagtttgaaagtttttatgaagacatgtgctgcctaatctgcgaattgaaagcatcttttaaaaacttacttctcgtcatattcctaggtggtagtgaatatgtgggtagaaaaatgagaatgtttcagataatgctaatgaagttaaatgattgcagtctaccatattgtgaggaaaagttgttagccatgaaagatgaggacagaattaaaatattaccatgactggcatttgatttgaaaactacaaagataagcttaggttcctatttatgaaaaccattctcacagcccagtgaaatatcttttaaaaggttcgtagttaccatggatacttgttagctttgatagagtatccatattcagtcatctgaggtgaagaagccaaaaaacccatcaactaatgtcacaaatagcttcatctgtaaatttgtactagtttggggatggaaaggctaagtttcctgaagattagattgttggttaattgtcactgcttggaaagcaaaatatttaggatgtacattgcctgaatttgatcctagtattcactattgatatgtaactttttcatttaactagtacacggcatttcttagattttaacataggaatttagatggttagacctttctgaaagttgatgaaacctaggcagtatactcaatttctgaaagccgtagagacacagacaatattgaaggtattggtccccatggtaacatatttgcatttggcccagcatggctggtttctgcctagcttcttttaattgctatatattgacagccattttcacaattatttataaaatgtcggataagtgagcatgtgtacaagggagtgcacaccataccttaagcttgattagatacttcagatgacaaagagctctctgcatgaagagttactgaggtatttttatcatttcctaatgtgcctgtcacatagtagaagcaaaaagcctttcaagttatttaaatattttcctcaattctctttcaaaacaggtgacaaaagagctgaaacagtatgacaacaaaattatagaatgcaaatttgagaacaacagctgggtcttcatgagacagagaacagacaaaagttttcctaatgcctacaacactgccatgggtgagtatgacaacttaccagtgcttattmtatttaaaacaaaaattaaggtgttagacccaaagtgtgctgcctttgttgttttgcttaatggggcatagtcatttggacttcatccttgtttgatgggaaagatacgtcaagtctgtattctgtttggctccagttggcttgtaggttctactctctaaactggtgatcttgtgcccatgcacccaaaagagaagtttaaagggcaggatactgggctgtatacaagttgaatttattgaacaacaacaacaacagaaaccatgataatttcagatctattcaaaactataaaaaccattgtttgccagatggtaaaagacaaaattatcaggggaaaatgtaatttccagctcttaaaatagctttataaacaatggagaacaaagtaaacgaaaaccatttaaaaagacaaaatctgctatgctattcttcagagtgttctttgggtacaatatgaatgctttgsgaattcagaatagtaagtttctttcatggggaacaacacaaattaattgaagtttataaggtataccactaccagtagcagttgttgttctggattgcatttttagtggagttgaaaaaaggtaaaaaccaagataacaggttaatcaaactttacttttagaatgtgcagttgatgaggaggatgatgatgatgatatgataagctaatgagaaaatattgaaattgccaatttcagctttgcagtttaaaagttactgttgtacatttaggagttctcattggaactagcatccatgttcagacaagatgagttaatttcaaaagtcaggatgattaagccaatgtcttttcttctaagaccaaataggtaaataaaatgaaaaggactggcactaaattttgataagagaagataatatggtctgctagctacaatgaaaccacctattcaacaggaatggtggctggtgccatgttttatgtttcgtagagtagacttctttctgagagaaagattgaaggactatagtgcacgttttctgtagaagttttagttgaatacagactatggtgcaatgtgttgtgttagattaaaatcccataaaaactggtttgggagggatagaaaaccgtggggaagacatgcttatagcccaaacatttaaagttttggtttaaaattaatactgcagtaaagagtagccattagacaagcacatattttgggtgtagggtagggaggagatagttcaatgtgaagcacatcactcaaatgggtaaaatggaaagtatttagtatattgggatgaaaacctttctcataagcctgtggtgagtcagctgccttaattaaccctcacatgagacctgtctccctttgtccacagctgtgtgtaacagcatctcaaaccctgtcaccaaggagatgctgtttgagttcatcgacagatgtactgcagcttctcaaggacagaagcgaaaacatcatctggaccctgacacggagctcatgccaccaccacctcccaaaagaccacgccctttaacctaagacctgcctgtgacttsagggttaagaagaaagaggaatgaggaaaaaacgctgttgcccatttttgtmgccagagaaattgaaaaacgactgtggcttgatgttgatacacrtttgaattttttttaaaaaaagaaagttatcgtagccagcctgtaaatacttgatgcattcgtttcctcagtgctgcaatacatcrtggacktaaacatcttatttatctgataaactcagccttaccttgtggaatctgaagattgaaatatccaaaggtttaaacaagatggaaatcaatgaaaaagaggccttgtttatatatgggtagcttcacatttaatttataaagttaacaatctggaaactgtgagcccataaaacagtattttttagaagttgtgttacaactgtagcaaattttccttttaaaaaatccaggcaatggcattaaacattcttgctatcatttaccatggatttcctacatttctgagatccctgtattcaaaaacaaatgacagggttgttaagttgtactatattaaacaacttggtctggtttatatcattttaacaagttttttggaaatgtaaaagaaaaaagtaaagctccatttttgtgaattgcattgtttctaaaggaagtattttgagtattttcatctgtttgtattgtttcgactatgatatcagatatccagtgtgtccattctggcagtggttttgagttacttcatggaacttggacatacaccaccaggtcctttatgtgttgttctcctgggagacttctttttttaaatgccagggctacttctgctttacctcagtggtatcagcacattgtwaattacgttaaaacacacaactcactgtgatctatgggagtgatatcaaatacaaacgatgttgtgttccttctctcgaacaaaacagcaaagggaatgccagctaacttctttgattagaaggtaatgtcatggaatagaatgctgtcaccagaaaatgctctcccactgctagataaatgcagaggcaaagtgtagacatctgtaggaactaaatatcaaggaaatcaagacatttattttcaaagcgagaattctatctacattctattctgcggatgttatttctgttatacatctgaattttaaaatgtttactgatagataatggatttaaagggcggctaattgattgtctgccattgttgataaactgttctaattggtttgtgaaagaactctgagaattagctaaatggaggctagtgtatttatttttagaggtacatgttttaagtaaatgtatttaaaacaaattttcatggtctgaattgtatatgtaaatgcatatctgtgtaagtatatgcaagtgtatattcttctactgattcagtcagacacgaaatccaactgaattacccggtagactgaatatctgacgggatttctatatggacatagcacagatgaaccaaaaatgtatttatattcacctgagttttaatgtttttaaacaaagttttctcctgcagtgcttttctatatgaaatagttgagtcaagcttgggcttttttcttcgttgttcccaagtcatgtaatgtatagtgaatttatccaaaacgccattgtaacgttttttactagagtgtttttgcacatttgggcgctaaagggattaaaacaactgatgccacaatgactattgaaggagggaaaattctcaaggttccatagtatcttttacaaaatggattaaaaaaaaaatgcctatgcaacttcaaatagtctgatgcctgcttccccaggacgagtgactcttccacggtgtgctgctttccctccragcctgtggaaaggcagagcccttttgcagatacgaaagcaagcttttgccaatgatctttaatggagttaaaatgtttatggtaattgtaacctttcaaatgagttacgtgaaaagagcatctcacttttaatacacccagatattttcttcaagtctttgtgcattttagcaggacttaattttcttaatttattctttcctttcaattatagtgacatagagtagttggccttataagtagatcccatttagcccctgaacataataccatctgcagtattataaaagtcatttagaaggtcagggggataatctagaggcaggatyttggacattgtgaaggaaatgtgctccttctcagctcacttcaataactattttctgagactgaagttttttagacaagaataagaaaactttgctttcttcagttatcacatgtgaaagcttttgctttttgttaggaaaaggtgtggatgactctactgcgtggatggttacatttgctttccgtgaaatgctcagaaaatgtcaggacattccttttccaattgtgtgtcagtgcgtattgtaataaaactactgatttaaattagcataagtgtatctactttgttttactggtgatactcttgtgtcccttctattgctggcatcacatcctactgctgtcagccacacccagtgtaatccatctggctttgtagagattagcataaagacttggaaagcctctatttttctttctgagaaactgagaaatttgattgacacaggggggtgtagtttgaaccttttatttttgaagtggagaggaatgggagaaagcacatctttatatgatgtttatattatttctcttcatctaatcttagcagtctactgtatgagtagatattctgttacattatttttaatgcatttaaattttttagaatactcagcaatagcaataaatattctgaaatgatgaagtcgtgaactaccaaatttttttttgcattgcatttttatagtatggaatttgccatctttaaatgtttaaataataccaccattttgaactctgcatatagtttttcctggccaaaaaaataaccttggaagccaagaagcaaatactcccaagtgggaggacacatgtggtggagaaaactctggactagactcacacaagtccaggctctgcctcctgttggctctgttctgtctagatcctcccacacacacacccccatccacccctgccattttgttccatctataaagtggcaaatcccatctgtcacactgggctagattatttaaaagcctttccaggtctaaccatgattcctgtgttaaagacagtactttgaaaatctcccatattcaccataatagcagtataaccattattgattattcaccaactaccaagactgtcctaaacataaccactctatgcaggcaggtactgttaccaaccccacttttagatgaggaacctgagactaagttgtgagctgagatccagacataggtctttttactccagcacctacatttttgcacagtcctctcccaaaggcttagttacatacagtccctttgtggaagactgatttcatgccagggggtcccaaactaagacattttttgggtgctaacagggtaataggctttaagcacttctctctaataaagaaggtgaagttgggagcacagaagtaaatacactttagggccttatttaactatttatttaacaatacttaaatgtgagtgactaagcagccatgaaggggaagtttaatgttctcattaagatgctaaattctaaagaggtaattaggaagaaataagtgattaaattacacactgggctaacattttcctgattgtctcatagttagctgtcaactctgctgctttggcaggtcattgtcagccttggttaatgcagrtgggccccttccctcacctgactgatgtcaggtgaccactctgcagtatcaggaaggtggtagtggagcagactctgagcaggggccacctggtctccagatttcacatttcccaaaaccagggcatggatccggggttgccaaatattttgccatgtcagggcattaaaaaaacaaattatcttgccattatttagtaaaactaaggaactcttaacacacaaaaaggaagtaggacatattttagaagacaggcctttatatagaagaaattttgttttatgaaagattcactccattgtcctttgcttgtatattgcctccctagctgatgaaaactttttcatgaactggtgttgggaatcactgcagaggtggaattcagttggggctttaagtgggaaggggatgtggaaagtagcagcagcacttggtttcaaaactaaagatctattcacaatagcaaagacttggaactaacccaaatgtccaacaatgatagactggattaagaaaatgtggcacatatacaccatggaatactatgcagccataaaaaatgatgagttcatgtcctttgtagggacatggatgaaagtggaaatcatcattctcagtaaactatcgcaagaacaaaaaaccaaacaccgcatattctcactcataggtgggaattgaacaatgagatcacatggacacaggaaggggaatatcacactctggggactgtggtggggtggggggaggggggagagatagcattgggagatatacctaatgctagatgacgagttagtgggtgcagcgcaccagcatggcacatgtatacatatgtaactaacctgcacaatgtgcacatgtaccctaaaacttaaagtataatagtaaataattaattaaaaaaaaaaactaaagatcatttgcataaccagagctgtccgtagtaagttatttcatggtggttgattccaggggttgattacattctgtccttgtgatataaggtgtacagatgaaaagtgcagttatccgaatgcttatacatacccgaatagaatgaaaccttcacttgcttgaggtgcagaaataagcaaagcaaaatacaacactgaaaatcagcatttggctttgacaacaaatcagaccaacaaagtcaccggtttccaaaacttcgagcttgctgcacagtctatttttcctttagttcgctgccaccagagtgatctttcaaaactcaaacctgctcctgtcatcccccatgaagagctccctggcacatgacagaaaaggccctttgtgacctggcctcagcctgtctgtccagggtcattctgccttatgggacagaggtgtgactccttgtttttctcagaactccgtgccccctaagcccaggaatctttgcacaggctgctgctgctgctgcccgaaaccccggcctcccctcatctcaggatcaaggaaactttttctcatagacagactcctaaatctcacactattatggtagcctcccttggtgtcctctcaagacaaggagctgtagacatagcacggggactgtgccatcttggacccatagcacagagcttggcagtagtgggcacttggtagtaattagggcaggaggtgctaatgctcttttgcgcaattgtcctcctcagtttagccatgtgtgaacataatttcctgtcactccagccttctcaccataatagaaggactgwtaacattttttgtttcttaagaatttctcccagagtccatctctgacgtaccttgatttcatcctgattaaaagtatcttttctgttcttgccctttgcactgacaatgagtgcttctgacagaaccttctcagcaggaaagatcttttaaaaagtgccctggtctccttgctgtgataccctctgagggaggtgtgaggggaagagtgtttttaatcatgtcttatttttctagtggtttcactgaacttgccagtatcttaaactagaaggctccgtctccctacctactcattctcacctaatttctgaggtatccaaagagaagagaaatcttttggtaactgctgaggcttttcagttagttttaaaaacaaatttcagtccatgatcccttagtatgaatttgtgcttctagccttgcctttgaagtgggaaaggcaagtgaaagatattcttgttgctactactgaatgctattttccaggatctaaaggaataagaaactttatagtttctgtagttctgctttccttctgaaagccatcaggggaacactgtgtagttttgacctggagtataaacagtgtgctctgataaagataacacctacagagactgattgaacaccaccacaaccaaagctcttctataaaaaagattcttgaaaatgtgacatgtggataaaaactgtacaccaggagatatcacatacaatggggatgatgcagaaggtgggaggagatttaggcatcgatggatggggtgactggggcaggggaggtgtggacggtgactgtggggcagagtttgatggaggggtttgtccagagctgtgtgaaggagagtagtgggaagcagagctgtaatcactccatcttagaactaccaaaccagccaaccaactgcccttggtcccttgatatccctctagctgctgacccatttctctcttcctgtttcctacaacattctctgaaggagttgattgcacttggtcactccccatccttccctcctaggctctcttgagcccactgcccacaggcattcaactccatggaaactcttcttgtccctaccaccagtgctctctacaaggtcaaatccactctcttaactctcctaatcaacctctcagcaatatttaacacaatttgtcactccctcttttttttttttgctgtttataatgggaaatttcaaacatatacaaaagtaaacagtaaaataaactcctatttacagactcagcaatgttcaacctatgacagttctttctctatatactgatcggtctatgcacatatacacacgattgttttaaaataagtcataaactactccctctttggtgaaccccttttgcagttggcttccaggccactgtagtctcttggttttctttcatccaacctacaggccactccgttcagtctcccttgctgagcccttgtcaccctacccatctctacgagcagtgacccaggctccatccgctgacctctctctaagtgaaccctgctaatctctgaacacaaataccctccagacacaaacaacttccaaatatatttctagcctggatttctctcttcaatgctagagtcaaattccaactgacaacttgacatcttcacttgcatgtctgatagtcatcttaaactcaacacaccaaaaacggaacttccctcctccaacagacttccttctcttcccacagtctccttataaagcttagttaatggcaattgtatttttccagttgcttctgaatcatccttgactcttttcttgacgtccaatccatcagcaagtgttgtcagcactaccttcaaaatataaccagaatttgacagctcctccatctctccagcacctctcgtctcatcctttgcctagactgttgcagtagcctcccagtttccactcttgtctctccatccccctatctattcacacagccatcagtgtgatatgttttagaacttttcaccctgctatgcagaacctttcagtcccttccacatcattcacaataaaatcctaaatgcataccacagtccacaggtcctccataacctgaccccgctgctgctgctttgatctcatcatcttatccttctcctcattcactctgctcatccacattggctctttttctgcttctccagcttgccaagctagttcccactgaattttcttttcctctacctagaatgcttttccctcaggtatctgtaaagctcattctcttacttcatttaagactctggacaaatgccacaaatgcctatataaaattaccactcccattaccatctaccctcttatcctgctttatttttctacaagcatttatgatctgacatatatgttgacttgtttgcctattgtctgactttactctctagaatgtaagtttcatacgaactgagaatttgatttcactcattgctgtatttccagcacctaggccagtctggcataaagcatagggattcaataaatatttctacaatctatgaagtagacctacatggacaggctggggacagattatgaaggcctttgatgtctggcaaagaggttgggctaaacattatcaataataaggagctattgaaagcttttaaacaaaggagttttctttgtgagagtaatctagtaatgatctgtctgaggtgggagaaggaaggaaaacataggtgataagacacctaggaggctattgtcatcagatgaaaggtagaaaacctagaatagggtggcatctacagaaatggaagagatgggtgtgacaggcattcagtagggaggcttatcaagattcaacaatcaattgaaaagccaaagctaccttccagagtttgagcccagggagggaactggtagtgctcttaacataaacaggggagtgagay

SEQ ID NO: 94132 - DNA, 13624 bp, Homo sapiens
acaaccctagagctatcatcataaaattttagaatgccaaatatgaagtttccagacagaataagttgcctacaaaggaaccagaatcatattggcattagatttttaatcagcaatcttcaatgccataggacaataaagtattacctttaagttttgacgaaataacataaaaggttatagcttcctgagctatcaatcaagaataaaaataaaacctagatattaatgtataagcaaagactctgatatttatcaaatagtgatcttctctgagagcactactcaagtatgcaccccagcmaaacaacaaaggagtgcaagaaagtgacagacacagtagtgttaacccaggagagcgtgaaaagatactctagggtgatcgctgtgcaacagctagatccaaattagaacctagaaaaataagaaaattcagaagctctaaactaagtgtattcataaagaaaattgattccctgcaagaaactttaacacttaaaagtggataattttagttataagatggatgcataaaataataaaagtaagccaggcatgtatctgtagtcccagctactcaggaggcagagatgggaagatcgcttgagcccaggagttcaatttagcctgtaaaaaaaaataataataaaggtaaatagttaaaatatgctgtccctcttcctgtctcctaaaaatcactctcttaagtacctgggtttataagcataggatctcatttccttctctagttacacaatcacattacgtggttcttcattgaacaaatatttatataatcttattataaactacagatattggctttcagtttttagaatcaacctctaggcaaagcataaaggacacatatggttatagaacacaatatgtgttgtaaacctagacggtgaaatgatgacagcagccaagagacagatggagctggaacagtgaagggaaatgcaggggaaccaattttctcattttacagagtgaaaattcaagggaaactctaaccaataggtcaggatgtaaaagtccaaaaatactacttaaagctacagtggtagccaagagaggaactaaaaataaaatgtgtcaagcagaaactaaagtggaagaaaagaaagaaacataaattaatcattgttgtaatggggagacaatagatactgtcaaaaaattataaatcaaggaacagaggtaaaatcacatcattgcaagcacggcagtaactaccagaagaaccaaaaagaggaagtttaaaaacttgtatctctaaggagaaaaacaggctgaggtggctgaagaaaaaggaaggcttggactttttttttttttttttttttggcgtctctgtcacccagtctggagtgcagtggcacaatctcagctcactgcaaactctgcctcccaggttcaagcaattctcctgcctcagtctcccaagtagctgggattataggcatctgcccacgcccagctaatttctgtatttttcttttttcttttttttttgagatggagtctcactttgtctcctaggctggagtgcagtggcgtgatctcagctcactgtaaactccacctcccgggttcatgccattctcctgcctcagcatccagagtagctgggactacaggcgcccaccaccacgcccggctaatttttggtatttttagtagagacgaggtttcaccgtgttagccaggatggtctcgatctcctgacctcatgatccgcccgactcagcctcccaaagtgctgggattacaggcgtgagccaccacacctgaccaatttttgtatttttagtaaagacgaggtttcaccatgttggccaggctggtttcaaactcctgacctcaagtgatctgcttgcctcagcttctaaagtgctgagattacaggtgtgagccactatacctggccccagacttttcagttatgtctttcataccattttaaatatctctgtaccattaccatgagaaggtattttttaataagttaaaacatatatgcaaaattaatgtgcaatttaaaattaagataataattctctagatataagttaaataccttcaaggactgaagttcatcattgaccagatgatctgtaagaaatccagatctaacattctaaactacctggaaagttacctggaaagtctacgaatttaacttcacaaactgccaacatcatctcttctggaagtacattgtcagagctcctgaccccaaccttataagcagaggttgtctccaggaacatttctgctccctgctctgatttaaaataccagggagagaatctgttttgaaaacaatccacaagacaatattttccctaaggtcagctttaggagaggtggttctctttcttagaggatttatactgcactttcacataccgtaaagtattccatttggtgctcacagtacacaactctgaaaggcggagacagtgtgtactactacatccatttaacttaggaggaaactgagtcccaaatatgtaagttaccagcccaaaaattcttagcactaaataataaagatcagagctcaaacatgtctctgatcccaagtactgatctctccattaacctggttgcctctagcatcttcaaaagcccaataatccaaagacatacaaataagcaacaggtacatgaaaaggtgcttgacatcactaatcatcagggaaatgcaaatcaaaactgcaataagatatcacttcaattctgttaggacattatcaaaaagacaagcaataagaagtgttggtgaagatgcagagaaagggaaccctggtaccttttggtgggaaggtaaattgataaagccattatggaaaacagtatggaggttgctttaaaaaattaaaaagggaggccgggctcagtggctcacacctgtaatcccagcactttgggatgctgaggtgggctaatcacctgaggtggggagttcaagaccagcctgaccaacatagagaaaccctgtctctactaaaaaaaaagaaaaaaaaaattacaaaactagctggacgtagtgacgcatgcctgtaatcccagctacttgggagcctgaggcaggagaatcacttgaacccaggaggtggaggttgcagtgagccgagattgcaccattgcactccagcctgggcaacaagaacgaaactccatctcaaaaaaaaaaaaaaaaaaaaattaaaaagggggccaggtacggtggctcatgcctgtaatcccagcactttgggaggccaaggcgggcagatcttgaggtcaggagttcaagaccagcctaaccaacatggtgaaaccccatctctactaaaaatacaaaaattagccgggcatggtggcacgtgcctgtaatctgagatactcaggaggctgaggcaggagaatcgcttgaacccaggaggcggaggttgcagtgagccgagattgcaccactgcactctagcctgggcgaccgagtgagactccgtttcaaacaaaaaaaaaaaaagaaagaaagaaaagaaaagaaacagaatggaatggtggttaccagtggctgaggggaggggagatggggagatgttggtcaaggagtacaaattttcagttatgcaagatgaataagttctggagatctaatatacagcctggtgactactgttaacaatactgctttgtatacttaaaatttgctaaatgggtagaccttaagtgttctcaccacacacactaactctttacagaatagaaaaagaaggaacactatgctgactcgttttgtgagcaattgcaagcttagtataaaaaaaagtaaaaaggtcaatattggaaagaaaaattgaaggtcaatctccatgaacatagatgcaagaatcctgaacaaaatattaccaaactgaatccagcaattaaaattttaaaaaaatgaccaagttgggtttattccaggaatgaaaagttagatcattagaacataaattaatgtaatttagcttattcgttgaagaaaaattatgttgtgattttttttttttttttgagacggagtctcgttctgttgcccaggctggagtgcagtggtgcaatcttggctcactgcaacctccgtctcctgggttcacaccattctcctgcctcagcctcccaagtagctgggactacaggcgcccatcaccacgaccggctaatttttagtatttttagtagagatggggtttcactgtgttagccaggatggtctcaatctcctgacctcgtggtctgcccaccttggcctcccaaagtgctgggattataggcgtgagccaccgcgcctggcctatgttgttatcttacttgagatgagaaagtgtgtgataaaattcaaaacaacattcatgagacaaaaagtaaaaaaataaaatcacttacacactagaaacaaaaaggaatgttcttaacatgataagtatatcttcaaactaatgagcaaaaaaaggttttttcaattgtgaaatattaacacgtacttttaaaaatcaggcataataagatgttacataatcctcagttctactcagtgctgcattggaattctaacctgtgcaaaaataagaatacaagcaaagataaggaaaataatacagattcaaaaaatatctgtcattatatgcaggtattatattctacacagaaaacttccagttatctatactgtattagtccattctcaagctgctaacaaagacatacccaagactgggtaatttataaagaggtttaattgactcacagttcagcatggctagggaggcctcaggaaacttataatcatggtgaaaagggaagccaacacgtccttcttcacatggcagcggggagaagaaggaacgccgagcaaagggaaaagtcctttataaaaccatctgatctcatgagaacttatgcactatcacaagagcaggatggggggaaccacccccgtgattcagttatctctacctgttccctcccatgacacatggggactataggaactataattcaagatgagatttgggtggggacacagaaaacccatatcatatacattattagaagtaatagaagagtttagtaagtttcctaggcataaaatccacatgtgcatcaactgcgtttctaaacaccagccaaaaaacaggtggaaaataaagttttaaaatattatttacagtagcaacaacaaaataaggtaccaaagaattagtctagcaaaagatataccagaccttttggcagaaagttataaaactttagtgaaaggtcttcaataggacctaaataaagagaacaacaacactttttccatggataggaagattaaatatcttaaagatcaatcaattctcccctaaactttcatatggattccatgtaattcttttttttttttttttttttgagacggagtttcactcttgttgcccaggctggagtgcaatggcacgatcttggcttactgaaacctccatttcccaggttcaagcgattctcttgcctcagcctcccaagcagctgggattacaggtgcccaccaccatgtctggctaattttttttcatatttttagtagagacagggtttccccatgctggccaggctggtctcgaactcctgacctcaggggattcacctgcctcagcctcccaaagtgctgggattacaggcgtgagccactgtgcctggccgattcaatgtaattctaacaaaaataccaataagacatttcatagaacttggcaaacattctaaaatgtataaagaagggccagtgaccaaaaagctgaaacagggaaagtgttctgccagaaatgacatattataagtaattagattgtgtgttattagcatgaggatgaaaaacagaccaacggaacaaaaagagaacccaggaactgatccacactttatgatatatgatagatccagcattgcagatcagaggggctatccatatagaaaaaaaaaaagtgaaaatggatttctgtcccataccatacataaaaatcaatttcaggtgtakcaggaaccaaaacagggaaaacaaaactttaaaacacttagagaaaatacaaaagaatattctaatgatctgtgagtagggaaagatttttaatcaagcatggaaaatacaaactataaagaaaaaattaataaaactgactaataaaaagaatgctattgagtagaatcaccattaggagggtaaatagataagcctcaatgtgagaagatactcgtaattataaccaacaatgaatcattgtacagaatatgtagagtatgctaaagaaaaaaaaatgaaacgtacagaaggcttaaacaggcatatctgtgaaaaagaaatatgaacggccaagatatctacaaagacatactcaacctcagtattaatcagggaacttcaaattagaatgacaataaaatagattttcaaaaacagaagcccaacaaaatcaagcattgccaaaagtttagaaccacagacattctcatacattcctggcaggagttggctcaaccacattagaaattgtcattacttcatgcaccagatactatgaactggtttgctcaacttttattccaccttctcctagggtgccttcctatatttcaaagggcagaaaactaaaaaccccatttgcaagacacccttatagctagggttccatatacgattaaagtttgacccatccaatgctctcagtgagacctgaactgagttaagtgaagagagagaggcaaggctgacagtatttgttttactggcagggattaaaatggtggcttcccaattttagaaggtgatttcagagctgtgtttggttctggagccagcaggtctgacagtggcttcttgatttagctgaagtggtccctaattgtgcccaaggcactgtggctttggagtcagattgtattggcagctttccaattcaaaacatagcttcccattgacgggaaaagtggcagctttcttgatggctcagtgtggctttggtgtggccttgggaattatcactagaagttcagtgttgagtctatttctttaaccctcccaacaattctgtaaatgatcaatcatctatcataaatccctttctgctttaatgaatgagggtgcattctgccgtttgttctctacctgaatcaayacatcagcaaagttgtatttgtacatactaagcagcccaacaattgttttcctaggtatagaccctaaagaaactcttatgattcctcaaggatctagaactagaaataccatttgacccagcaatcccattactgggtatatacccaaaagattataaatcatgctgctataaagacacatgcacacgtatgtttattgtggcactactcacaatagcaaagacttggaaccaacccaaatgtccaacaatgatagactggattaagacaatgtggcacatatacaccatggaatactatgcagccataaaaaatgatgagttcatgtcctttgtagggacatggatgaagctggaaaccatcattctcagcaaactatcacaaggacaaaaaaccaaacaccatatgttctcactcacaggcgggaattgaacaatgagaacacatggacacaggaaggggaacatcacacaccggggcctgttgtggggtggggggaggggggagggagagcattaggagatatacctaatgctaaatgacgagttaatgggtgcagcacaccaacatggcacatgtatacatatgtaactaacctgcacattgtgcacatgtaccctaaaacttagtataattaaaaaaaaaaagaaactgttggatatgtaaaccacaaatacatacaaggatacttattgcagcactgtttgtaatgaaaaactggagacaacccaatatctatcaagagtagcatggataagtaagtgatgatataatcaagagaatactacacagatatgaaaatgaataacttatagttttacatatcagtgtggatacattgcaaaaataatgttgaatgaaaataactcacaacagactatacacagtatgattttatttatataagtttaaaactaaacattatttggagacatacacgtatatatgtaccatatgtatatatatatatatatatatatatatatttggaggtacatagctatatatatatttggagatacattggtatatataaataaatgtaaagaaaatacaggaaacagttgacacagagttcaggaaaatcactacttctggtaggaagaggcaggggtgttatcagaaagggttatacaggaggcttcaaggatactggtagtgtgtgattccaaagctgtgaatgtgggctggtattcagtcaagtttgcatgtatatcatatactcttctgtatatataagttatttgataattttaaatgttaaagaaaaataaagaatgagaaggcaagaaaaaaatgaaaatgttaacacaaccgaccacgcaatttcaattctgtcctaaagacatacccacacataaatgaaatgactataaagtatgaggttattattgcaacattatttgaaataacaagagattggaaataacataaatatttataaatttggaacaatggtacattcaacatagtgaagtagggtacggtcgtaaagtatatgaaaaaattcttccattgatatggtgtgatcctcagtgtgtgttcagtgaaaaattcatggtgaataataacgagattaacagccttttattttaaaaaagaaaaaatatataatatagtgctattaaataatagtacaacagtaatatacacatataagtggcctttatttataaaaaaaaaattaaaagaataacttagaaaccaataaaaatgactacctagtcaactctggacacatgacctacgagttagccctgctctgcaaggagcagttttttgtaataaaagataaaaacaaacaagcaaaaaaatgattacttacgggagaggggcagaatcgaaaagaagagattagagacaaccttctctaagtatatgttttcatatagttttaatttttaaaccatgcaaagatttttacatactcaaataataaacttaaaccctattgaaaaaaaaaatgaagcaaatcctggaattgaaaacaaactaaagtaaataaaactagtaatattgtaaataaccatccaaaggaaagagctccttctagactttgaagttagtactttatgcatgcttggtggcatacttctgcagagcaatcttaaatttcatttagcagttctattgctagtaaaaatcttagtatgttattttgaagcagtctctatttccctctctttcagagataattttatctctcagagagactccgtctcaaaaaaaaaaaaaagcaagcaagaaaaaagatcaagttatcaatagttagaaaatgacactgaaaacagacctatctcacattcctgtgacagaaccatctcactctgaatccattgtcggaagctttgctaggttatttggacaactgagagattctgagcttcctggagactgtccctctcgctagcaagaatacaccaaaaaagatggccctctgaagatagcttttaaacggttcagaatcaaagccctcacagggatttagcaatgacaggttctgaaactcaattacttgcaggggtttaaaaggttgaagaatctcttcttcaatgcaaaatttcttccacaccaaagaagttaaacctcacctttgaagggcctcaactttaagaatcataataatcagtgattctgggcttaatcagtctttgttgagtaattggatttcttttttttttttttttaaagtctcaagctcaagtggccaaggcaagacgggtcaaagtcagagtggtggtcacagtcctggaggtggcaagaaggatgacaaggacaagaaaaagaaatatgaacctcctgtaccaactggagtggggaaaaagaagaaaacaaaaggatcagatgttgccagcaaactgccactggtgacacctcacactcagtgcccattacaattactgaagttagagagaattaaggactatcttctcatggaggaagaattcaaaaggaatcgggaacaaatggaaccattagaagaaaagcaagaggaggaaagatcaaaggtggacgatctgaggggaccccgatgtcagtaggaaccttggaagagatcaatgacagtcatgccatcgtgtctacatctgtgggctcaggacactacgccaacattctttcatttgtagacaaggatctgctggmaactggctgctcagtcctgctcaatcacaaggtgcatgccatgagaggggtgctgatggatgacgtggatcccctggtcacagtgatgaaggtggaaaaggtcccccaggagacctatgccaatactgggaggttggataatcaaattcaggaaattaaggaatctgtggagcttcctctcacccatgctgaacattatgaagagatgggtataaagcctcctaagggggtcattctctatggtccacctggcatagttaaaaccttgctagccaaagcggtagcaaaccaaacctcagccactttcttgaaagtggttggctctgaacttattcagaagtacctaggtgatgggcccaaacttgtacgggaattgtttcaagttgctggagaacatgcaccatccatcgtgtttactgatgaaactgacgccattgggacaaaaagatatgactcaaattctggtggtgagagagaaattcagcgaacaatgttggaactgttgaaccagttggatggatttgattctaggggagatgtgaaagatatcatgaccacaaactgaagagaaactttggatccagcacttatcagaccaggccgcactggcaggaagatcaagttccccctgcctgatgaaaagactaagaagtgcatctttcagattcacacaagcaggatgatgctggcagatgatgtaaccctggatgacttgatcgtggctaaagatgacctctctgatgctgacatcaaggcaaatctgtacagaagctggtctgatggccttaagagaacgtagaatgaaagcaacaaatgaagacttcaaaaaatctaaagaaaatgttctttataagaaacaggaaggcacccctgaggggctgtctctctagtgaaccacagctgccatcaggaaaatggttgggagatttctcaatccctgaaagggatgaggttgggggatttgcccagaggaatccctgttcccagtgatttttattagaaaaacatcctgtgtcttttggagtacaatgtgtaagtgcccattgggtggccttcgtctgttggtcactgtgcagcagtctgcttcccagtaaagtgtgctctttctcacacacacacacacacacacacacacacacacacacacacaaagaatctcgctctgttgcccaggctggagtgcagtggcacaatcttggctcactgcaatctctgcctcccaggttcaagcgattctctgcctcagcctccagagtagctggtattacagacgtgcgccaccacacccagctaatttttgtatttttagcagagatggggttttgccatgttggccaggctggtctcagactcctaacctcaagtgatccacccgcttcagcctcccaaagtgctgggattacaggtgtaagccaccacaccagccagacttcttaaaaataatattttctgtacaaagcaagagtaagaaggtggtcaggagacttatcagattgaaatgatctccatgaagtcccagaaaggtaaaggagacttctcacttcccactcagctctcaggcccatgaaaaccacccatccacatcatacatactgcaaggtgacctgaattccaaagtcctgactgcttctcaccttttatcctccccaggaactgtagttaataacattcaccctgtattagtccgttttcacactgctataaagaattgcccaagactggataatttataaagaaaagaggcttaaattccacatgtcttgggaagccaacttccttgggaaggaaacttacagtcatggcagaagggggagcagactcatcttacatggtggcaggcaagagagactgtgtgacagcacgagaaaaactaccattataaaaccatcagatctcgtgagaattcactcattatcacgtgaacagcatgggggaaactactcccatcattcaattacttttctcccttgacatctgaggattacaattcaaaatgagatttggccgggcacagtggctcacgcctgcaatcccagcactttgggaggccgaggtgggtggatcacctgaggtcaggagttcaagaccagcctggccaacatggcaaaaccccatctgtagagaaaatacaaaaattagctgggtgtggtggcaggtgcctgtaatcctagctactttggaggctgaggcaggagaatctcttgaacctgggaggcggaggttgcagtgagcagagatcgcaccagtgcactccagcttaggcaacagcatgagactccatctcaaaaaaaagaaaaaagacaaaatgagatttggatagggacacaaagcctaaccatatcacaccccattggccacccacccacctcctcctcctagaagctcttccctccctgtgagttggcaggtgaacttctgttgttcctttctggccacatctcccacctcctttactcactctactctcttcctctggaaactaaacataggcatttcacaaggctctcctctcttccttaaaaaactcactcattttacaccttcaactctctccttcatacagatgattctgttttatcagctcacccctcacttcactcttgagtcccagactcaaatttccaactacctgctggaaatctgcacttcattggcccatggctgttttaaactccatctgctcaaaaccgaaagcaagacaaccccctgaaaacctacttcttctgcactttccactcttctgttccttcatgtgagaaaatatccacacgaagtacagcacatattctcgtctctgagtgtaccatcctccctgcacccctgcactcaactagaaatttccattctccttagctgttttctagtgcccatactactgattctgaactcaggggattatctgcaaacacaagttccaaggccccatctgcaggtttgaaaaccactgctcttgacacaacattttctaggtgaaatcagaccaagggaatgcttgtaccacatcagacagtcccctgttaaaactgttttcacggggctgtgatttgttgcgatacccttggctgcttaaaggctgctacaaaaaggcatatgattaaaattgctgttgtactcatgccagaggcgtagctgagcatgttaacattacatcacagagggggccttttatgaggcagggtccctgactgatgagcaaaccaccagaggagggtcaggcgagaggcccagtggagggtaacacacatggagttcagtgacccctttgttccttgaggagagaggacct

SEQ ID NO: 94133 - DNA, 119599 bp, Homo sapiens
ttcctcggagtctcacaactagtaagggacaggtttcattctcaaatccatgtcttcaactctatggctcttagaatctgaaggaagattaaagataatctactctactttctctcatgctaaagtactgtgcacctgagtagtactgtgcaccatccctgactagtgtgtgtatgtgtgtgtgtgtgtgagagagagagagagagacagagagacagagacagagacacagaaagagggggaggggagataggatctcactctgtcatccaggctgggatggagtcgcatgatcttggtttactgtaatctcagtcttctaagatgaagtgatcctcctacctcagcctctggactagctgggactgtaggctaagttttaaaaactttttatagtgatgaggtctcactatgttacccaggctggtcttgaactcctggactcaggcgagcctcccacctcagccttccaaaatgcaaggattacaggtgtatgccacagcccctgagccattcctgacttgttatccagtctcttctgtcatatttccagtgttgggaaattattacttcatgaagcaatgcattttactttgatctactagctccaatgattacaaaatggtatgaccaagtatacatatgagagttggcagatggatgtttgaaacccagttccccattttattaggtaggtgaatttgggaaagttatttaacatctccaaaccacagtttcctggctgggtgcagtggttcatgcctgtaatccctgcactttgggaggctgaagagggtggatcacttgaggccaggagttcgaaaccagtctggccaacatggagaagccctgtctctactaaaaatacaaaaattagccaggcttggtggtgtgcgcctgtagtcccagctattcgtgaggcacaagaatcgcttgaacccaggaggtggaggctgcagtgagctgagatcgtgccactgcactccagctgggtgacagagtaagactctgtctcaaataaataaataaataaaaacacggaaaatacctattttaagtgttaatcattttatatatataataaactaatgtataaagactaaataataatatatattaaagtatctttctaactgtagccaggcgctggggctcatccctgtaatctcagcactttgggaggctgaggtggatggatcccttgagtccaggaggtggagatcaacttgggcaacatggtgaaaccctgtgtctactaaaaatacaaaaattagtcaggcatggtggcgcaggcctgtaatcccagctactcaggacgctgaggtacgagaatcgcttgaacctgggaggcagaggttgcagtgtgctgagattgtgccactgcactccatcctggatgacagagcgagtctctgtctcaaaaacaaaaaaaaaaccccaaaaaacaaaaaataaaataaaataacatatcttgctaactgtaaagcataatagaaacagattttaactttaaagtggttaataatcctaaaacctacatgccatctcagtactttcttgttttaaatatccaaaggctccccttgcccaaagaacaaagttcaaactcattacggtgttcaagacccttaagaaattgtctccaattaacttcaatgatctcttccagccactaacaccactctaggtaccaaccaaacttagtttcccactctttccaattgcagaccacattctttcatacccagaacttcacagaagttgaggatagccagggacacttacatttgtagttcaaacttgaagacatgtccaaacattttctgtagcatattttataggttttcatctaccaattatgcctctgatacacaaaaaacataatggtttattgttgtgctattcataactataaggttaactctagaaaattaattcataggccgggcgtggtggctcacacctgtaatcccagcactttgggaggctgaggtgggtggattacctgaggtcgggagtttgagaccagctgaccaacatggagaaaccccgtctctactaaaaacacaaaaaaattagccaggcatggtggtgcatgcctgtaatctcagctactcgggaggctgaggcaggagaatcacttgaacccaggaggcggaggttgcggtgagccaagatcgcaccattgcactccagcctgggcaacaagagtgaaactccgtcacaaaaaaaaaaaaaaaaaaaaaggaaagaaaagaaaattaattcatagtacataccagttgatgaaatgagtttagatttgtatgatgaatatcttcctttttattaatagtcctgtgagttgatcccagcgactgtgtacacatcgaagttccttcgccaatgtggagcctcagtcaaaaggcagcctgttgcttcattctgccaagagggaccctcttcgtacctctgtgcctgtccatatgcttttcctaattatctggccagctgtgactcattatctgagatttaattcacacttcattcctgaagctttccaagatgccatctcctacctccttaatgttcccagcatgtacctgacaatatcacctaataagcggtatgatagaggagactcagaggagtgtgtttacatctacctttattgaggaagaggtctgtgactactgagccttacactgagcctggcacagagcagttctcgatggtctatgattcttggattttggaagcaatgggaaataccaacatgtaaacagttcctggtttcttgggataagtattcaagtctggtcagttgcctttatccggatattttgttgtcttcatgacttcatttctctcctttaatgctcttgttctgggatctcatgcttgaattctttttttctgtttgagtttaaaataataacatgggccgggcatgtggctcattcctataatcccagcacttctggcggccaaggctggagcattgcttgagcccaggagttggagaccagcctgggcaacatagttagatcctgtctctacaaaaaaataaaaatagctgggtgtagtggcatgggcctgtagtcccagctactccggaggctgaggcaggagaatcgccttgagcccacgagttggaagctgcagtcatttaggatcacactgctgcactccagcctgagccacagagcaagaccctgcctctaaataaaaatcaaaataaatatgataataacatctttaaaaagtgcaataagtgtcacagcattcttttgataaggtttctttaaagcacactagacattaatcttgcgggcaggaagtgggtgggtggtacatgtagagatagtgcaggataaaaaaatatatatcttaaaaacttggtaaaggtggccaggcgcagtggctcatgcctgtaatcccagcactttgggaggccaaggcggacggatcacaaggtcaggagatcgagaccatcctggctaacatggtgaaaccccatctccactaaaaaatacaaaaaattagccaggcgtggtggtgggtgccagtacctgtagtcccagctactcgggaggctgaggcaggagaatggcatgaacccgggatgcagagcttgcagtgagccgagattatgccactgcactccagcctgggcaacagaacgagactccgtctcaaaaaaaaaaaaaaaaaaacaacaaaaaacttggtaaaggtataatccctttttctaacttttctattttttgttaatagcatcaccattttcctagcttccaagtcctctttctacgttaagggtttttgttttttgttttggcagggtcttgctctattgcccaggctgtagtgcagtggcatgatcatggctcactgcagcttcgacctcgagggctcaggtgatcctcctgcctttgactcctgagtagctgggactacaggtgtgcaccaccacacccagctaattttaaaaattatttgtagagacagggtctccctatgttgcctaggctggtctcctactcctgggctcaagtgatccccctgcctctgcctcccaaagtgctgggattacgggtgtgagccatggagcctggacggaaatttttaagttaatcatttaaattctgatatatcttctttcaaaaattatttttagatttcttccccattcatattgccaataactagacttttctttcctccattattgcagcatttcgacaacctccagctagtctcgtctagatagatccttttagtcgttctagacactttccataattagtcttcttaagactagtttttccagtgttgtagtccagaacttgctacttagctcagcctaatttctgcattcctcattcaaggccttccccactttagctccaaatttctctctctgttgcttactgttggttctttgctgggggcacaggtgacctttcctatgtctaggaacatatcaggctttatgttcttccctttcctttcagtgtctacattgtacccattcttcaaggtccagagggaatgccacttccttcttgaagtttcctggcagctccaattcacactcatgacatctaaataattatcctcatgtgttgtacttgggacaaaatagttgaatcctctttttcctcttgtttcgttaacaggatacctaaacggaccattacctgcgacaacgggacatgcgcggatagctatctgaagtacaaatttgtcatttccaaaatactggttctttttctaaagaagtagtaaaaaagaaagaaaaaaaagaaccagtattttggaaatgacaaatttgcttagtcgcccaggctggagtgaggtggcattatcaaagctcactgcagcctcaatttcttgggctcgagggatcatcccatctcaaccgctccagtagctgggaccataggtgtgcgtcaccgcatctgggtaattattttttaaattttaatttttttgcagagaccaggtctatgttgctcaggctggtctcgaactccgggcctcaagagagtaaaatcataaagtgctgggattacaggaaacgcagcggacccaaattctgttctttactcatacctagcagctcctctggttgcctgagggaccatgtctcaaacactatcatgtcgtattaatttttctttttgtttaaaagctgaaagtgagagtacagtaggacgtctccgggctccaactacgtcctataagcatgcatcctttattctgaatgcgtgtgaaataaagtttgaaaagaataaccacagacatacttgtgaccacaagccacaagaaacgtagtcaaaagtgcactctcagtgctgctgccgaccgggcacggcgctgggcctgcatttgcgctttcctggagcctcagtgtctcatctgtacaacgttgataatcgtcggcagcacctctttcccagggttgctctgaagggttttctttggggtgaaccgccaggcggtcggcctcccaggagcggggggagacgccttccttacgcgacgcacttccgtgcgcgaggagggaagatcgtggctgagtgcgggtggcctgggcggaaggctcagcggggacaggttgggccgcagctttgctgtgctgtgccgtgcgacgccctccgcaggagcgcgcaaagtgttagccacggcgccaagcaagctggacgtgcgtgcatgagcgcgctcggactgacagggaagcgaaaagggggccagggcgcaccatagaaaagccgcggcagaaacgtacgacacagcccgaggcggcgggggcgagagctccggggcagggacggcgacgcggcgtacccggtttggcgcccctgcgcggcggtcggccgtcccgcagcgccccaggtggccgccggcggggtcgccgccgggggagtggatttctccgcctccgccgggctcggctgccctcggcagcttccccgcctggctctccctcgaccctcctcccctccccctcccggttcgcgatggactgggcctccccgccgcgccgccgccgccgtcgcccgcagcaccgcgcgggcctctgagttgcagggcctgaggagccgcgtgctggggactggacgtccgctggctgctgccgcacgcgagaacctctcgcttccctgtcaccaggtcctcgcggaggaaggggagggacgaggcgcggcttttcctgtgccgcctgcccggttcgacctgcgcggcctgcggcttcttgggaactctagggccgcggccgggcctggctctgccggcggcctgttgggagctggatcggagcggtttggaacgacaagcccgagtaagagcctgcgggaaggggaggcgggagcgcctcggaccgtcggaagggccctgcgtgggggcgcggatcccggacgcccggcgagtggcggaaagcgagaccccggcgccgagtgaggtcggccaggctgctgccgacttccccgctggcccctttgttcccctcccggggccctgccggcggcggggcccggttgcccgcgccagagcctcaggccggctccttttgcccttgagaagggttcgctgccaggccttcgagttccgggcgcagctcccgggagagccggcgccctgcctggcccggcggcctcctctcgggcacgaaggcttgctgctgcttctccagaacttcccttcctcgtagacacaggtagttaacttagcggggtttggtrctggggaaccacagcgcgggggccagcgcctctcagcgcccggctcggccgggccccgggtgtggggtcaaccccgctggtcgccgccgttgggtgcccaccgcgccccgccgccggcttcccacacttgcggctgcgttacgtgggacccaaagctgtcctccagtcagggcgcttacggggcgcttttgtaatgacttacctgttggggttgcttctcggttttgtttttgtttttttaaccaactgccctatcttgtgaagctggggaaagagggccctaggttggcctacattcgttcggatccgtaacctgctggtccattgcatttacttttagcctttccttttttaatttttttatttttttaacttttaagaatagttgccaagactgccaaaattcctaaccaactctttattcatagataaatcttgtatataattgtcgtttgtatttggatatctttaaaatagaagtaaattgagaagtcagcagaatatgtgaaattggaggtaattttgaaggagaaacaatttggagggggattggatcaaggtgtttagagtttcctcaaaatactgaatctaacccttatctgaagatcagttttgggtagagaaggagggggatgaagtttgctggaaaaaacagaacctttagttaggtgttctttgccttttggcatagactttagtgatagcagtagtgggacctgaagcttgactgactgtctttgacacagacagctctggtttctagttaagcagcaacctaatcagcttatatactcttgtgcaaaactggttttcatttggtatgatatctgtacgttaaacctggcggataaggaaagttgaaaaactgcattaagyactcttacgtccaaacgtacttaggagtcttttttaattgctaggaggacactatgaaaatttggttctagcagatgtaaaggaagaaaaatttaagcccaagctgttcagtcccggaatttaaaggacttttctccctttacttttcaaatttaagcaaagagacttttaaaaaaccatggcagatgtggacccagatacattgctggaatggctacagatgggacagggagatgaaagggacatgcaactaatagcccttgaacagctatgcatgctgcttttgatgtctgacaacgtggatcgttgttttgaaacgtaagtacattccttcatcatgttcctttgggttactgtagtgacatctgttttcaaccatttgctgacttcagtttgtgtagaaatttctctagtgaattttaacacgtatctttaaaaatattcctgaagagttttgtgtttacacttttccaagaaataaaaattggtaggtgaagaaactctaggactgatgattacgatgacacaaatacatatttgttgaatgaatgggaattagtaggaatattaattttaacccatagcttggttggttcattttcaaaatatgtcatgaactggggaaaatacaaatatttattttcttaaaggtatctatttctgtaccatgaaattgatttatggaataagagatgataataaacatatgttttgaactgcccatttcttcattgatgttgtcatatgacagtacttttgttaaagccgattattggtttgtaaatttcagtttgggaaggtataaattggatcttaaccgtgtagcagaagagtagaaaatttggagtagtagaaacattttgaagtttggggagtttaaacagttttattgggaggttataacttagtatatatgcaaaaatataaaagagaattcttactagatagaccttacagccatttttttccctcttatataagtcataacttgtccagtcagaataaccattcttctgagtgttgaacatgtgtttcgtttttactgtttattttacatttgtatttacagttttgaactccagtaataagtaattgaaaactctgatgtttctttattcattttaatgctattttaaggtaattagtagaaaatgtttgagatgttgacctaaaaaatttggtataattatcctaatgtgttttaggtgggaataaagtttatattactcagttggcaaaatttttaaagtaccttcatttttgattattgaataactttcagttgtaactcttgttaaaacagtactaagataaaaatccttactaataaaatttccaaattacaattagttagtggtccatttatttccattagtttttgtcattggcagaattttgagtatgtaagaataacttagcccttagttgacacttgttttagcaggatttatagtaaagtagattttttaaaatttatttttattttttatttttttcctcatcctgactctcaagttaaaaattgcgttcatagatttcattagaggtaacctgaaagttacttttggtattttaaaaatcatacttgtcagtcaagtcaattgtcatttcgtagcttctgtttagtactaatatgtagtagaagtatttgttatgacatttaaaaaagtgttgcccgatcattaaaaagtcaggaaacaacaggtgctggagaggatgtggagaaataggaacacttttacactgttggtgggactgactgtaaactagttcaaccattgtggaaaacagtgtggcgattcctcaaggatctagaactagaaataccgtttgacccagcaatcccattactgggtatatacccaaaggattataataatcatgctgctataaagacacatgcacacgtatgtttattgtgtcactattcacaatagcaragacttggaaccaacccaaatgtcgatcgatgatagactggattaagcaaacgtggcacatatacaccatggaatactatgcagccataaaaaatgatgagttcatgtcctttgtagggacatggatggagctggaaaccatcattctcagcaagctatcgcaaggacaaaacaccaaatgcatgttctcactcataggtgggaattgaacaatgagaacacttggacacaggaaggggaacatcacacaccgggggctgttgtggggtagggggaggggggagggatagcattaggagatatacctaatgtaaatgacaagttaatgggtgcagcacaccaatatggcacatgtatacatatgtaacaaacctgcacgttgagcacatgtaccctaaaacttaaagtataataaaaaaaaaaagtgttgccatgttaaaacaatttaaatgaaatttttaaaacataaaatttatctctatgtaaaatccttccatcctaacataacagctgttattttttccattttcctttctaggctttattcatatatagtatgatgtaatttttaagagactggggcctcactatgttgcccagtctggcctcgagctcctgggttcaagcgattctcctgcctcggcctcttcagtagctgggactataggctgtgccaccacacctggctttataatgtaattttaaggaaatgaacctaaagttaagtcagatatgatttactatatgaagatacaagagtatttcaagttgaaggggttagccgtgtttggggtagtgtaccagtaacctccaaaaactagacatttggtttaattttgtgactgttttgtttttaaacattagtttgcttttcattctatagccagattttcttgttgttacaagggaaaattgtcctggttccttcttgaaactagtgagggaggcatagtgagatggaaagaatgggctgtggcatcagagacttgggttcagattcttggtctgttgtgttcattagcctctgagagccttactttcttcccctgtaaaatggcagtagtctttttttcttttctgttttttcatatgaagtcttgctctgttgcccaggctggagtgcagtggtgcgatcttggttcactgcaacctccgcctcccaggttcaagtgattctcctgcttcagcctcccgagtagctgggacaacaggtgcgtgccaccatacctggctaatttttgtatttttagtagagatggggtttcaccatgttgaccaggatggtctccatctcttgatctcctgatccacctgccttagcctcccaaagtgctggggttacaggtgtgagccaccatgcccagccagtagtcttttttccagtgggccttcttgtgaggattaaargagagaatgtatgttaagtgttttgagtaaagtgggctacccactgatgccatcattaataaatatctaattttgaattttattttagcactttattccatgaataaagtgattgatttggaaaggtcttttaaaattcttttaaacaatcaactcccagcaggcaaaaaaagcaagatgatgtgcatattttgaatattggtaaaaatctttcatactaccttgatttcataaagtagtagcaaataggacttagttctgtctaataaaccaaaacatgcctgtatgtcctgataatatgtttgcttaattagcttgtcttaatagtttcacatctgtttagtcaggaaaggcaggtggtgtggtagaaacagtggcctctgcaatgggatagacttgggttcagatacctgccttttccactgaatagttgtgtgatagcctttgaagtctgtttcctcatccttgcaggatttttctgaaaataaatgggataatagtcaaggatttctttttcctttaacttagtattgtacatggctctccacttttttttttttttttttttgaggcagagtctcgctctgtcacccaggctggagcgcagtgctattttagccatgcccagctaatttttgtatttttagtagaaacgaggtttcactgtgttagccaggatggtctcaatctcctgaccttgtgatccacccatctcagcctcccaaagtgccgsaattacaggcgtgagccaccgcgcccggccggctctccactgtttgtacccattttgacagtgtctttctgaagttcaacgaatataacttcttctatgatgtgtcagtgcttcttattaatgcctgaacttatcaaggtaatgctccagaaagtaaaacacgttcaagattcgtttttgcttttacctgatgtatcgagttctaaaatgtagtaatgtaaacatggccgggtgcggtggctcatgcctgtaatcccagcactttgggaggctgaagtgggcagatcacttgaggtcaggagttcaagaccagcctggcaaacatggtgaaaccccatctcaactaaaaatacaaaatttagctgagcactgtggcatgtgcctgtaatcccagctacttgggaggctgaggcaggagaatctcttgaacctgggagccggaggttgcagtgaaccaagattgtgccattgcactccagcctcggtgacagagtgagaccgtgcctccaaaaaaaaaaaaaaaagtaagtaatagtaatatgagttattagctaatgagcattttgtattcacatcaaaataggtgatcatcatatgtattaatgttataaatatgtattatgggcatttctagatcttgctactaaatctgaatataatttgaaagttatgtcctctggaaattgagcatctcagaagatgcttttaggtgctagtaggctttatttaaaaaataatgatgtcacttaattttgagggcacaaaaggatatacagtaaaaagtccgttgtcttccctttcctgtctcctggttacttggttcctcttcccagaggaaaccactgttaatcatttcctagtgtatccttcaagagatatccaaggaacattgttttgagtctggattccaaagttattgaacacagtggtaaaaaaatcttttttgatatgtttacactaaaaggtaaaaaaatacctgtacaggaacaagttttttaactttaaattgtctactttatgttaggtcttggaaagatatggtgatgaccaaaacaaatacagcaccttatgtgcctaatagtctaatagggaaaacagataattgtggggaaaaaatgtggttacaaactgtgttaaatgtcatgaaggaaaagctcagggtactgtgacagcatgaagcagggacaagacctggagaggtggggatgggcagagtggtctttggggaagtggtttttctttttttttttttcaagacaagagtcttgctctgtcacccatgctggagtgtaatagcgtgatctgagctcactgcaacctccacctcccaggttcaagtgattctcctgcctcagccgccccagtaactggaattacatgcacacgccaccatgcctggctactttttgtatttttaagtagagatcgggtttcactatgttggccaggctggtctcgaattcctgacctcaagtgatccgcccgccttggcctcccaaagtgctgggattacaggtgtgacctttttttttttttttttttttaaattagatggagacaaggtctcactaggttccccaggctgatctagaactcctgagcttaagtgatcctccygccttggccttccagagtgctgggattacaggcgtgagccaccgtgcctggccaagaaaggggaagtggtttttcctagagctaggaaggatgagtaaggagagataggaagtgggaacaaaacaaacaaatgcttgtagacttgataggaggctatgatccagagagatagagggttttgtgataaaagtagaaagttgaatatatttgagagagatttggaaggcaagatagtcaggatttgtcgaatgattaaatatgagagagggagaaggaagtgtcgtggatgactcaggttacaatggatgatgatgccactcactgagagagaacactggaaagaggaccatgtttgagagattgagatcatgagtttgggtttggatatgttgagtatgaggtacttttgagacatctcagtggagatattaagtaagcagttgtataaatggaaattggaggtgaagcctggattagagaaaaattttagagtcaagcacctgtggaggttaattgtggccatgggatgtgattgagatctagggcagtgatgcttaaactctatggtctcaggacttccttaagctcttaaaaattattgtggatcctgaagaacttttgtttatgttagtatgcttactgctatttgccatattcagaatgaaactgggaagttgtttttttttttttttttttttttttgagatggagtcttgctctgtcacccaggctggagtgcagtggcacaatcttggctcactgcaacctctgcctcctgggttcaagtgattctccagcatcagcctccctagtagctgggattacaggtgtgcgccaccgtgtccagctaatttttgtagttttagtagagacggagtttcaccatgttggccaggctgatcttgaactcctgacctcaggtcagaacccaggaggcggagcttgcagtgagccgagatcgccccactgcactccagcctgggcgacagagcaagactctgtctcaaaaaaaaaaaaaaaaattataataataaaccccttacatgttaaaatttttttgtgaaaaataacttttttaaaagaaaacattttgggagaatagaggcattaatttacatttttgcaaatctccttaaagtctgccttaatggaagatagctggattctcatatctgcttctgcattcagtttgttgcattatgttattttgattgaaatatatgaaaaaatcatccacagatgtatttgggaaagggaagaagaatattatattttttaacgtaatcatggatatgcttctttgataacatgtcaaaattcaacaagtgatagtttcttaaggattagttataatgtggattctgtttttttttttttttttttcttcgaggcagattctcgcacccaggttggagtgtagtggtgcgatcttggctcactgcaacctccacctcctagattcaagcagttctcccgccttagcctcctgagtagctgggactacaggcgcagacaaccacactggaataattttttttatttttagtattttatgttggtcaggctggcctcgaactccttacctcaagtgatgcacctgccttggcctcccaaagtactggattacaggcatgagccactgcaccctaccaggattagttataatgtggattctgatatcatatcagtgaacttatactcactctgttacattaaaatctgatggtctgtcttatactttgagtgactgttttacccatgtttacttttgcaaaaattatgcattggtcatgtggaaaatatcagtccactgagttacacagattttccaaatgtggacatatctcattccacagtgccaaaaagtcttatttgtcaatatgactaccactctcatcagacaagtttttaaatattcagaagctttcaagctcatggtgtcaaatacaagttttccaaaaatgtcatttttgcttgtaaagttgagtgttatgattggcaacaaatacagttgatcgttttccttgaaatgaaaggcatacgtgattaaattttgaaaaaatgtttgccagatagccaagtctgaatgatcagtttgtctgatagtccttcaagtaaaaatggtgttgcaagaaaaaagtggctagttcagtcctcaagtatgtactttgccattattcttccgtatgcagtgctttataattaattcccatttcctttaagtagaatattgaaaagatgtatcttcaggggttgagatttagtaaatttaataattttgcttcatctagtttattctttagtgaaactggcttttttcttaataccagtgcttggcagtgaagaatacagttatctagtacaggttagggctactgccttgattcatgttaaagcacctgcagttttatccactattgcttttgcatcattagtgcgcatgtcaacacaggaaagaaagtgattcaagaagagaaagggcaattgttttgaatactagtgagaggtcaagtaggggttagatgaaaagatgtcctttagatttagcaacattctcaaggtcattgatcttaatgagagctgagtggagtggtggtgaggggcagatctgaatgggttgaggagtgagtggaacatgaaatggaggacatgtggaaacttttttgaagaattgaattggaaaaggagtgtggggttttttcttttaaaggtcaaagagataagaaagagagtgaataatccctagggtaaggattctgaaaaactgggagagaattggcttttgtatagaagcagtgcttcttaaattttaatgtgcataatgagagtcacctggggatcatgttaaaatgcatattctgattcagttggtcttatatgaagcttgatattctgcatttctaatatggtcctagattatgcagaaactgttggtcagaaaatcccaccttgagtagcaaaaccctgatccactggtggagagattggttttaggcagaaagaagttgtgtactgccgttgtaacagagaagatagagacgttagatgcacatgttttgggtttgatggtaaaaagttaagggctgggactgggcgtggtggctcatgcctatctgcagtcccagcactttgggaggccgaggtgggtggatcagttgaggtcaggagttcgagaccagccacggtgcctggccctgagttatagtcttaaaaattgatttgcctgtgctactcccttttacagaatctgttgggttcttcacctacaggatcaaatttaaatgtcttcaaagacccctcctgcatattctcacatgtatacactacttccactttactatactttcagttctccactggactacgagctcgtctttgttttcccattgctaagcatagtgcctggcacacaaatagctaatatccagatactgaaggagtgaattgaagagattgcttatattggacctgttttccacctaatgcctaaaatgcccatggaaggtatttgtggagttgagaaacttgttgttagtatgcaggaggaagagtattgtattcttttttgtttttttttttagcagatacagtatcaataagtactttccttactttctaccattaatatacctgccttttctttcttttttttttttttgttttgagacggagtcttgctctgtcgtgtaggctggagtgcagtggcgcaatctcggctcactgtaacctctgcctcccgggttcaagcaatgcttctgccttagccttctgagtagctgggactacaggcgcacaccaccatgcccagccaatttttgtattttttagtagagacagggtttcaccrtataggccaggctggtctcgaactcctgacctcgtgatcctcccgcctcggcctcccaaagtgctgggattacaggtgtgagccactgcgcccgacctgtacctgccttttctatattgacctgttttcttctacccaatggcagagtaatagggaaatgaattacttttgttgatcagccctgaccctttactggagaaggaatgttcattgatatatcaaatatgtataatcctcaagagttaaataaatgagctgaacacggtggctcatgcttgtaatcccgatactttgggaggctgagtcaggtggatgacttaaattccggagtacamgtccaacctggccaacatggcgaagaaaccccctccctactaaaaatagaaaaattagcagggtgtggtggcacattcctgtaatcccagcttctcaggaggctgaggcacgagaatcgcttgaactcgggaggtgtaggttgcagtgagcccagattgcactaccacactccagcctgggagacagagtgagactccgtctcaaaaaaaaaaaaaaagttaaatgaattcctgtaaacagacagcaactgtgtatgtgcttcttttcagtggacagcagagagaagtgctggaatgagaaacactgtctgtgagggtttacctgggactccagggggtccataggtgattaaattcagggagcttttgtgacgattaccagagtttctgtcagctaaaaaaatgtagaggccaggctccactggtggctcatgcctgtaatcccagcactatgggaggccagggcgggtggatcacctgatgtcgcgagtttgagaccagtctggccaatatggtgaaaccccatctctactaaaaatacaaaaattagcagaggtctggtggcatgcgcctgtaatctcagctacttgggagtctgaggcaggagaattgcttgaccctgggaggcggaggttgcagtgagccgaaattgcaccactgtgctgcagcctgggctacagagtgagaccttgtctcaaaaaaaaaaaaagttaaaaaccactcttaatagtttcaacaggaaaaatacaaggaaaatttatcagagatagatttttatcatttttatttatgggtatgacattgtgttttataacgctttgtaagtgtactttgcatagttcttgactgtatcattagattgaattcttcagagtcagtgaactctttcttactcatctttgtgtcccacccccaacacttagcatagcacttggtgtagaaaggcattcaatagatgtgttgaatgaattgcagtcaaatttgtatgtgtattttaattggagaaaagcaarcttacatcttataattggactttaccccctttttctttgcaagggaaaaccacaattttcagctgctgtaccaggagttatttttagctcagcaataccaagaaagtcaaggctgggagcagaggcaaaaatggaatatgaaatggatcaaaagatgttgygttatttattgtctttaagaaaccagatgtgttcaggtttttcagttaaaatatttcatttttttaaaatgaagtgcctgatttacagactattttataaaatatctctactacagataatgccctttattttttttaaaaacagttatattctttcatgtctttgccaatcttctgaaatcttggcccaagttcaagtgaaaaaagcatatggtagttataatacagaaaatattacagttcccagggaaattctttctctttggaacctcatgtaacctttttttattgcttccatcagggaaagattctgatgtctttacaggtagcattttggaaaccagtgcctaatttggagtcatctgaagattcttcataatctcacttgtgtggttgactactctgacaggagttctgtatagactgattgatcctaaagtttcctaaataggcttcctaatctattggtattatattaataatatagtactcacgttaagataataaaaaagaagaatttctacctgtaatgtaagaggtaaatacttggcaagcttaaaattttgagcaactgtaattatatataaaattttgtgcctagaagtatcattttagcattattcagggagggctgtgattattctatgaatgatagttaactttttcttaaatttgtttaaattacatacggggaagttagctttttattattgtacattgctatgagtcatgtaaccaccactataattgaaatgcagaacatttccatcactttgaaacatcatctagtgctgtccctttgaactcaaaccctttccccatcccaaygcctggcacttggtggcctgttttctgttgatatagttttgacttttctagaatgtcatgtaaatggaatcatatatacaatacgtagttttttgagtctgatttctttcacttagcatatcgcatttgagattcatctgtgttgctattgtgtcaatagttcattctctttagttgctaagtaatattccttttcatggatgttttggtgattatgacctaaactgctataaacagtagtgtatagattttgtgtgtgtgtgagaacataagcttttaaaaaatatttatttatttatttgttttttgagacagagttttgctcttgttgcccaggctggagtgcagtggcgtgatcttggctcactgcaacctccacctcccgggttcaaccgattcttctgcctcagcctcccaagttgctgggattacaggtgcccgccaccatgcccggctaatttttgtatttttagtaggaacaggattttaccatgttggccaggctggtctcgaactcctgacctcaggtgatctgcctgcctcagcctcccaaagtgctgggattacaggcgtgagctaccacgtccagccataagtttttattctgaaattcttggagataaattcaacaagatgtagaaattgaaaaacgtatttcaaaatttatatggaaatgcaaaggacttatgcttgccaaaacaacttttatgaagaacaaagttgggaactaacactagtctatatttcaatatttattatacagctacagtaataaagacaatgtggtattgatataaacatagacaaatagtactgtggaacagaatatagagttcagaaatagacttccacatatatggaaaacttattttgacaaaggtacaaaggcagttcagtagaaaaaggatagttttttttgtgatgctgaaacaattggatatccatatgcagtaagtttaactttgatactatctcacactatakatatttttaaaaacccagatgaatcatagatctagttgtaaaacctaaaactataaaacttctagaagaaaacataggagaaattcattgtgaccttgcgttatgcaaatatttctttagataagcaccaaaagcacaattcataagagaataaatttttatgttcgaaggtttttacttctaatttagtttatgtgatagatataggattatccaggttatctaatgctgcttgcgtgagttttggtagcatgtcttactttatttttttttgaggtggagtctcgctctgccgccaggctggagtgcagtggtgtgatcttggctcactgcaacctccgcctcctgggttcaagtgattctcctgcctcggtctcctgagtagctgggattacaggcgcctgtcaccacacccggctaattttttgcgtttttagtagaaacggaatttcaccatgttagccaggctggtcttgaactcctgacctcaggtgatctgcctgccttggcctcccaaagtgctgagattataggcatgaaccaccacgctcggccagtagaatgtcttgtaaggaatttgtctgtttaatctgaatttaaatttatgggcatagagttgtttgtgatattcccttttatccttttgatatctgtagggtctttagtgataaacccctttttcatcctgatactggttatttttatcctttttattttggttaatctgactagagatttagccattgtccaagaaccttttccaagaaccagcttttggcttcattcattttccctatttttctgtttaaagttttattgatttctgttctttattattgctttctgctttggttttgggtttaatttgctctttttccctctgttttctttctttcttttttttttttttttttgagacagagtctcgctctgtcacccaggctggagtgcagtgacagggatgttggctcactgcaagctccaggtcctgggttcaagcgattgtcctcctacctcagcggattacaggcgctcaagaccacacccggctaatttttgtatttttagtagagatgggatttcaccaacttgtccaggctgatcttgaactcctgacctgaggtgatccacctacctcaggtgatccacctgtctcagtgtcccaaagtgctgggattacacacgtgagccaccacacctggcctttttctctgtttttctttctttctttcttttttttgagatggagttttgcttttgttgcccaggctggagtgcaatggtgtgatctcggctcactgcaacctctgcctcccgagttcaatcgattctcctacctcagcttcctgagtagctgggattacaggcatgcaccaccacatctggctaattttttttttttttgtatttttagcagagacggggttttctccatgttggtcaggctggtctctaactcccaacctcaggtgatccgcctgcctcgacctcccaaagtgctgggattacatgcgtgagccaccaygccagcccttctctgttttcttaagtgaaagctggggtttgatttttgaaagctggggtttgaggcctgaagcatttaatgccataaatttttctttatatactactttagttgtatcctacaaagtttgatgttatatatgtatttcaatcagttagtaattttttttttttttttttgagacagggtctggtccatacggagaaaccccatctccagcccaggctggagtgcagtggtgtcatcttggctcactgcagccttgacctcccaggctcaagccatttttccctgcctcagcctcctgactagctgggattacaggcatgtgccaccatacccggcttatttttgtatttattgtagagacagagttttgctgtgttgcccaggctggtctggaactcctgagctaaagccatctgcctgcctcggcctcccaaagtgctaggattacaggcgtgagccactgcacctggccggtcataacatactaaggaaataagcaaattatgggatagtatttatagtatggttctacttgtgaattacgaaaacataaaatgtttaagtatatggaaaaatgaggccaggcgcagtgactcaggtctgtaaccccagtgctttgggaggctgaggcaggaggattgcttgagcccaggagtttggagctcctgaaacatccgggtagcagggagttatgattgcacaactgtactccagcctaagtgacagagtgagacactgtctttttaaaaaacaaaaccaaaaaaggtggggtgcagtggggcatgtctgtaatcgcagcactttgggaggctgaagtgggaggatcatttgaggccaggagtcggagaccagtctgggcaacagagagagaacttatctcttaaaaaaatcaatgtataaaaaatagggcctggcgcagcgactccccacacttgggaggccaaggtgggaggattgcttgagcccaggagtttgagaccagcctgggcaacatagtgagacccccatctctacaaaaaataaaaaaaaagttagccaagcatatggtgtttaaggctgcagtgagctgtaattgtgccatcctactccagtctggcctacagagtaggactgactctcttagaattcaaaacaaaacaagaaaaggactaacactcatcaatctttagatacagtattacctctttggttgaaattatggggactttcactttgtacattatatgtttctatggtattttcattttattgctttgtactcagaaaaaagctaagacacaatctggactcggtgagttcatcctgatcttttgccctttggctctgatttccagccgcaccacaatacttgtggatcatttatatcagttacttattgctgtgtgacagatcaccccaaagttagtagtattaaacaagaattatgctaacagattatctggattttggaaactggaaagggtagagtggagatggcttgtctctgttctgcgatatctgggacctcagctaggaaatctcaaagatgggaagtgacttgacacttaggcactagaatcaccagatgatttgttctgttgcatgtggtcgagcctggcttctagctgggaccttgcctagattttttagttgaaacacctacatgtggactctcaatgtggctgcttaggcttcctcacaggatggtgactgggttctaagagcatgagtcccaaaagaatgcagcagaagctgtatcatcttgttcattgagttagcatttgaagtcacacagtggtcactttcactataatcataagcctgctcggattcaagaggaaagaactcaggccctctcatagggaagactatcaaagtcacattttaaaaaagattatgtggggtgggaggtagataatgttgtggacatcattggaaaatactagctgccttatcatgtaattcctcaagcatcttttctaagacagggtctcactctcatccaggctggaatgcagctcactgcagcctctacctcctgggctcgagtgatcctcctacctcagccctctaacccccatccggtagctgggactataggcrtacaccaccatgcccagctaattatttaaaatttttgtagagatgggatctcgctatgttgcccaggctggtcttgaactcctgggctcaagcaatcccaccttggcctcccaaagtgctgggattaatggtgtgagccactgtgcctggctgatgcatttggattttatcctcagggtactgaaggatatgaaattaacagatttgtgttttaaaaatatatctttggtaataggtaatagaatggtgaatggactggagaatctagtgagagattctggttaggaagctgtggtagtaatacaaaaaagaagtgaggagggttggaattctaaggacagatactaaaccgagttaggaggtagaaccaacaagattaagtcttagattttgtattttagaaacaagagttctggaaaacttttatgaattttacttgagtgactaggcatatggtaggttagaggatatgcgtaatatggcttttggtagagaagcgtcttttagttttgggcaagttatgtttgaaggctcctgaaacatatccaggtggcagtagatgagtaggggaggcagttgtgtctgcagttctgttatttagaagagcagtttgggctagaggctagagttgacattttgctttactatgggaaatgagagatggaagtggattcagttgtttgtgttgtgggaaagttgggggcaggtgggtagagtgaggtgggtgaccctgtgggaattgggccaggatgaagttgtgtrtggagggatgggggtatatttgtgagggattgggcatgtgtggtggagttcattaagggagctgaaggaattcttttcatttggcttctcattctggatgcagaaaaaagttattcagcatgtaaaaggctagtgtcacttctgtgcaggaaactctgctgtgtgctgtatgaaataaatccctagtcctgaggagcttttaggagagagttacaatggataagaagaaataaaatataaattctaaagagaaaaaaacaggtctgtttggggtagttagggaatgtagtctaaaagtctaggaggtgacatttaggctgagatagaaagaataacaaggccgggcgcggtttctcacgcctgtaatcccagtaccttgggaggccgtggcgggtgtatcacaaggtcaggagattgagaccaccctggccaatatggtgaaacctcgtctctactaaaaatacaaaaattagccaggtgtggtggcaggcgcctgtaatcctagctacttgggaggctgaggcaagagaatcgcttgaacgcaggaggcagaggttgaagtgagctgagattgtgtcactgcactccagcctgggcgacagagcaagactctgtctcaaaaaaaaaaagaaaaaggaagaataacaaagagctagctttggaaagagttaggggaaaaggattttagacagatggaacagcacacacattagcttttatctgtctgtctatctatctatctatctatctatctatctatctatctatctatctacagctgtctctatattttgaaacccatgtgttcaggccaggtgtggtgactcacgcctgtaataccatctctttgggaggccaaggtgggcagatcacctgaggtctggagtttgagaccagcctagccaacatggtgaaaccccgtctctactaaaaaatacaaaaataaaattagccaggcccagtggcttgtgcctgtagtcccatctccttgggaggctgaggcaggagaattgcttgaacccagaaggcagtgagatgagattgtgccactgcactccggtgatagagtgagactccgtttcaaaaatcaacaacaacaaagaaaaacaaaaaaccatgagttcatacaagtatctctagttctaatctaacaccacagggctcatgctagttttctctttctgtattttcagttctcttttccttcagtgagaaacattatccttcccattatccttcatatatttatttgatcaattcttctgtatgtatcaattgcccatcactgggacattccattgcacaaatgtcctgttcactttgctcatgctgtaatatcctataccagaatgatctcctcttctttccagatatgctgctcctcagtgccagtgctggacatagctcttatgtagatgtataagaggttatttcagtagtgcaaaccagactttgaagttggcttagattagaggttattttaatttaatttacttttattttatttttgagaaagtctcactctgtcgtccaggctgaaatgcagtggcgtgatcttggctcactgccccttccacctccagggttcaagcaattctcctgcctcagcctcccagcagggagctgggactacaggcacaagccactgccccttgctaatttgattttttgtgttttttagtagagacgaggttttgccacattggcgaggctggtctcgaactctgtaagccaggtgatctgcccacgttggcctcccaaagtgctgggattacaggcgtgagccaccacgccaggcctgttttttgggtgtttttttttttttttttttttttttggagacagagtctctctcgctctttcgcctaggctggagtgcagtagtgcgatctcggctcactgcaacctccacctcccaggttcaagtgattctcctgcctcagcctcccgagtagctgggattacaggcatgtgccaccacgtccggctgatttttgtatttttaatagagacggggtttcgcatgttggccaggctggtctcgaatttgcctcaagtgatctgcccacctcagcctcccaaagtgctaggattacagacatgagccactgtgcctggcccataggatatattttggagggcttaattggtgggatttttttttttttttttttttgagaccgagtttcgttcttgttgcccaggctggagtgcagtggcgtgatgtcagctcactacaacctctgcctcctgggttcaggcagttctcatgcctcagcctccccagtagctgggataacagacacgtgccaccacgcctatctaatttttgtatttttagtagagatggggtttcaccatgttggtcaggctggtcacgtactcctgacctcaggtgatccacccggctcggcctcccaaagtgctgggattacaagtgtgagccaccatgcctggcctaattggtgggatttaactgatgggttgggtgtgaaatggggggaaatcaagaatgattctcagctttttggctttctggatggttgacatttactatgatggagatttgggaatagaggcacacatcaggagttttgttttgaatatactcattttaagatgcctgtgatatttctaaatggagatagtgatattgagtcagtctagggtggagaaaatacttagggagtttttgtgatatgtggatgagatttatatttgtggtgtatgaactaagagaatggatgaaatccattaaaaaggtaattaaagagataggaaagatgacgagggaatctaggaaggaagctagagtggaaaaccaggggagtcataaatcgagagaaaattgaagaaaatactcattccagaccgtgaaagaaatgtagcagaattattaggtattgtgctcatttaaggttggtgatcgtaaatttatagcaaggtcaaatttcctgataatgtgaatattttttctttgtcaatccctgttgacatagattcagacctagggaatgtggggggtcgttcatttagccagaaatggggcaagggatttgagagttttgctcatagaaggtagtcgagtgcttgtccaataaccacaaaggtcaagttgaattatcttctttttttttttaaacagggtctcactttgttgcccaggctggagtacaatgtacaattatggctcactgcagcctggacctccctgggctcatgtgatcttcccatctcagcctcctgagtagctgggacctcaggcacgtgtccccacacctgctaaattttgtgttttttgtagagaccaggttttaccatgttgcccaggatggtctcgaactcctgggctcaagtgacctgcccacatcagcctcccaaagtgctgggattacaggcatcagccaccatgcctggcctcaagttgaattatctgtcaacacagggtttctctgaaaatgatgctatgaaattccctaacagtggaagcatcaggttttttttttttctgttttttgttttgagaccgagtctctctttgtctgtcgcccaggctagagtgcagtggtgcgatctcggctcactgcaagcttcgcctcctaggttcacaccattctgcctcagcctcccaagtagctggaactacaggcgcctgccaccacacccagctaattttttgtatttttagtggagatggggtttcaccgtgttagccaggatggtctcgatctcctgacctcatgatccgtcctccttggcctcccaaaatgctggtattacaggcgtgagccaccgcgcccggccagaagcatcagtttttaaatcttatctgtttaaattacaatggctgtattaaagcagaatatccagccaagtatctattaggaaatgacacttgttattttttttagtttcaatgtgaactttcaggtaatacaattctctcaactatctgtattttttagaattcagtaattaatgttggcattttcttcccaatgtctttgcttgatttatagttagatttttgagattttgtaattggcttttcagttgtgaataaatactattaacctatatgcatatgtgtgtgtatgtgtatgtctgtgtatacatatattttttaagagaatcttactctgttgcccaggctaaagtgcattgtgcgtgatcatggctcactgcagccttgaactcctgggctcaagtgatcctcttgcctcagcctcccaaatagctgcgactgcaggcatgcgccactatgccagctaatttttttttgagacagggtgtggcttacccaggctagagtgcagtggcgtgatcttggctcactgcaacctctgcctctcagactcaagccatcctcccacctcagcctcccaagtagctgggaccacaggtgcacgcctccatgcctggctttttgtattttttgtagtgacagggtctcactttgttgtccagcctggtctcaaactcttaggagctcaagagatccacctggctcggcctcccaaagtgctgggattacaggtgtgagccactgcacccagctggctaattttttaatcttttttttagagacgggtctccctatcttgcctaggctggtctagaaatcctgggctcaagtgatcatcctgcctcagccttctgagtagctaggattacagcagtgagctactgtgcatggcttaacctgtattttaattgagtacttttgttaggaatcttctaatagtgttttaaagttgttttaaagaaaagtttttagaattatgtgtaagataatgattacatctattttcacttgaataatatgtctttataaccacttaaaattttattattttgggcaaggtgtggtggctcacacctgtaatcccagcactttaggagtccgagatgggaagattgctggagcccaggagttcaagactagcctgggcaacatagcaagaacttgtctctaccaaaaatcaaaaaattaactgggtatggtggtgcatgcctgtggtcccagctacttgggaggctgatttgagaggattgcttgagcctgggaggtcaaggatacagtgagccaagatcgcgccactgcactttagcttgggtgacagagtgggaccctgtcttaaaaaaaaaaaaaaagacaaaattttactatttcaagaattctcataagttttaagttgagtagtgatgacacaaaattattggaatagtttttgacttaaaaggccctccactgagttcagcagaatttctcttctctgaagactgaatttaacattgttcacttcagataattttgacccatcttgagtttcatacactataatttcatgtgttgcaaattttatttgctatgctagtctattataaattaacagataaaggggaaataatatacacttgaatcccttaagaaaaaaacctgttatttttaaaacctcacttatgagcaactgaatttataacagaataaactttagagcaaatttacctgttctgttaggtaagtattgttagcatgagaggtatccaagtatattaactttgagttaactttcaaaaatttgttactcatgtaaacctttttgctaatacatttcacataaatacagtataattatatttatgtatattttaaataaaatataacaaattctatataatttattttttttaatgtatatgttttcacatactgattgctagagggttactgagttttacatcaaatttcttgctttatttttaggaatctgggatttttttttaccttttttgtgtgtaaagtaaattttagttaagttttcgtattaaagagataattttcaagaatttggctgtatttgccgtaaatcagtggctgtattacaggaaataccacgtaaatgaaaggagtctgcctaatccagctgatttccttttgcattggcaattaatgtattcataatagtagcttatagtaatgtgagtttttttttttttaattattaatttctgagacagagtctcactctattgcccaggctggagtgcagtgtcttgatcttggctcactgcaagctctgcctcccgggttcatgccattcttctgcctcagcctctcaagtagctgggactacaggcgcacaccaccatgctggctaatttttatattcttagtagagatgagacttcaccatgttggccaggctgggctcgaactccttagctcaagtgatctgcccgcctcggcctcccaaagtgctgggattacaggcgtgagccattgcgcctggccagtaatgtgagtttttattagcaaaactcacagaaagaaaaatctcattatcatgtaactagtttaataggaatattggctggacacagtggctcatgcctgtaatcccagcactttgggaggctgaggtggacagattgcttgagctcaggagttcgagaccagcctgggcaacatggcaaaactgcatctctacaaaaaaatttttaaaaactagctcggcgtgttggcatacacctgtggtcccagctacttgggaggctgaggtgggaggarggttgagcctagaaggttgaggctgcagtaagccatgattacaccactgcactccagcctgggcgacagagcaagaccctgtctggaaaaaaaaaaaagaggctgggcgcagtggctcacatctgtaaccccagcactttgggaggcctagatgggtagatcatttgaggtcagaagttctagatcagcctggccaacatggtgaaaccccattctctactaaaaatacaaaaattagccgggcatgtgttaggtgcctgtagtcccaactactcaggaggctgaggcaggagaattacttgaccccaggaagcggaggttgcagtgagccgaaatggtgtcactgcactccagcctgggtgacagagcgagactgtcaaaaaaaaaaaaaagaaaaagacattctttgattttccttgaaaccttgatataaaaaaaagtgcattttacgtatgtaggaatatgccccggataccttgttactgttgaaaaagtaactcaacagctaaaaaaacaaattggtttttctgtccaatagccaaggcacaacagatatttcttaggaacacagttgatcacaattaaaatctgataccctatgaggttagagctttctgggttttgacctttttgaaactggctctgtttttttgttgttgtttttttttttttttcttttgagacagggtcttgctctgtcacccaggctggagtgcacaggtgcgatcatggctcactgtagccttgatttcctggattcacatgagcttcctgcctcagcctcccgagtagctgggaccacaggtgcacactaccagcctggcttggtttttcatttttttgtagagatgaagtctccttgtgatgcccaggctgttcttgaagtcctggactcaagcactcaagatgggagcatcttggcttcccaaagtgatgggattacagagtgatccactgcacccagcctaaactggctctttaactatacttgttcaggaaatgcatcgcattttagggaacacagcaggaactattattccccaaattagcaaatactacattcccccatgaaatgtattaagtttatactaagcattgctcttaaattttattttttttttgatgtacagtttttaccctgggtaagaaaaatggatgaataattgtattactataaagcatatggtaaatctattcttgtcatttgatacttggactatcaacttcattttattctttattcaaaaaactactattttctaaagaaaacacattactcttttagactgtgttttttctttagtattaacactttaacagtctcttttcatttcttccatctactacatatgcatatatagagcatatgtagtatgctctaacaaggcttaagattctgatatgctaggcagttttgtgaccttacctgagaactgctggactagctcttacaacctagcctcaaggcatttaattcctgacttagaaatattacaaatgactatatgtcataggttgccagtgttgctggctagtaaaaaacacctctggctgggtggagtggctcatgcctgtaatcccagcacttttggaggttgaggtgggtagatcacttgaggccaggagttcaataccagcctggccaacatggtgaaaccccatctctagtaaaaatacaaaaattagctgtgtgtggtggcgtgtgcctgtaatcctagctaccctggaggttgaggcacaagaattgcttgaacatgggagacagaggctgcagtgagccaagattatgccactgcactggtcaacagaacgagactatcaaaaaacaaacaaaaacctgtgtttaatcaatgattactcagtcattgcatgaaagatgtcttctaaaatttttttatttttatgtatttttttaatagtgagtcttgccatgttgccaagctgatcttgaactgcctcagcctcccaaagtgctgagactgcaagtgtgagccgccatacgggccctaaaatttttttaacagtattctttcttctggaccctttaagttaagaatcatctaagcagatattaaaccatagaattagatatactttaacattcatacagattttttttttttaagacggagttttgctcttgttgcccaggcagtggcatgatctcagctcactgcaacctccacctcccaggttcaagcaattctcctgccttagcctcctgagtagctgggattacaggtgcttgccactatacccggctaattattttgtatttttagtagagacgggatttcatcatgttggccaggctggtcttgaactcctgacctcaggtgatccacctgcctcagcctcccaaagtgcaaggattacaggcgtgagccaccgggcctggcctcatacagatatttcttaaaggctactaaaggtatgggaagtactcatttgcatacactaagaataggaagataaattattccattaaaatgttgagggtattaccctttgtgttgtctgtagctgtagtttagtctgtctagagaaactagaataatgtatttgatgtcacatagctgagatttctactaaatgtaaattatgatcttttcatattttaagtgttgataaaatatagggagtattaatgatatctcaaaaattctgtttttgatggaactatcttggacaggtttgtgtaataagcattagactgttaaagggagaggatgggggctaaagtttagtttaatatgctaggcactgagctgtttttaatgtgtatgatttcatttaatcttcataaccatataaagtattattatttattttattttgttttattttattttattttattttatgtatttattttgagatgtagtcttgctctgtcacccaggctggagtgcagtggcgcaatatcagctcacttcaacctccctgtcctgggcttgagtgattttcctgcctcagcctcccaagtagctgggactacaggcatgtgccaccatgcccagctaatttttgtatttttagtagagacggggttttactgtgttggccagtctgttcttgaactcctgacctcaagtgatctgcctgcctcggcctcccaaagtgcaaggattacaggcatgagccactgtgcctgacctaaagtaggtgttatttagctattacttatgctttataagtaaggaaacagacgcagaaaagtcacacagttgctgttctttttttcaccccagtcttttagaccccaaatcagtgcttctttctgaaaaatatgaattgagcagtgttcctggccttctgggattttaagtgaataaggaaataaagtgatacattaaacagtgtatgtgctgcttttatgagggttaaggaacatgaaagtaccacttaagtatttgggagcttaaggagggtttcatagagcagttcatgtttgaggtgagcgctgaattttttttttttttttttctttgaaacagagtttgttttgctctcgttgcccaggctggagtacagtggcgtaatctcggctcactgcaacctccatctcccggaagggattctcctgcctcagcctcctgagtagctgggactacaggtgcctgtcaccacgcccggctgattttttgcatttttagtacagatgaggtttcgccatgttgggcaggctggtcttgaactcctgacctcaggtgatctgcccgcctcggcctcccaaagtgctgggattataggcatgggccaccatgcctggccattttttttttttttaaacatgctttcaagttaatgctgctgttttaaaccatttacaccttggtattctcagcagcgatgaaattagcatgtgagtattgttatggaagcaaaaacaatgtgagaaatattacctaataaacattcagacacagtattgagcacagtgtgttacattataactttttattttctattattttgttaatattttgctgttaagaatttaataaccctagatgtaatatgatttctttcactacagatgtcctcctcgyactttcttrccagccctttgcaaaatttttcttgatgaaagtgctccagacaatgtattagaggtgacagcccgtgccataacatactacctggatgtatctgcggaatgtacccgaaggattgttggggtagatggagctataaaagcactttgtaatcgtttggttgtagttgaacttaacaacaggactagcagagacttagcygaacagtgtgtaaaggtaagtattacttattggctcattacttatttttctcagacctctcagggatgagtattggctcatttaaacatcacttagagactgaaaaatgtatttactaaaaaaaaaaaatttctaaaaaaaaaaattcttcctatcttcagtcttactttattgagagtagttgagaacagtggaaatcacaacacttgtggcaccaaaggaggttccatgggacttgcgaaaagaaatcttatcttagaaggaaaactgtaggtgattgctatgttatgtgctgcttcagtgcacttcagttcctggtagtcacttagagataggttatccctgttcttacccaaatcattttgtattataatagtaacaatcaccaccacaacaaacaccacccaccagtgctagacattattctaagcactttaaggtattaactcatttaatcttcacagcaaccctatatgggataggttggtgccaggaatagtattattattattattattattattgtttttgagacagttgctgtgtctcccaggctggggtgtagtggcacgatgttgactcactgcaacctccacctcccagttccagcggttctcctgcctcagtctcccaagtagctgggactacaggtgcccaccaccacgcccggctaatttgttttgtatttttagtagagatggagtttcactgtgttggccgggctggtcctgaactcctgaccttgtgatccccctgccttggcctcccaaagtgctgggattgtaggtgtcagccaccacccccagccgaatattatcatttctctgttacagatgaaagaaattcaagtatgctgaggttaaggaacatacttgggagtagtgagcagaagagtcaagacttgaagtttaggaatttgaagattaggaagtttggttctagggcccagggatttaactattttgctatattccctgtaaagtaagctgttgtctttatgtaactctaaaagcattagtgctagatccatacttttttggaactatttgtggtgaatacattgagattttacatgattttttttttttttttttttttgagagatagtcttgctctgtctcccaggctggagtgcagtggtgcagtctcagctcactgcaacctctgcctcctgggttcaagcggttctcctgccttagcytcctgagtaggtgggactacaggcgcgtgccaccatgcgcggctaattttttgtatttttagtagagatggggtttcaccatgttggccaggctggtctcgaactcctgacctcaggtgatctacctgcctcggcttcccaaagtgctgctgggattacaggcttgagtcactgtgactggcccctgattcttttttcttttcttgtttttttttttttttaatgatttctgcttcattctttttataatttttgctgctttaggtcagcagttctcaaattttttgtctcaggatccccttacaagtcttaaataattgaggatacccaaagagcttttgttcatataggttttgtctatttatttaccatattagatactgaaactgataaatttaaagtatttatttatcttaaaataaattaattacatgttatacataacaggttaatgaaaaataacctttttaaataaacaaagttagtgagaagactggaattgttaggcatttttgcaagtctcttaagaacactctgtttttacagtagacagctggatcctcctgtctgcttttgcattcagtcttgtacagtatcacatcatgcttagcttctggaaaatgctaccctagactcatgagaatgataatgaaaaagacaaatagtgttagagtattattatgagcttttgctaaattacttgtagttctttaccttgccatacagatgtcactttctaaacctgcactgtccaatatggtagccaaataagtctattgaacacttcaaatgtggccactccaaatagagatgcattataagtataaagtatacatgcatttttaaagactatacataaaagactataatatatatcagtaattttctatattgatttcatgttgaaatgatgatgcctggatatattgggttaaataaaaaatattattattattattttttttttttgagacagagtttcactcttgttgcccaggctggagtgcagtggcgcgatctcggctcacgacaacctccgcctcccaggttcaaatgattctcctgcctcagcctcccgagtagctgggattagaggcatgcgccaccatgcccggctaatttgatattttttagtagagacaggttttctccatgttggtcaggctggtcttggactcctgacctcaagtgatccacccgcctcggcctcccaacgtgttgggattacaggcgtgagccaccatgcccagctgttactattattttttgagacagagtctcactctcttgcccaggatgggaatgcaatgggcgataatggctcactgcagccttgacctcctgggctcaagtgatcctctcacctcaacctcctgagtagctgggactatagcacatgccactactatgcctggctaattttttgtatgttttgtagacatcaggttttgccgtgttgcccaggttagtcttgaacttctgggctcaagcgaactgccaaccttggcctcccaaagtgctgggatcacaggtgtgagctaccacacccatctaaaatgtattattaaaattaatttcatttgtttcacttttctgtttttaatgtgtcactaataaatttggagagcgcattgtttctgtgattcttgaaaatcaggcttgcattctttcgttacatttgttttactattataggtattagaactgatatgtactcgtgagtcaggagcagtctttgaggctggtggtttgaattgtgtgcttaccttcattcgtgacagtggacatctagttcataaagacaccttgcactctgctatggctgtggtatcaagactctgtggcaaaatggagcctcaagattcttctttagaaatttgtgtagaatctctgtctagtttattaaagcatgaagatcatcaggtaaataagttgctgttacatactttccattttcagaaagtgatttttttagtgttcccctgtttataattatgatagactgtaatttgtgcttttcacttgatgaaatcgaggtaattccatcctctttctctaattttatctctgcatgtggtaatctccattttgggaatgaaacttttaagattataagtgtgatatatgtttattcttaaaatttaaatatcataaaaatgtttttacagctgtacttgtactgagtgtaattttgctgacttggtgcaattttgttgacctgattttgttgacttaagatagatctcatttaaataagacggtattttttatttttattattttttttttgagatggagtcttgatctgtcacccagggtggagtgcagtggcatgatcttggctcactggaacctctgcctcccgggttcaagcgattgtcctgcctcagcctcccaagtagctggtacgacaggtgcccaccaccacgcctggttaatttttgtatttttagtagagacagggtttcaccatattggccaggctgttcttgaactcctgaccttgtgatctgtccacctcagtctccccaagtgctgggattacaggcgtgagccactgtgccaggcataagacagtatttataatcttatctgtaaatccttattgaattagcatactttagaaaataaaacttggcttttaatgactttttattgttcagatgttattttcagttgatatcatagattatcatgacaaaggtacacataataatagttaatatttttgagcttttattatccatctagattctttatatgtgttacctcatttaagctaacacaatgagatataggtaccattaatatccccattttacaaatgagggaactgaggccttaagcagtttaagtaacttcctcggattacacagttagcagtatatggagccacgattcaataggcagatcacatgcttaatcactttgctgcagttgcctttcttatagtgtcagtattgaaatgatcattactaaccctttttaggtggattttatctgtgggcattttcttcacattgttaggtttcagatggagctctgcgatgctttgcatcactggctgaccgatttacccgtcgtggtgttgacccagctccattagccaagcatggattaactgaggagctgttatctcgaatggctgctgctggtggtactgtttcaggaccatcatcagcatgcaaaccaggtcgcagcaccacaggagctccatccaccactgcagattccaaattgagtaatcaggtgtcaacaattgtaagtctgctctcaacactttgcagaggctctccggtagtaacacatgtaagaatgtttttgaatctttgctttttaatcttcagaaaaagtgtttttgtataatgctaatatattaaacatctttcttcccattctctttctaggatcttctgaggtcggagcttccagattcaattgaaagtgcattgcagggtgatgaaagatgtgtgcttgatactatgcgtttggttgaccttctcttggtgctattatttgaaggacgaaaagctttgccaaagtctagtgctggatctacaggcagaatcccaggactccggagattagatagttctggggagcgctcacatcggcagcttatagattgtattcgaagtaaagataccgatgcacttatagatgcaattgacacaggaggtcagaaaatatttttttaaatataaaaagaaagttgtgagataaccatataggcagtttctagttttcggacagtactcttagaaatccagataacaaagtggcaccccttcgatattctcccctatccctgtgcataattatgtaattatcagcttggttcttggtgaaacctgaataaatgcttgttgaatgrgtaaaacttctataaagtttgaaatttctgttttattacctgaaggagatcttataaattctaaggttttctcaagattgataggaactgatgtgaatgaattataataatgcagattttttttgactgctacatgaggtgatgagcaaatataattcctgaaagatgcttctgggtcatcagatttgttcttctgtgttctttggattatggatgtggattagcctcttttagcaactactaccttatttagttgtgtatttagtattttcctttgttatttcatgtttatttttaagacttaaagccttgtgaatctccagtggtttaaacattttcaaatgttttttctttttttagtagggggacagagtctcgctctgttgtgcgggctggagtgcagtggtacaatcttggctcactgcgtcctctgcctcctgggtttgagcgattctcctgtctcagcctcccaagtagttgggattacaggcatgtgccaccacaccygcctaatttttgtgtttttagtagggatggggtttcaccatgttggccatgctggtctcaaactcctgacctcctcccacctcggcctcccagagtgctgggattacaggcgtgagccacggtgcctggacttaaatactttttcttagctgatctcaagtttgctgattatgtactgctctatagttgacctaaatatttaaaacactctcttggctctttatttagatgatgactaatgacgatcttaaaatggttcagtctttagaaaagtttagtattttattggctttaaaaatacgtttctttttttttccttcaaaatttcagcctttgaagtaaattttatggatgatgtaggtcagactctattaaactgggcctctgcttttggaactcaggaaatggtaagctaataaataaaagctggtatttaaattaaggatagaaatattaataaaaagcagctttatgattcgttatcattttacaggtagaatttctttgtgagagaggtgcagatgttaatagaggtcaaaggtcatcatcattacattatgctgcatgttttggaagacctcaagtagcaaaggtaaagtctaggttttaaaattactaatttttaacatttacatggtttaaaaattagaatgatataaaaccttttatttccatgccatctccatccacttcattcccccttactcactgtaagtgtttttaattagttttttctttttagtgtttcctaatacagattcaataaaaacaaatatatatatatgtgttccctccttttcttatacactcacctgtactttgtttttttacttaataatataaattagagatctctccctgttagcatgtagagaacttttttatatctgtatgcatatcctgtactacaagtttattcaactagtcacctagtgttgaacgtgtgattgtttccaatttgttactcttggcaatgaataactttgcctatattttctcttgtttgtattcatcaataaaatattccttttcttttttttttgagacagggttttgctctgtcacccaggctggagggcagtggcacagtagcgactcactgcagccttgaattcctgtgttcaaacgatctcgtgcctcagcctcccaagtggctgggattataggcgtgtgccatcatgcttggctagtttttgtacttatagtagagacagggttttgccatgttggccaggctggtctcaaactcctagcctcaagtgatccacctgctttgtcctcccaaagtgctgggattataggtgtgagccactgcacccagccaaatactctgtttgtagaagaatcactagactcagactagcaaaggactttggggagttatttttacagttagagaaattgaggtccaaagaggttaaatggaaaggtttacatcaaatgtatgaactaggtgtctgtaatctgccaatcgtgaagttatttggtatagtacgaggttagtccactctgaagttgtgcatgcctggattcgagtctcagcttatgcacaaaaaaggctatatgatcttggacaatttattaagtttgtctataaaataagtatatattcttagcaagattattgtgagaattagaaaaatatattgtatagatttactgtagtaatcagcatattgcaggtgctcaaatggtagctgctattattgtcatctttacactacaacaacattttcaataacaggttcrtagctttctagcctgtgaaggatggtctcttcaagcctgaattctatttgtttgaattggttagtttttagagagaatgatgcttctaagggtgactaatactgagtgagcaaagaaggttttagagtttccctttcaagtacttttaaagtcagctgttagcaaaaaagtttttattgagccattgtgattaattagtctgggtatgaaattatgaaaggtttaaggtgttagtgggtatagaggtggatatattgatgactttttatttttgaaatagggtattgctctgtctcacaggctggagtgcagtggtacaatgatagctcatgtaaccttgaattcctgggctcaagtgatcctcctgcctcagcctccggagtcactatagaactataggcgtgtgccaccatactggctaatttttatttttattttgttatttatgtattatttgtagagacgagctctcaccatgttgcctaggctgatcttgaactcctggcctccagtgatcctccggtgtagcctcccaaagtgctgggattataggcgtgagctaccacacctggttgactttttggtctaaaatttaatttgacttaacttggtaattggcagtatataggaggcgatgtcattgattgccagatcataaattaaacagtacctctctttaaagaaattgggaggcagagtttgatrgagaaggtgacatgttaagatggaatatacttaatttgagatgatgataaataaccaagtacaattaattcataagtttttcaagttacgatargctgctttgtattgttttttgagatggagtttcactcttgtagaccaggctggagtgcaatggttcaagcgatcttggctcactgtaacctctgcctcctgggttcaagcgattctcctgcctcagcctcccaagtagctgggattacaggcatgcgccaccacacccggctaattttgtatttttagtagagacggggtttctccaggttggtcaggctggccttgaacttccgtcctcaggtgacccacccacctcggcctcccaaagtgctgagattacagaataggctgcttttaaggtactaagtgcaaaggcagagatatggattgccacctgcttgattaagtaattctggaaaatctttagtttacatagttggatgtcaaagaaataaagtattgttatattcaaattaaatgcttttcttctctagactctgttacggcatggtgcaaatccagatctgagagatgaagatgggaaaactccattagataaagctcgagaaaggggccatagtgaagtggtagctattcttcagtctccaggtgagagctacattctttcttttgaagccatctactgttatttttcagctttcacttccatagctttctgtagacacattaaccttatataaatgaactattcctatgaagtcaaataattatatatgtatatccttatatttaataaacctgtttaacagcttaattttctatgttctttgagattgtgactgcctgattccagaataaccaaaatctaaagttcaaggaatatgggaatgtcagataaagaatactttggtattgtttagataggtagtttgaccaaaaaaaatttttttttttttttgaggtggaatcttgctctgtcgcccaggctggagtgcaatggcgctatctcggctcactgcaagctccgcctcccgggtttacgtcattcttctgcctcagcctccctagtagctgggactacaggcacccgccaccgtgcccagctaattttttttgtatttttagtagagacggggtttcaccgtgttagccaggatggtctcgatctcctgacctcgtgatccgcccgtctcggcctcccaaagtgctgggattacaggcgtgagccactgctcccggctgaccaaagttttaagttttcagagggttgatgaatccagaagctctgtgaaataatttttggaacgaagtggagtatccaaaattatcttcttaatttgttattgagcacattgaagttactagtgctctttagtattcttataagcatcaytgaaacaatgttctaatttcagtgtatttgttaattagagataattattatttgaagttggatatatcttaaggtttttttccttgaaagcaaaagtttccaaaaaagtatttctttaaaaaatatttgtctgtaggtgattggatgtgtccagttaataaaggagatgataagaaaaagaaagatacaaacaaagatgaagaagaatgtaatgagcccaaaggagatccggaaatggcacccatatacttgaaaaggttattgccagtgtttgcacaaacatttcagsaaactatgctgccttcaataaggtagttattcatrctatttgatgtgttagtcaaattacaccaattatatggttttatttatctcccttttccagaagtatttgaggtttattttaatgttaaaaaggtgtggtaagaataaaatttagatgagaagtgggaaagccctatcttttcttctgacgatctgaacgaagagaagttttagaaaagattactagattcttaacaaattttaggtagctctctgaatattaaatctctgtttgataagtattgcaaccacttattgagctttttagaagcctgttggtagggacggtatgagatggccactggaggagttatacagataaatgagatttggctcttgcttactcttccccttgcgggctagtaaggatgtatgtgggtaaaacatagagtggtaaatggtagattaggcacatattcagggttctctgggaatatagataatttaacaactaattgggctgggcagattggagacagttttatgcagaggtgagatttaaattgtggtttaaaggatacttaggagttttctaggcagacagatttggaagcatgagtgaagaacagtatgtgcaaatgcatgaaggtatgaatccatccatcaggaactccttgtggctctccctctacagtgtatccatagcttgctatttcttttcatcttttgctagtcagtactctgatccaaactaccaaagggtttgaccactgcagtagcctccttarttaatcattctgctttttctctcttgctcctttacaatgtttgtacatattaggctgaattatatatgtagatgtgtgcgtgtatatatatttttaattaactaatttttgagacagggtatcgctgtcacctgggctggagtgcagtggctggatcactgcagccttgacttcctgggctccagtgattctcccaccttagcctcccgaatagctgagactacaagtatgccaccatgaccagattgtacttttagtgtagatggggatgcaccacgttgcccaggctggtctcaaactcctgggctcaagtgatcgcccacctcagcctcccaagtgctgggattacagacatgggccactacacctgaccatatttatttttagagacaggtcttgctctgtcacccaagttggagtgtagtggcacaatcatagctcactgtaaccttgaactcctgggctccagcgatcccccacctcagcctctcaagtagctaggactacagatgtataccgccttgcctggctaattcttaaattttttgtagagacatggtgttgctctgttgcccaggctggtcttgaactcttagcctcaagggatttttctgctttggcctcccaaagtgttgggattgtaagtgtgagcttctgcatgcacctgtcctgagaattatatacatttttttaaaaattttttttagagacaaagtcttgctctcttgtccaggctggagtgcagtggcacaatcacagcttactgcatacttgaactcctgggctcaaggaatcctcccacctcagcctgctgagtatctaggactacaggcatgcactaccacaccagctaatgttttcatttttttgtggagatgaggtctggccatcttgcccaggctggtctttaactccagggctcaagcaatcctctggcctcagcttcctgaagtgctggaattacaggcatgagctaccgcacttggcttgagaattatatctttaaatcgtaattatatcacacgactgcctagtttgaacccttcatagcttctaattggctttaacaaaaactcagctccttaacccttaggcttgcaagttcttacataatcccaacccagctctccaacagagtactacctaacatttggcccattacacttacgctagccttctttctgttgtggaaccctccaagtacatccttgccttagggcttttgtacttgtttgtcatctgcttgaaactttctgtccctagatcttctgaatgggtgtttgcttcataccattcacctctcagttcaaatgttacatccattgaagtctgtctccctgatttaaatttaccccgttacactttttatatcaataatgttttactgactttacaaagcttatgctatcttggctgggtgcggtggctcacgcctgttatcccagcactttgggaggccgaggcaggtggatcacttgaggccaggagtttgagaccagcctggctaacgtggcgaaaccctgtctctatgaaaaataaaaaaattagctgggtatggtagcacttggctgtagtcccagctactcgggagggtgagtcaggagaattgcttgaacccatgaggcggaggttgcagtgagccaagattgcgccactgcattccagcctaggcaacagagcaagactccatctaaaaaaaaaaaggtttcactctctgaaatactggtttttggggggttttgtttgttttattgtcttgtctctttaaagtaagcaccacgagagctggtcttatgtactgctatattcctacaaaggcaaggagatacagaatagggcctgatccttaggtcctcagtagatatttactgaatgattgaatgagtgtgttttgttagcagttgcaagtatttcaatattaatggagtacaggatacatttggaaagctccgagaataatgttaagaaagtagagaggagctttttataacctatgatggcttttgtaggccatgtgaaagagcgtggactctacctcacatttaagaaggattattaaagacctgtaaggaaaatttgacacatctggatttctgttgatcaagatcactttgacaccctggcagagagaagaactggaggaaggagagaatagaaacagacaagtgttgattgagataggaacttcagggcaactggattagtgagaacaaatttaagagtttggcagatgggttgtatagggattggtgaccagttagatggtggattgaaggaagaaagggtgaaagatgactgcaggtttttggctgagtaggaatctgattttggtcgttttcagttcaggaggtctgtagagcaggcagttttataagattcaagtacctcaaataccagtattatgagctgacattaaaatacaagcagtctgctttaaataggagagaactggccgcaaaataattcactgtgaacatttaatagcttggtttttaattcttccccaaatagctacagaggtgtaggtgttagtggggtcacttttttttttttttttaattacacaagacttgaatcatcttaaatgagcaagttcagttttgaacaagataatttggtctgaaaattttagaggaccatctgttatgccagtgcaagaatcattctggagtataagtgcttcatgataaggccatcagaaaattataaagtatgctaccatgtaacagagttcccttattggatggttattttcttttatcattttaaatgtttggagatattagtgttagaaaatttgatgctaaattttcccaggtagttattagcagacacatttaattgtagctaggaaaataatatatgtcttagtttaagaactcatactctggaatcaactcattgcactttcctatatgtttggccatgggcaaagcacataacctcttaatcaattggctcgtctccaaggtgaggatagttatacttaatcctctttaggagtgagaataaaaattaaatatgtgtgtagcatagtgtctacaatgttagaggtatttgaaaagtgatagtttattttttggaattatttagcattattaaaaacaagggggagcacacggtggcacgtttctggtcccagctacttgggaagctgaggtagtaggatcgcttgagaccagcttaggcaacataatgtgaccctgtctcgaaaaaacaaggtggattggttacaacctgatattttaccagtttttttgaagttttatcagataagtaaacataacactgattcagacagttaagagtgtccatgtatattgacattagctattacctgtgtaggcctgtgcacagtatctgttcaggaaataaaaggcagacagcagatcagtgaaggcttcaaaacagagattggtagtatcagtggtggagtagtttgtaaaagcctggttattttctctgtaagataattagactgagtacttctccactttgttttagaagaaagctacatagaattttgaacaggtctgataagtaaacatcttaggagttagtataaataactggacaaagattgagtctcctttgcagcaaactagatctttatgaggaccttttgaaaaaaaaattttttttttgagacagagtcttgctctgtcacccaggctgcagtgaagtggcgtgatcttggcttactgcagcctccgcctcctgggttcaagtgattatcctgcctcagcctcccaggggtttacagggattacaggcacgcaccaccatgcccggctaatttttgtagttttagtagagacggggttttgccatgttggccagcctggccttaaactcctgacctcaagtgatccgcctgcctctgcctcctaaagtgctgggattacaggagtgagccactgcgcctggccctttaaaaattaaaaaaaaaggttttagctacagggtctcactgtcgcacaggctggagtatagtggagtgctcatagcttacggcaacttcaaactcctgggctcaagggattttcccaactcagcctcccaagcacttgcgaccacagttgtgcaccaccacgcccagctaattctttgggggaggaaaggggctcactctgtcacctaggctagagtgcagtggcacaatcttggctcactgcaggctctgcctcccaggctcaagtgatcctctcaccttagtctcccaagtagctgagactacagatgcatgccaccatgcctggctaaacacctggctaattaaaatagtttttttttttttgtagagatgaagtcttgctgtgttgcccagactggtctcaaactcctgggctcaagcgatcttccgacgtcagcctcccaaagtgttgggtttacaggcgtgagccaccgtgtgtggtctggttttcttttcttgctttccgtgtgtgtgtgtgcgcatgtgtgcgtgtgtgcgtgtgtgtgtgtgtgcktgtgtgtgtgtgtgtgtcaggatcttaccctgctgctcaggctggagtgcagtggcgtgatctcagctcactgcagcctcagcctcctgggctcaagcagttctctagcctcccaagttgctgatactacaggcgagcaccaccacacctgactaatttttttatttttttgtgtgtaaacaaggtcttactatgttgcccagactggtcttgaactcttaagctctagtgatcctcccaaagtgctaggtttacaggtgtgagccactgcgactggcccaattttttttttaaaacaatttgagagaaaaaagtagacttggtgggatatagtgggaaattgttcttgggtgaaaacattaaataatctaaagacataaattcttctaaaattaatttgtaggttatgcagttctaaaggaaataactacagaatttgttttagaacttgacagatcccaaagttcatctggaagaataaataggtgagattattaaagaaaaatctgaaatgttagtgtaaccctttagcaatgaaatttttatgataactagcagagtagtgtgtaaatcaatggaataaaatagtccccccaatagagccagttatatataggtattgaatgtattataatggatgtttctcagatcattcaggggagggggtactatttattaagtggtactggagtatctgctttgtagtttgattttaaaaatcaccctaatcttttatcttatattttaaatctaaacaaattctaagacttaaaaactaaaatattaggaaaacaaaaagataagatactttttttccctatcctccaaaacttttttttttttttttgagacagtcttgctctgtcactcaggttggagtgcagtagcatgatcttggctcactgcaaacctctgactcccaggttcaagcgattctcgtgcctcagcctcccgaggagctgggattaaggacatgcaccaccatgcccagctaatttttgtattttgttagtagagacagggtttcaccatattggccaggctggtcttgaactcctggcctcatgtgatccacccttctcagcctcccaaagtgttggaattacaggtgtgagcccctccagaacctctgagcaaaagaaaatatacttgaatgtttatcagaccttgataggaagaatggctttttctttttctttttttttttgagacagagtcctgctctgttgcacaggctggagtgaagtggcgccatctcagctcctgagtagctgggattacaggcacacaccaccatgcccggctaatttttttgtgtttttagtaaaaatggggttttgccatgttggctgggctggtctcgaaytcctcatctcgggtgatctgcctgccttggcctcccaaagtgctgggattacaggcgtgatccaccacacccagcctggctttttgtttttctttttcctttctttctttcttttttttctttttttttttctttttttttgagacrgggtgttgctgtgtcacccagactggagtgcatagtatgatcacagctcactgcaaccttgaattccatggcacagtgtatcctcttgcctcagcctcttgagtagctagaactgcaggcacacaccaccaggtccagctaatttttatttttagagatagttttgctttgctgcccaaggctggtcttgaactcccgggcttaagcagttcccctgccttgacctcccaaactgcgggattacaggcgtgagccactatgcctggcttactttagaaacctatttgcattagccaaatgtgtccttttaaatttattttatgtaaaaaacataaaactactacataacagaaacaatattacctgcagccacaaatgtctcagaatagaaacttttaatctaaaaaaatttgccagcaggtgggtatttgttagcaaatatgacaaagggatactgtctttattatatacaaagggtatttacaaattgatcgtaaaaatttcagagccatttgagtaaattagtcaatgaaattaaggcacagtgttcaagaggaaacacggcaaaaaattaatatggaaaaatgtatttcctagctgggtgtgttagctcatgcatgtaatcccagcactttgggaggctgaggtgggaggattgcttgagtccaggagtttgagaccagcctgggcaactagtgaaaccctgtctctacaaaacacacaaaaattagctgagtatggtggcgcatacctgtagtcctggctactcgagaggctgaggtgggaggattgtttgagcctgggcggtcgagrctgcagtgagctgagattgtgctgctgcactccagtctagatgacaaagtgagatgctgtctcaaaaaaaaaaagtatttccttactagtaaaaagcaaaacattttagaaataagtaaaatttggtatcatttttacctattagacagttaagaaacttaaaaaatgagaattttttttaagtaaaaaggaatattgtagatattcatatttagtgataatttaaggtgttaacaaccttttttgaatcagtttgccaatatgaatgcagtactcatacacattcaatacttaatgaaagtgtttaggctgttagatccaagaatccctctgtactgaaggaatatgaagaaactgtttacacaaaaataaatagtgctatttttaatagaaaagactgtaaactaaatgttcaaaatttatataatagtgttaaacaggaaaattttatgttgtgagtattatgtatcatctaattaagagatagaatttgaatacaggctctgtaatttattagcttggtgatcttagtagactgacttaactatcgctcagtatcttcacttgtaaatttgagataataaaacccacctcataggttttgttgtgtgggttaaatgaattatgtttttaaagtacataaaaaggttactgctcatgatggctcagtataygagagagagatagataaataacatataaacattctaatacattgttaattgaaataagtcatgatataaaactaatagttaaattctggtatttacagtggaatataaataaaaactggggccagtaataaaaaccggcgccaggcacagtgactcatggctgtaatcccagcacttcgggaggccgagtagggtggatctcctgagcacaggatttcgagaccagcctgggcaacgtggtaaaaccctgtctctacaaaaaatagaaaaattagctgggcacggtggcaggagcctgtagtccgagctatttgggaggctgaggcacgagaatcacttgaacctgggagtcggaggttgcagtgagtcaaaatcctgccacgcactccagcctgggggacagagcaagaccctgtctcaaaaaaaaaaaaaaaattatggccaggtgcggtggctcacgcctgtaatcccagcgctttggaggctgaggcaggcagatcacctgaggtcaggagttcaagatcagcctggccaacatgatgaaactccgtctctactaaaactacaaaaattagctgggtgtggtggtgcacacctgtaatcacaactactctggagactgagacaggagaatcacttgaacccaggaggtggaggttgcagtgagccgagatcacaccactgcactccagcctgggtgacagagcgagtctctgtcccaaaaaaaataaataaattaaattaaattaaaaacaacaaaacaaaaactggaaagaaccaatcctgttagaacagtttgtcctctgtccacctatcattttctgtactgtacttgaatttgtaataaagcatattccttcattaaagaaatataatgttataacttcagctagagagagttataaaatatgtagagaccctatgctgtagaaatacagctgtgtcacatgcctctctaggacatcagttgaaaattttgcctctttatccttctatcattcacctcaagggtaatgatatctgcagcttagtgcctagaacattgttagatacttagaaaatatttgttaaatgaattgattattggmtcttacataatagacaagccttttttttgtttgtttgtttttgtttaagacagagtctggctctgtcgtccaggctggagtgcagtggcacgatcttggcctgctgcaacctctgcctctagggttcaagcaattcttctgtctcagcctcctgagtagctgggactacagatgcccaccaccatgcccggctaatttttgtatttttagtagagacggggtttcaccatattggtcaggctggtctcgaactcctgacctcaggtgatccacctgcctcagcctcccaaagtgctgggattacaggtgtgaaccacctcacccagccaagcctcatcttattagtagtttattatcatttaaatgtatgtgaatatgtgttttttattttaaaagatcaggttacatgttataaagttgaggttaatttggccgggcgtggtggctcacgcctgtaatcccagcactctgggaggcagaggcaggcggatcacgaggtcaggagatcaagaccatcttggctaacacagtgaaaccccatctttactaaaaatacaaaaaatacaaaaagctgagcgtggcggtgtgcgcctgtagtcccagctactcgggaggctgaggcaggagaatggcgtgaacccgggaggcggaggttgcagtgagccgagattgtgccactacactccagccgagacaacagagcgagactctgtctccaaaaaaaaaaaaaaaaaaaaaaaattgaggttaatttatgtgactttattgagtgtctgctacggtctaagcaaagcagtaagtgaataaaagggaaaggaggcatactaatttgttaatgatgggaatattttgggggcatgggattattaggatctcttattttcatttatatgagtccatagttgcagtgaacgtggattttaaatttgatgaaggacaaattaaatcaaaattttgtttttcatataaattacctagtatcttaagttcttagagcattgtattttggattataggaaattttaggtataatttgtatcatttcttttctttttttaattttattttgtgttttgagatggagtctccttcagtctcccaggatggagtacagtggcaccatctcctaggttcaagtgattattccgcctcaggctcctgagtagctgagattacaggtgcctgccaccacgtctagctagtttttgtatttttagtagagacggggtttctccatgttggccaagctagtcttgaactcctgacctcaagcgatccgcctccctcagcctcccaaaatgcagggattacacgcgtgagccgctgcactgggccccatttattttcttagtagttgtagtactttttacttgattttctaaaattatcatgacatgttaacattcatgctagtaaagtgtagaatatagaatagaaaagtgcatttaagaaaattataagtcatttttggtgagctcaatatatttataatagaaaataaatggaattatttcaaaaatgaacatatagtgctgagtcccaattttttgtatttttttattaagtgtatttttttagcagagtgtataaaatgtaacattggatattttactgttcattaatgcatgcattttgatttattttaacttcatttggcttcatataattctatttttacttttcaaggaaagcaagtcttgctctaattcgaaaaatgattcatttttgctctgaagcactgttaaaagaagtttgtgattctgatgttggtcacaatttgcctacaatactagtggaaatcactgcaactgtcctggatcaagaggtccgtttctttttcaaaactctttagcattaatttcctttagctartagtctgaaataaaatttttgttttaatttcagtaaatcatgttgtgcaaattactgcatttctctactcctggcaactaaacttatttttattttttatttttcaggatgatgatgatggccacttgctggctttgcagatcataagggatttagtagataaaggtggtgatatatttttggatcagctagccagacttggtgtaattagcaaagtgtcaacgttggcaggtccttcctctgatgatgagaatgaagaggaatcaaaaccagaaaaagtgagtggtcttaattatagaggtatcaggaagagttttttttttttttttgaggaaaatctagtttcaatttttgatggtttttgacaggataatgacaatatgaaataattctgtatattttttaaattggtcaattttcttttaaaacattttgatcaacaattttaaacatatagaaatgttgcaaatatagttaaagaatatcagaatactctctatccaaattcactagttattaacattttgccccatttcctttaacattttttcagacacatgtatctgtktgtgtgtgtgtgtgtgtgtgtgtgtgtgtgtgtactttttttttgagatggagtttcgctcttgttgtccaggctggagtgcaatgttgtgatctcagctcactgcaaccttcacctccctggctaattttgtatttttagtagagacggggtttctccatgttggtcaggctggtctcaaactcctgacctcaggtaatctgcctgccctgacctcccaaaggctgaggttgcagtgagccgagatcgcaccaccgcattccagcctgggcgacagagtgagactccagcttttttttttttgagacagagtctcgctctgtcacccaggctggagtgcagtggcgcgatctcggctcactgccagctccgcctcctgggttcacgccattctcctgcctcagcctccccagtrgctgggactgcagacgcctgccaccatgcctggctaattttttgtacttttaatagagacagggtttcaccatgctagccaggatggtctcgatctcctgacctcgtgatccgcccgcctctgcctcccagagtgctgggattacaggcgtgagccaccgcacccggcctgagactccatcttaaaaaaaaaaaaattgatggtaaggtgaatacagagttttaccttttaacctaaatatttcaccagaaaaaagccaggacatagttgtagtataattatcaaaatcgtactaatcagaaaatttaatatttatgtaacactaatatattctctggagacatatttagattttgccattgtctttaatgtccttcatagtaatttttttttctggtccacaatgaaatccaggagcacacattacattgcttatcatattcctgagaacctgcgatagtttgtcctgagaacctacagcagtctgtcagccttccttttattttcatagctttggtgtttatgaagagaatagaacagttaatttgaacaaagagcctaactttgtgtcatgtttctttgtgattaaattcagcttatgtgttttagcaaaagtcctatagaggtgatactatgctcttctaggtgcataatgttccttcttggaggcacatttgtgtctgtttaccctgttggttatgataacttggatcacttgcttaagtttttctcttccaggtttctctactgtaaagttgtaaagttgctcttttcctttttttttttttttgagacggtatcttgctctgttgctgaggctggagtgcaatggcatgatctcggctcaccgccccctccaccttctgggttaaagcgactctcatgcctcagcctccggcgtagctgggattacaggcacgtaccaccacgcccagctaatttttgaatttttagtagagacagggtttcatcatattggccaggccagtctcgaacttctgacctaggtgatccacccacctcggcctcccaaactgtcggtattacaggcgtgagtcactgctcctggcctctttttccttttgtaataagtaatttgtagggacataattccagactgtgtaaatatgctgttcctcagtaaatttaacccaccaatttctgtattcattggtaactcttgccttagactgcaaatttaaatataccttttctgtgtctagtggttcccagcaagatttatttctaatatttagtgaatgcttactgtgtgttaataacagggtagtaatatttttgaaaaaaatggtggtatatgagttaataattgtagaatcccgagggtggtgaaagagagagtgtgtatgtgttacccaaatctgtttaatcgtcagaattactgggggatttaaggaaaaacaaaacaaaaatattatccgagtttattttctggaactctctctctcaagaaataggttacagcaatcccaaccaagatcccagcagtctttttgtagaaattracaaggagattctaggctgagtgcagtggctcatgcctgtaatcccagcactttgggaggccgaggcagggagatcacctgagatcagaagttcgaaaccagcctggccaacattgtgaaaccccatctctacaaaaaatacaaaaatgagccaggcatggtagcacttggctgtcgtcccagctactccggaggctgaggcaggagaatcacttgaacctgggaggcggaggttgcagtgagctgagatcgcgccactgtactccagcctgggcgacagagcaagactccatctcaaaaaaagaaaaaaaaaattagctgggcgtggtggcacacacctgtaatcccagctacttgggagggtgagacaggagaattgcttgaacctgggaggcagaggttgcagtgagccgagatcggatcgtgccattgcactccagtctggttgacagaacagaactccatctcaaaaaaaaaaaaaacaaggagagtctaacatttgtatataaatgtaatagccaaagcaacctggaaaaggagcagcgtagaaggatatacatcaatttcaactcttttataaaactttggtaatcaagaaartgtgacaatagtgtaaagatagatgaatgacccactacacatatggccaattgattttcaacaaaagtgctaagaccaccaagaaaggatgatcttttcaaaaaatgaacaagccaatagcatatgcaaaataattaaacctcaacccttaccacatatatatatatttgtatcatttctttttttgttttgttttttgagattgagtctcccttagtctcaacccttactacccatgtatatatatagcattatatatatacattatatatatacatggttagggtcccatatacaaaaattaacaaaatgaaccatagactaaaatgtatacactaaaattatgacacttctagaggaaaagagaaaatcttagtgaccttggacttgggaaagattttgtaaattaaacttcaaaaggttatactgtaaaagaacaaataattggtaagttgtacttcatcattacacacttacgctcttcaaaatacgttgaaatggtcggctgggcatgatgcctcatgcctgtaatcccagcactttggggaggctcaggtaggagaattacttgagcccaggagttcgagaccagtctgggcaacatggtgaggtgagacccagtctctatttttttttttttttgagatggagtctcgctctgtcgtgatctcagctcactgctagctctgcctcccggrttcaagccattctcctacctcagcctcccgagtagctgggactacaggcgcccgccacaatgcccggctaattttttgtatttttagcagagacagggttttaccgtgttagccaggatggtctcgatctcctgacctcgtgatccgcccgccttggcctcccaaagtgctgggattacaggcatgagccaccacgcctggccgacccatctctatttttattaaaaaaaaaaaaaaaaagaaaaaaaagaaaaggcaagccagataattctctcagattttatgtatctgaaaattatttggccttctttctaattttttcttttttgagacagggtctcgctttgtcacccaggctagagtgcagtggcgtgatctcggctcactgcaacctctgcctcccgggttcaagcaattctcctgcctcagcctcccaagtagctggaattacaggtgcacaccaccatgctcagctaagttttgtatttttagtagagacaaggttttaccatgttggccagggtggtctcgaactcgtgacctcaaagtgatccaccgcacctggcctctttatttatttattgtttaattaaaaaaatatttattttatttttgtagagatgygggtctcacaatgttgccaaggctaggttggtttttggcctcaagttatcctcctgccttggccttccaaagtgctgagattacaggtgtgagccactgtgcttctttgtctagtaagttttgatttgctactggatattgtaaatgtgatgatgttgggctctgggctttgtggtcttttgtaaagaatattgggttttggccaggtaccttggctcatgcctgtaactccagcactttgggaggccgaggcggacaggtcgcttgagcccacgaattygagcctagcctaggtaacatggcaaaactctgtctctacaaagagtacaaaattgtcattgcatggtggcagaatagcttttactctagggaacttcacccctatgatcccaaatttgtgatttctttgaattcactgaatatcctggtgatctatgaggattttctactctggctgtttggaatgcaaatgtctggctacttgtatgatctcttataactttccagttgttctttgcccartcttatgcagtatcaccccgtatataagtgtagtactcagtggaaactactttgcagatttctggagaggctttttctctttagttccgtaatagtgaactcagcctccacatattccagttgcctcaaacttttcaaactctgatctctattttcttaacttgtactgctaggatctgtgttccccttccacatgagcttagccagaaaatggtctctggttctaagagactcgctttgtttgctttcattttcttggggatcatagtcctgcattgactgttctttagtgtttgaaaacacatttttcgtatatcttgtctatattttagttgtttatgatggacgtatttagataatttaatatctttttttatgtgaatattttccatttttaaatgtgtccaaaaaaagttttaggaacacaggctgagctacaaaatgtttatacattttttttaaaaaaaaaaacatgctgagtcaggcgcggtggctcatgcctgtaatcccagcactttgagatggaggagggcagatcgtgaggtcagaagatagagaccatcctggctaacacagtgaaacaccatctctactaaaaatacaaaaaattagtccggcgtagtggcgggcccctgtagtcccagctacttgggaggctgaggcaggagaatggcgtgaacccgggaggtggagcttgcagtaagtggagattgtgccactgcactccagcctgggtgacagagcgagactctgtctcaaaaaaaaaaaaaaaaaaaagctctaactaaaatacttgtatgatcatgggaatgagtatatttgattcacttggctaagggtggggtcttggaatgaatgaatgaattttatttacttataatagataatatatattatatataaattataaatatatatatttatagagagacactgtctctattatctttatagaggttgtagataatgtctctattattatagagtgagaccctgtctctattatctatatagagattatagatagtgtctttattatctagatagatagatagatagatagatatagataatagagacagagtcccgatctgttacccaggctggagttctgtggcacagtccttcactataacctcaaattccagggcccaggcagtcttcgtgcttcaacttctccagtagctaggactacaggtgcgcactaccaccctcagctaatttttaatttttttttttgtggagacagactcgctacgttgcccaggctgatcttgaactcatggcctaagcactcctcctgccttggcctcccaaagtgttggggttataggcatgagccatcactgtcagccaaaatttatctttaaaaagcttctttggtgattctgttacacacttcactttggataccattgagcctctctaaatcatcattgtttacaaataggcccagagatgtaatgagttcaccaaggttttaggttattatgttgttgtgtgtagtgctctaatccattagtctttaccccactacacctggacatgatataatataggtcattatttacatgaatttcttaatatttttaacacttatttgtaagatttagttataggtaattaattagtcagaattgagagccaggtgccgtggcttggacctgtaatcccagctacttgggaggttgaggtggaaggattgcctgaggccaggagttagaggctgcagtaagctatgatgacactattgcacaccagcctggatgacagagttgagaccatgtttctaaaaggggggaaaaagattaagctacaggcaattgagtattatgttcagagtatttaaatttgaaattaaattagattcatgtttttaaaatatgtatgaatatttgaaattgaaattattttccatgtttaattgaataattctacacatttaggaagatgaaccacaggaagatgctaaagaattgcarcaaggtaaaccatatcattggagagactggtcaatcattaggggaagggactgcttatatatttggagtgatgcagcagccttggaattatctaatggcagtaatggatggttcagatttatcttggatggaaaacttgccaccatgtattcaagtggtagtccggaaggtggatctgacagttcaggtaatattttgtttcaattaaaatattttcctagtttctacagtttggtttttttctcatatttttgctaccattgtcaaggtattttatttttttgagacggagtctcactctgtcacccaggctggagtgcagtggtgcgatctcggctcactgcaacctccacctctcaggttcaagcagttctcctgtctcactctcctgagtagctgggactacaggcacctgtcaccatgcccggcttatttttctatttttagtagagatggggtttcaccttgttggtcaggctagtctcgaactcctgacctcaggtgatccccctacctcggcctcccaacgtgctggagttacaggtgtgagccactgtagaaacaaaaatatttgtttctttattttttaatatcaatttcttttgtatcagtagagaaaaattattataccatgaaaatatttcctaaatgtctttttactgcatgggacaaggaacaacactgtatctactttttaaaaaatatctttacaaatatagctcctttttttttttttttttttgttttggagacagtgtcttactctgtctcccaggctagagagcggtggtgtgatcatagctcatggcagcctcaaactcgtgagctcaagtgatcatctcgccttagcttcccaagtagctgggactacagatgcktaccaccatgcctggctaatatttccagtttctaatttagttttattgtttaaaatttatattttaataggtctttttttcctaagagaaaatacatgtcatacttgaaagaaataagattttgaaacaagtattttgtctttatagaaagccgaagtgaattcttagagaagttacaaagagctcgaggccaagtaaagccatctacttcaagtcaaccyataytgtcagcaccaggacccactaaacttactgtaggaaattggtcactgacatgtttgaaagaaggagaaattgctattcataattcagatggtcagcaagctacaatattgaaagaagatttacctggttttgtatttgaatctaatagaggaaccaaacattcatttactgcagaaacttccctgggtaagtatgtagatatgtaagtttattgggtacaaataaatgaatatgttaaattgtaacaaagtaagctctgtgaatattcttttttttccccccaaggttcagaatttgtgactggctggactggcaaaagaggcagaaaactgaaatctaagttagaaaaaacaaagcaaaaggtatatctgttggatgtgctttattcttgtcttttatactgatttgktaaattttcagtggtaaagtataagcactgaaaaaaattgagccatagaacataagcagccctaatataatatatttttagtttttctattttctgtgttttcttaaatatttatttacatataatttttatacctatactaaataccaacattaaaacagaatcaaaatggatgttaatatgaaacaaaatgtaaattacttgacttattaattgcacaaaaaaattcaactcattgagattattaatgatactaggatatttttagtgttgtagtgggattgaaaatgacttgtattttacaatctgggttaataccttgtgatacagcaaacttaactgcctggttctaaattcagattattttgatacttagtttaatggccatctcagctgaaattattacttcaagaagatacagtagcagatgcataattgactaatttttttatgcttccatcaggtttgcattattactttaaaatatggccagtatatttccatgtttattgttcttgcattttttttttcatttttaaaaaaaagtaagataatctcatagttagagtcaacattttctggtgactagtatgtttattttacctataatggtaatataaaataggatttttttaatttgctttgttttgaaacagtctctctgtattgtccaggctggtctaaaatacctgagtgcaagtaatcctcctgcctcagcctcccaagtagctgggactacaggcgctatgcctggttctaagatagtttttaaatacagtatgcaaagaatacttgtatatgattaggattaggggagagttcttgtgtttttatggctttgaccagagaaattgtaataatgatgtttctgtttttttttttaaacaaacttagtgaaacccttgtaatgttttttttgagactcggtttcgctcttgatgcccaaactgtagaatggtgcagtctcagctcactgtaacctctgcctcctgggttcaggctattctcctgcctcagcctcctgagtagctgggattacaggtgcctgccaccatgcccagctaattttttgtatttttagtagagacggggtttcaccatgttggccaggctggtctgaaactcctgacctcaggtgatccaccctccttagccttccaaagtgctgggattacaggcatttgccactgtgccagtcctgtgatagtggttttcatttgaagcggatgttttatataaagatgttcacatctttatttcctgtttgaatgtgctaggttatcccaaagatatttgcaggtggtatactttggaaagaacatagcttttttatttatttatttttatttttattttttttgagatggattctcactctgtcacccagactggagtgcagcggtgcgatctcggctgactgcaacctctgcctccccaggttcaagtgattctcctgcctcagccttccgagtagctgggactacaagcacgtaccaccatgcccagttacttttttgtatttttagtagagacagggtttcactgtgttagccaggatagtctccatctcctgacctcaagtgatccacctgcctcggcctcccaaagtagtgggattacaggcatgagccaccacatccggccaacagtagttacattttataaagttattgtgaatactgaaccattgcttgtgggagaaatactgggttagatttcttctaggcctaaggcctgttgtgacaacattttttcaccttgttttttagtatgtttttgtttaaagacaccttatttgctatgtattgttttttgttttttgagacagagtctcactctgtttcctatgttggagggcagtggcacagtctcagctccctgcaacctccgccttccaggttcaaccgattcacctgcctcagcctcccaaatacctgggattacaggtgcgcgccaccatgcccggctcatttttgcatttttagtagagacggggtttcaccatgttggccaggctggtctcaaactcctacctcaagtgatctgcccgccttggcctcccaaaagccactgcgcccagcctgatatgtattgttgatttattaatattgaactggccaacagcactgctatgcttgaacaaagcttattttagcacacactttttttttttttttcttgcaaggtacgtcacagtctccttgtgcttagaaacactggatagcacttaagcactatgtttgggggccattttaaacaatgaaatcaggaagaaaaagccccaaaattcaaaatatgtgacactaagtagattgtgaatagggcacttgtttatagtatgagacctgaagcaagaaagagtgtcacctttttgaattctgctgggaacatgcatattgggcaccttaaatttattgctgcactgtgcatgtctgtcaatgaatgtgaaagctctgcaatgattgattttgaggttacaaattttaatgaatactcatatttgcaagcatggaaccgttgaataatctgactataaatcacctacctcaagagttttttggaatatctaatatgtcgtattaaccaaccaaatctagactacagratactgaaatttcataacacaaactaaaaaaaatcagtgaggacattgtctcaatcctgtattctcattaaaaaaaaaaaaattatggagggtgtggagtgagggtggcaagggttccagaactgttgggtactatgctcactacctgggtgttgagatcatttgtattgcaaaccttaacatcacacagtatacccatgtaacctgcacatgtaccccgaatctaaaataaaagttgaaattgtaagaaaaaaattttaaaaattactgcttcactttcttgatttgaaatcagtagcaactcagtgagtaggtggctatccttttgcatatataaacaagtatgcatcaaaatattttaggcaaaaataattttaactaatttatttatttttttttattttttgaggcaaagtcttgctctgtcacccaggcactggcacaatcttggctcactgcagcctccacctcccgggttcaaatgattgtcccgcctcagtctcctgagtagctgggactataggcatgcacaaccatgcccagctaattttatttttaatttttagtagagacgaggtttcaccatgttggccaggctggtcttgaactcctgactgacctcaagkgatctgcctgccttggcctcccaaagtgctaggattacaagcatgagccaccacaccagtattaattattaatactgttttataaagagatagtttcttcaaacttgtcttatatccatgattgccatcttttaattctgaagggcataccaaaatagaatagaaagtattattaagtagtttagagagatacgtttttttctgttgcattagagttatgctgggtttgtttgggattaaaatggcattaggtgaatcctaaatttacattacttragcatatatttttaaataatatcatgtactaaatttcatcagacccagaacatacataggttgtttcctcaaataactgtaacttcgagagctcatttgtgcccaaatgacagtacatacgtaccttttcgtggtgaaatatgtaaatacgagtgtctataaaagtgaagatttggtaaaattattaattgtaaaaattcacatttgttgtgtttattttggtaggtacgaactatggctcgagatttatacgatgaccattttaaagctgttgaaagcatgcctcgtggagtagtggtaacactcagaaacatagcaactcagttagagtcatcttgggaacttcatacaaatagacaagtatgtcatcctctagattttaatgatatgtagtgaattttagtttgatgtcttcccctctatcctttatgtcatgggtattgagtagggggtcagcaaattatggcccaggagccaaatctggcctgctccccattttcgtatggctttatgaggtaagaatggtttttatacttttaaatgattgaaaacaaaccagaaggacaatttcaagacacatgaaaatcagatttcggtatccatataatttaatcacacatagccatgcttattcatttacatattgtctatgactactttggtgctacaggggcgtggttgaatagctgtgatgtagactatatggcctgcaaagcctaaactgtttgcactgggccctttacgaaaacgtttgctgacctctggtagacataatttgtgttaataatttgaacttttaattttgcttaatatctaaattattgtcatgataattgatgttctgataagttattttaagagctatgtttatgtttttgattgccttcattaaatttttttttcttttagtgtattgagagtgagaacacttggagagatttaatgaagacagctttagaaaacctaattgtacttttgaaggatgaaaacacaatttcaccatatgaaatgtgtagcagtggcttggtacaagcacttcttactgtgttaaacaatgtaagtttatcaagtagtaaagaacaaaaatacagttttaaaaattatttgtagttactccttcggtagagtggtttttagtttgttttgtcaagaaatatttaaaagctgaatgatgttaatatttctaatttcttcagcctttaggttttatgattagtttgagccaaatgaattaaataattgtttattttgatttctaagttcccagttataatttgctaaaggttttgttgactaaaaacacttcagcttgatttgttattattcactcctctgatttttacataagttatataaaatagaatatgtctgtagaccttaagtacccaagttatatgcataatgtgtgaacaatgaaagtttaggaagtttatgatggaaggaactctccacagggcttgttttccaaagaaaagtgttgtttggaggagcaaagttataagcctacctaagcatatcataaagctgttcaaaaataactcagactcagtcttgtggatggaaatgtagcgctygagtcacattctgcttaaagttacaacaaatacagatgagttaaaaggaaaaaagtttaggaagtttatgtgaaaatttgataaatatttgctaataaccttatatattttttcgatttaagaatgtctctttattgtggtaaaacttttttcctttgtttatatatttatttatttttgacacagagtctcgctttgtcgcccaggcttgagtgcagtggcgcagtcctgactcactgcagcctctgcctcctgggctcaagtgattctcctgccttagcctcctgagtagttgggattacaggcacctgccaccacgcccggctaatttttgtatttttagtagagacgaggttttgtcatgttggccaggctggtttcgcactcctgacctcaagtgacccgcccgcctttgcctcccaagtgctgggattacaggcatgagccactgcacctggctcttttttcctttattttaataaaagaattatattcatttcagttctacttagttttatttaattaattaattaattatatttttaaaaatttggaatgcttcacgaatttgtgtgtcatccttgtgcaagggccatactaatcttctctgtatcatttcagttttggtatatgtactgctgaaacgtggactactcagttctttttagtgtgtgtgcatgtgtgtatgtgcatctgtgtgttcgccatgatgcctaggctgggctcaagcgatctgccttccttggcctcccaaggtgctgggattacaggtgtgagccactgtgcctggccagagttgatttcttgatcttaatcattgtatgtgctgatgcactcttaagatttactttaggctgggcgcggtggctcgtgcctgtaatcctagcactctaggaggctgaggtgggcagaacacttgaggtcaggaatgcaagaccagcctggccaacatggtgaaaccctatctctattaaaaatacaaaacaaaattagccaggcgtgttggcatgcacctgtagtcccacctactcttctgtaattctgaggcgggagaattgcttgagcctgggaggcgaggttgcagtgagccaagatagcaccactgtactccagcctgggtgacagagcgagactctgtctcaaaaaaaaaaaaaaaaaattcactggaacttcaatgagtcccatagtcccttcataaactttactatttgcatttattctcatttattatagtgatatatcacattatatcacttagtaatctatgaaatagttttgatgtaccagttttttcctaatacttattaaagtaaatagtactgttaaaatggaaaatgttcattcctatattaatatagtctgaaaccatcttgtatacttggggaaacactgattttgcagcataattggtgagtatattataacattgaagaaggaaaaaattttgtatgttagccatggcctactagtcacatactaaaaataattttaattgaaacatgaaatgatgaatgattttattcacattgtagtgatcattgtataacaatatgttaacatttgtctcttagtttttgatgaatttcagtaagatccttaaattatttttttttggactttatactttttgttttctttagagcatggatttggatatgaaacaagattgtagtcaactggtagaaagaataaatgtttttaaaactgcctttagtgaaaatgaagatgatgaaaggtaaaatctcaaatttctttgaatttgatgtttgtaatgttyacacagttggtatacttcctctaaaataagtctagtgtaacatttatgcacacaaaakaaactcttaataagaaagtaacatrttatacatgtataataagaggaaaatttttgaagttttttttaatctaatggaataaaaagaaacattgaaattacatgtctggtatgaatgcagctgatcacttagtttacttattcatgataattattattttgtaaattcagacaagattttgctctgttgcccaggctggagtacagtgatgtcatcttggctcactgcagcctcaacctcctgggctcaagcatttctcctgtcttcgctgcccaacgtgttgggattataggcatgaaccaccgttcctagcctgatcacttagtttaaattacatgcctgtttaagatagttgaaaatttgaacactgatgaaatgtttgataatattaagtaataattgttctttttaaaagtgtaatactgtttttttttaaaaaataattcttttgttagatttatgtacaaagactatctctggatgaaatgataagctctttagtattttttcaaaatatataagaagaagtaggccaggcacggtggctcacgcctgtaatcccaggactttgggaggctgaggtgggtggatcacttcaggtcaggagttcgagaccagcctggccaacatggcaaaaacccatctctactaaaaatacaaaagttagttgggcctggtggtgggcgtctttaatcccagctactcgggaggctgaggcaggagaatcccttgaaccctggaggcagaagttgcagtgagctgagattgagccaccgtactccagcctaggtgacagagtgagactctataacaaaaaaaaaaaagaaaaaaacctggatggagattggccattagtagctaattgctaaagctgggttgataaaggttcattatattattctgtgtacatttgaatgggattgcacttgtcaaataacaagttatacaatttattcagataattgtgttaatttcaaatttcatttttaatgaatgcatattatatctttatggatgtataatgttttgaagtattactgtgttttagctctttgcaaactattactaatacttaaatatactagtctcaatggaagcatctttttacataaattccgtaagtggtaatactgtgttataggttatagatgatttcttttttttttaagagatggagtcttgctgtgttgctgaggctggagtccagtggctatttacgggtgccagaattttgcactacagccttaaactcctgggctcaagcaattctcttttctcagcttcccttgtagctgggactccagcatataccaccttgcccagctctgcaagacgatttttgaaagttcttgattcaaattttcacattgttttccggaagtgtcattgcagtttacactaataatgagaaagtatatgttgtgataccctagccatcaaatattttttcaaaactttgttgctttatattcttttttatttatcaaatattatccagtaaaattatttaaactttaaaaataaatcatacatctgctttaaatataattaagtttttattagaaaaatgaaatgttttattcttaagtaaaggaaattgagttgtgagagtatttctactcagacataatctaatacaaaaattaaactgtagtcatgaaaaagtaggggtatatattgaagttgattaccatattttctgcatgaacatttacatgtagttatacaaaacctcttaataataattatttcttcgcagtcgaccagcagttgcgttaattcgaaagttaatagctgtactagaatctattgaacgtctacctctccatttgtatgatacaccaggatccacatataacctccaggtaaccataaaaaatgtagtagctagtattgctgaatgcatctaggaacagtgtgacacttttctttaaaaaaaattattttctttcacatcggattaaaataaaaatgattctacttaatctttaaagattttagcttatatgccatttgattgatcttaatgacttgaagtctgttttgtttgatcaaatcactggaaaatgatgcattcatttaatatttgttaaaagcattatatttcgtagatcataagtggcaaaaggtatcagtggaaaaagctgagaaaagggttcctcttattctacaattatgagtcagttctgtcttagtccatttgggctgctgtaacaaaattcctgcgaacttaataaacagaaattcattgctcacaattctggtggctgggaagtccaagatcaaggtgctagcagatttggtgtctcgtgagggcctattcctcttagatggaaccttctaactgtgttctcacattgtagaagggatgaacaagatctctcaggcctcttttataaggacactaatcccattcatgagggcagagcccccccagaagttccaccatccaacaccactgcactggggattaagttttaacacatgaattttgcggggacacaaacattcagaccatggcaagtcccttccttatcactatattgtaaacataagaaaaaaagtcaagatattttaagcacaatttttttcgggtctttatgtcagtggttagagtcagattgcccaagtcttcactattcctatcaatcacatggtttcatagcctcttttccttccctcctcctccccatacagwtatatatatatatatatctgtatataatatgtaacttcctatttacattctcattcattcaattattcttttctttagtagctgggatctagatgcaaacaaacaatacattttactaatgtcctagcccagaactttatcactttttttgtgggttttttagtgtttcctagcaaggccttctgctttgaattttgcctttatctaaactgttctgcattctactgcatggaatagtttcttttgaataatagcctttaatgagtgattgaggatctatatatgccaaagcaatgcaaagctaacaaaacttsccatacctctgagaacccaatactgttatcagtgccactagactcccaaactagagtacttatttagggagttttacagtgcagtagttgcacctgatattctatatgtaaaagatgtggagggctactttgtgttttgtttcagacagaataacaggagtaatggggactgtttggtccattgtttttaagctttattcctggtaagtggatgagttggagataagtctcaaagacagtgcaccgatgccttttattatgcatttttcacttcaggagattgtgcaagatccaaagagaggaaggccaggaatgtgctctctggtaattttgctgtctaaaactaccgaaatgcacatataaatctttaattgtttttataggaattagttaagatttatacagaaatgaatctacctaaaattgctagtcctgtgcttgttgcttactaaaatgtattggattaaaaactattttgcatcttttaaagtttattagcctttgattatacaggttgagtattccttatccaaaatgcttggaaccagaagtgttttggattttataatatttgttaccgattcagcattcctagtccaaaatctgaaatgctccagtgagcatttgagcatcatgtcagtgctcagaaagtttcagattttggagcatttcaagattccagatttgtagattagggatgcttatcctgtagaatatattctagcggagtaagctaattagctacttttcaaaaacttacctggaaaattgtgagttataagtcactttgattaagaagttttataagtttatttaaactgtgtatatttagaagttaagaagttttgtaagtttatttaaactgtgtatatttagaagttgtttagaaattctaggaagttaagtttgtcttttacttgatagccactgtaacttacttagtgtcccttttataaaagaatctttcctgttggattgttttcttttttttctttttttcttttcaagactgggtctagctctgttgcacaggctggagtgcagtgtcgtgatctcagctcgctgcactctccgtgtcccaggctcagctgatcctcccgccttagcctctccaatacctgggactacaggcatgcatgcctggctaattttttgttggtttgtttgttttaatatgtagagatgaggtctcactgtgttgcccaggccggtcttgaactcctaggcacaagcaattgatcctcttgcctcagactcctgaagtgctaggattacaggtctgagtcactgtgcctggcctaaagaatgtttaataggctgggcgtggtgtctcacgcctgtaatcccagcagtttgggagaccaaggtaggcgggtcacctgaggtcaggagtttgagaccagcctggccaacatagtgaaacccatctctactaaaaatacaaaaagtagccgggcgtggtggcacgcacctgtaatcccaactactcaggaggctgaggtaggagaattgcttgaagccgggaggcagaggttgcagtaaaccgagatcactccactgcactctagcctgggcaacaggaacaagactcccatctcaaaaaaaaaaaaaaaaaaaaaaaaaggccgggtgtggtggctcacgcctgtaatcccagcactttgagaggccaagaagggtggatcacgaggtcaggagatcaagaccatcctggctaacaaggtgaaaccccgtctctactaaaaaatacaaaaaattagccgggcgtggtggtgggcgcctgtagtcccagctactcaggaggctgaggcaggagaatggcatgaacccgggaggtgaagcttgcagtgaaccgagatcgcgccactgcactccagcctgggcaacagagtgagactccgtctcagaaaaaaagaaaaaaaaaaagaatctttgatagaaaacagacatttgttcatagttctattatgtttatagttaataaatccaaatctcagttgttttagggtatatcattttttacaattctgagacagaaaccaagacgttttccagagtattttgatcgtttttgtgtagatacttacaaggagattacgatttcggttggaacgtgcacctggtgaaactgcattgattgacaggactggcagaatgttgaagatggaacctttggctacagttgaatctctggaacagtaccttttgaaaatggtgagtttctggcaagggcacggtgaaataagcattctgagctgtggtttagccttttaggacaataatttgggaagtatatatccagagttatggtaatacagtttggcccagtaattccattttagaactgatttctacatgaagatgtttattataattttgtaatattgaaatagtaaacaaaaaccttaattccaatcaataaattaatgttaaatagataattcatattaaaaatttaaatttaattgacaaatgtgtgtgataattatttctattaatttgagtatcatatagccataaaaatgtataaagactaatgataacagaaaaatgtttttgtacagtatgatcaagaatttgttttatcctatccattgaaataataaactaaagaaatactctgtgattattaatagtgaggtgctttggttgtgggactttttatttttctttatatttttaaatgagcatttgttttttgtttttgttgttgttgttgttttgttttgagacagagtcttgctctgttgccaggctggagtgcagtggcacaatctcggctcactgcaacctccgcctcccaggttcaagtgattctcctgcctcagcctcccaagtagctgggactataggcacctgccaccacgcctggctaatttttgtatttttagtagaaacggggtttcaccatgttggccagggtggtctccatctcttgacctcatgatccacccacctccgcctcccaaagtgctgggattacaggcgtgaaccaccgcacccggcctaaatgagcatttgttataataaaagaaaacaattcacattaaagagataggaaaaaagtaggtaacgtgcttgaaaacagcattattaaggtgactgtctttcatattttctttggtttaggtagcaaaacagtggtatgattttgaccgatcttcatttgtttttgttcgaaaattaagagaaggacaaaattttatatttcggcaccagcatgattttgatgaaaatggaatcatttactggattggaacaaatgcaaagtaagtcagtcattttactttaagctggagtgaccatattcacttggtaaaagaattctaggaagtagaataaaattgttagcactctgaatattctgtggtttaaggaattttgacttgtaggtagaagttaagattatccaaattactttttatgaggaaaaaatgtctaaattgctaattctagaattgtacttaatataattctgtatttaaaaccttgtgcaaatgcaattatcttaacgttgttatttgctaatttttctttatttttgtatagaactgcttatgaatgggtaaatccagctgcctatggacttgtagtagtaacgtcatcagaaggaagaaatctaccttatggccgcttagaagacatactaagtcgtgataattcagctttaaattgtcatagcaatgatgataagaatgcctggtttgccatagatctgggtctctgggtgataccatcagcatatacacttcgtcatgctcgtggttatggaaggtctgcactgagaaattgggttttccaggtatccaaagatggacagaactggacttctttgtatacccatgttgatgactgcagtctcaatgaaccagggttagttgaggagtctttgcaaattggaaaactcactaaagagctttgtttatttttataattttatactctagagctctcttccttgtgaaatattgaagcaaaattttctttctaaaaacaaatcacttgatactttaggcattaaaactttgaaacactgactttactaaaactttgtcaaaaggtttagtttaaataatagaaagccgagctattttacactgtatcttagccaaaaggctgagatgctgtgaatatttattttaaaaattggtatatagctgtatatacatacgcgcgcacacacacacacacacacacacacacacacacacacacacacacacacatttatgcatacacacacagcccactaatggaaacaagtgaaataaactttccataaactctccatataatcacataatacttaggaatgttcaacatattagcagtggctattgctcgttatagaattaaggctgacttaaaatgtttttatttttatccttaaattttatgtattgaataagtttttaaaagacaagtcagtaacttctaaaaaattagttctactaaattttatttatgcattttggcacatatcagggggtagattatgtacccaaattgcttttggcatttgatatggtatgagaggagcttcttaacattaggattaataggtgatgttttcacccctttcatgctttaaagacaaaatattaatacgttatttaaaagtttgcaaaaatgtttttaagtccgtttttccatcataagagaatttctcctactctttgtaaaccatcctttttttttttttaaggagaatggggtcttgttatgttggctgctttctaacttctgggctcaagtgattcccctcacctcagccacccaaacaccactgcacccagcattttgtcttttatctttgaattatattaatcataaatcattaatgttatgagtcaaatcaatagcgtacatttaaatgtttcgtttttaacttgttctcttgactactttttttcctttgatttsttgattcttgtaatgaactgttgagttaatatgaaagttagtttattttttctacaggtctctgttatataaaaaatctttcccatcttgaatttctttttcatcttttaaaatattacataattttttctctaacatattaacaggtcaactgcaacttggcctcttgatccaccaaaggatgagaaacaagggtggagacatgtgagaattaaacagatggggaaaaatgccagtggacaaacacactacctctcattatctggattcgaactttatggcactgtaaatggagtatgtgaagatcagctaggtaaagagatgatacgaggcttttctaacttactaaaacaattactttkgtaaaaagtgatttggtttttatttctccaatttctacctgacagggaaagcagctaaagaagcagaagctaatcttagacggcagagacgtctagtacgttcccaggttctgaaatacatggttccaggagctcgtgttatcagaggcctggattggaaatggcgagatcaggatggcagcccacagggagaaggcactgtcacaggagaactacacaatggtgagtaggtgctcagcacttttgtgtagaaaatgggtagttaaattttttcttttaagataatttataaattgcataaatgtatgagcactgtttagaagaactgttgataccacattacaaatggaaaaaaggtaaagaaaataagggaaaattttaagttcttgggttttgactagaaacttactggtagtattttggaagtgatcaagcctagtgtaagttgagtatcttcaagacacacttccggttttttcccctagtttattttcaagcttactgtgagttttattttaatttcttatgtttttctttatcttgttagtctcacaccataatttttatggtatcataaatcatatagaagaaaaaggattaacatttttactrttttttaataatgcatggaacaagaaacattgtctctttatctgttagtagattattattatttcaaagtgtttcttagcctacctgctttttggggaggagtttatcatgttttctaaatattgctatgtgaatcaagtttctttgatgctgcacagtttagcaaagtcatccacttaataaattgctattaactttaaagcaattatagtggctaattattttcttcaaactataaggctgacttaytagcagataatttgcctaaatggcagtgggtttgttttcatcaattttgtatcagtttttggcattaaaaaaagtaaaaatgtttatattctcaacttacaccacatatatatatccacatatatgtgtgtgtatatatatgtattttttttttttttttgagacagagtctcgctcttgttgcccaggctggagtgcaatggcgcaatatcagctcactgcaacctctgcttcccaggttcaagcgattctactgtctcagcctcctgactagctaggattataggcatgggccaccatgcctggctaattttgtatttttagtagagacggggtttctccatgttggtcaggctggtcttgaactcccgacctcaggtgatccacccacctcggcctcccaaagagctgggattacaggcgtgagccaccgcacgcggcaacttacaccacatatttaaagagctagaataaatgtgacggtacttacgagaatgactgacatttaatttcatgttttatgtggtaaagacatttatttattcaaataaaccctttgactatattgcttttaagattctattccttgaattattttactgccaaatgtatttatgtagtatcatgccctaattgcaaatcattgtaatcaaaacaggtttacagcgacctaaaattcataaataccagtaatagttgagatatcaactattattgttatactgagttgaatagtagtgccattcaactcagaaaatttcaagttttctttttaggcatcttgatgatacttattaaaaagttgttattctatttcctgtaattgttttggccttgatgtatgtgacttgataagaagaggctagttagagatgtgtgaatgcagttcttttttctcaggatggagtcaactgaagcaattgcatagggaaattagaatctttttttttttcccaagatacaatggcacaacagttttaatacaaccaccagtcttcaaaaaataattttaatactttgtgcctgtactagcagcatcttgcactgtgacattcctatacatacataagcattttattgaagtacaaatgttaaaagcagagtaacttaagcaattgcctatacaaaggtaaatagacactgtgggttatttttcttctcgattcatttttgctgcatagtaagttgcaattacatgtcagtataataatgttactgatctataaaatatatttgaaccgtgaggtatggcacctccctatgagagagtgctaacatgtacatctgaatattttgagtgttttttgtttgtttgttcgttttagctgccacagatgggaaaaaaaaaaatcacctagcctagaaatctcagagtttagcgttcaagaaaggcctatttttgctaatctgacaaatgtagaaatttagttttgcctaatcaacatggccattcccatcaagttatgcctttgagtctctatgtcagagagggttcttagctttcaaatacttaaaccaaccatttctaatgatggatagtcattactgactctatttttttttttttttggtttatcttttgggtgtagaaggagttgagagagtatgttttttgggccaattaatataatacaaaagttacttttatttgagattgggctatgtttttgaaacttttccttttctcacacatttctgtgtagcagaagagatagttaaatgttggttcttcagagattatttcagcatacagaaaaaaatagaggcaattgaaaaatctcatctaagctacttatgtagatttggggcagtcacttttcctttcaaagaacacatatgcagataatccccacaggtaattcaatattatttccctctgagtgctatcataaacatatgaacttggtgtaagtgtgggtgagcatctgggtgtgtggatgggtgtgtatgtgatcttgggccccttttatgtatgggtaagaactttataaaggcttgttatacttctaaaaaaatgttttttatgtcttatgtttttccctgaaatagttagcttataacactaaaataagattgtaaaatttctattaatttgcttttaatagacaattttttttttgcttttggaagttaattacctttttaaaaaaagaatatcatttttctactacaagtaaatatatagattgaatatcattatgctcgttaattctgtacatgttattagctttagcagatagttctaataaaagagttcagtatgctctttaaatttttttttagaattttctgtgtttattcaaatttattgaacttaattatttaatataagagaaccaaggaaccactgaactttgagaacacaaccgaaatgctaactttagtgttttatttgaactagtgactaaaatttctatggcaatatatgaatattttgagaggttagcccaaattgtaagaaattaatggtaagctggcatgtttttgtagaaaaaaaatttgactacacataattatatttagcagttttaaaacttttacctagattctgtttacttgctgaagtggcagtattttaccatgtatatcaatcttttaaaatttcttaaacagttcttccatttaagaagtaaccaagccaggtgcagtggctcacatctataatcccagctactccagaggctgaggtgggaggatcgtttaagcccaggagttcaagattagcatgggcaacgcaagacctcatctctaaaaatcaaataattttaaaaatgaaatataacccagtagatttaaacatgacccttacattgcttttaaatgtcatagactgaatagttcagaaataagggaaataaaaggaagaattttaaacatttcctggaaaccttgtatagagtacatatttcttgtccttaaaatatttgtatcatgagagttaaataatatagactttcagatagctagtcatatcgtcaaataattgagtccaaaaatttacatatattttagtgggcagaccttgattgactatagaaattcagaaaaggacagcactgatgaaaagctgatcccatattgtggagctactgtctgacacgctcctatctgctttctgctgggtctcacaaactcctgtccctttccaggctggattgatgtcacctgggatgctggtggctcaaactcttaccgtatgggcgcagaaggaaaatttgacctcaagcttgcaccagggtacgaccctgatacagtggcatcacccaaacctgtttcatccactgtttcaggcacaacgcaatcatggagcagcttggtgaaaaacaactgtccagacaagacatctgctgctgcaggctcctcaagtagaaaaggaagcagcagttctgtgtgtagcgtggccagtagcagcgacatcagcttgggttcgaccaaaacggaacggagatcagaaattgtaatggaacacagtatagtttcaggagctgatgtccatgaaccaattgttgttctttcatctgctgaaaacgtccctcaaacagaagtagggtcatcytccagtgcaagcaccagcaccttaacagcggaaacgggaagtgaaaatgctgaaaggaagttaggccctgatagttctgttcgtactcctggggagtctagtgcaatatccatgggaattgtcagtgttagttctcctgatgttagttcagtatctgaattaactaataaagaagcagcttcacaacgacctcttagctcttcagcaagtaacagactgtcagtgagttctttgttggctgctggggcccctatgagctctagtgcaagtgtacctaacctgtcctcaagagaaacatctagcttggagagttttgtaaggagagtggcaaacatagcacggactaatgccacgaacaacatgaatctaagccgaagcagcagtgataacaacactaatactttggggaggaatgtgatgagcacagcaagtaagtgagcttttccttctggaatccgatgctttttccacttggagggatgcaaaatagggtctcttgttctggctgcagtttttaactagatcattaaccatgttagataaagctacatcaaatttagcacttcaggaatatgaagttctctagaatcataatatttgcagaattcagactaggtgtgataaagaacctcttattttagaagcataaaacagtacttctgattttcactcctttatgatacatcattaagcaaagttgcatgaggaaatagatgactattaaatattatcatagtgcagtgaaaccaaagcatcatataagtatagcttttgtttagactctacattgatcttagcttctgaaagttaaattccaatttaagctgctaacaggtcaaagtaattatataatagtgctataaaaagaatttttagttggatttcagttgggttcccaaagttgttgcttttcaggaaccattttattattagtgtgttttatgacctcactctttaaaaaataaaaaacttggtttttctgaggtttctacaatctcacctatttgtactgatttgcttcatttttgtctttagcttctcctcttatgggtgctcagagtttccctaatttgaccacacctggtactacatcaacagtgactatgtcaacatccagtgttactagcagcagcaatgtagctacagcaacaacagttttatcagttggtcaatctttaagtaacactttaaccaccagcctcacatcaacttccagtgagagtgacacaggtcaggaagcakaatattccttatatggtaagttgtaatttaaaatgaaagtatttagatactttcataatgatgcttttattatgttttctcctgatattttaaacttttgtttaaagagaattattctctcttcttataaatatgaaatcttcgggccaggcacagtagctcacacctgtaatcccagcactttgggaggccgaggcaggtggatcagttgaggtcaggagttcgagaccagcctgaccaacatggtaaaaccccatttctactaaaaatacaaaagaaaattatccgggagtggtggcacacgcctgtaatcccagctactcaggaggctgaggcagaagaattgcttgagcccaggaggcggaggttacagtgagcagagatcgcgccattgcactccagcctgggcaacaagagcgaaactccttctcaaaaaaaaaacagaaaacaacaaacaaatacagaatctttatatataatatgaaaaaactcagtaatacgagagactattaaaaaattatctggggccaggtgcggtggttcacacctataatcctagcactttgggaggccaaggcgggcggaccacttgaggtcaggagttcgaaaccagcctggccaacatggtgaaaccctgtccctactaaaaatataaaaaaaattagctgggcgtggtggcggttgcctgtaatcccagctactgggaaggctgaggcaggagaatcgcttgaacccgggaggtgggggttgcagtgagctgaggtcgcaccactgcacttcagcctgggcgacaaagcaagactccgtctcaaaaaaaaaaaaaaaatctggtcagaagtggtggcttgcgcctataatcccagcactttgggacgccaaggtgggaggatcacctgaggctcaggaactcaagaccagtctgggcaacatagacccccatctttaccacccctacatccccaaaattagccaggtgtgatgtcatgctactgagaaggctgaggtgagagggttacttgagccctgaagttcaaggccccagtgagctgtgatcatgccactgcactccaacctcagtgacagggctagaccctatctctgaaaaaatatttttttttaaattgcaattatctgattatacatgaagtagatctaggaactttatatgtcatttttttttgtattttgtcacaaaagaagttttaatggaagaaccataaagctatttgacactcttatcactaagagaagaagtgtaatagattcataagctttgtaaaatgatattccttgtatgctgttatcacagtcttttggaagtaattccttagttaggtaatgcatgattcttgcaaattaaattttatttggaaagttcagtaacagccttatggcttccatgctataatcaaagggatgtatttgattcagttaagatagaatctgtgtttctatttcttttatttcatcttattagaaaagtaatgctctgtatagaaactagaagaaaattaaaatcatctagtccccacctaccagacaaccagctttgatgtacatcatttgatgtatgtttttgtttttttaacataaaaggattatatccttttccgccagctgttttcactcaatacattgtgaaaatattttcacatatgttgcatgggtttctataacatttgaaatgactgccaaatatttcactgtatgatcatcatttaatattattatcaattttgtatatttaagttagaacttttccattaccataaacatcattatgaatgagctttcttgaactgtattttaatatacttccttaggataaatgcttaaagtaataattattgaattgctttccaaaaacattgcactccatcccaattgttttggaataccctttaccatatatccttgatcatactgcctgtttttctttaaaaaaaaaaaattgggagtaattttaaagacaaagtttatgtgaagatacatttttaaggtgctattttgtgtatagcccattttcatgttttcttcctttttgtgagaatatagcctctcctaattcatagcaagaatttgatatgatgttccatagttttaagagagtcattatatttctgtttctgcttattaaacgtgtgtgtagcaaaatgatgatgattacaccaaagtgttataaattcattgcataaggtgttttctgatttattatttctcatggtggccctgtgcccctctctactgatttgttattatgttaacttcaagcattagttcttggtcatgggaagttgaagatgattgtgggtaggaaagagtgaactggccgggcgctgtggctcacgcctgtaatcctagctctttgagaggctgaagcgggcagattgcctgaggtcaggagtgtgagaccagcctgggcaacatggtaaaaccctctttactaaagtacaaaaaattagccaggtgtggtggcccactcctgcagtcctaactgcataggaggctaaggcaccagaatcttttgaacctgggaggcggaggttgcattgagccacgattgtgccatttgcattctagcctgggcaacagggcaagactctgtctcaaaaaaaaaaaaaaaaaagttagaactactgattgacttttaaattttgttgttaggtttgactagccttaaaaaaatttattgttggccgggcacagtggctcacgcctataatcccagcattttgggaggccaaggtgggcagatcacaaggtcaggagttcgagactagcctggccaatatggcgaaacctgtctctactaaaaaatacaaaaactaaccgggtgtggtggcggatccctgtagtcccagcttctcaggaggctgaggcaggagaatctctttaacccgggaggtgtaggttacagtgagccaagattgtgccattgcactccagcctgggtgacagagcgagactccatctcaaaaaaaaaaaaaaaatttattgttagatgatgaaaaaaattaatataatttttattttagattcaggggatatatgtgcaggtttgtcacaggggtatattgtgtgatgctgagatttggacttctattgatcttatcactcaaatggtgaacatagtacccaataggaagttttcagcccttgcccactcttgcactccttttggagtcgctagtgtctactgttcccatcttgatgtccatgtgtacccaaggtttagctcctacttataagtgagaacatatgatagaagattttcttttttatattcttaaagctggtagatactttaagactgctggggtgaaggatcagagtaacatcagtttataccatttgtgtatgctgtgcaagcttttactgtgttttgtggtttttctcttaccgcaggcacgaatactataccatgttgtgttttgaagagacattttattctatgatgtggtcaaatctgtgaaatacagagctttttaatgctggtaaaaaagggaagatgagaaaaaaaaagggacatcagtcagttgtaacataccggagatagaatttcaatatatgaagttagattatgttctttaaaagacaaatcaaagtggaactggtttattttgtgtaccaccacatcatgttaatcacaaccagttcctaaattgcaggtggctccttacaagtgttaaagggtaacatattttatcaaatttaagatgctgttgagtgttaagacacaccattttttttctgttactaaggttaaaaatgttgcaatttaattctgacttgccattgtttgtaagatacattccgatttcaaagcattacaatgttttaaaaatgtagacctttcaacctgagaaagttgataacagcaaaaaaatgtggacccttagaaactaatgaaatataatggcaggcctcttctactggccatccagtaaaaggcactgaatatttagtcctgtgtaattattggactaaaaaccatttggttcagtggtctgcaggtgtaagtttctgagcaattataaattgtcttctggatgttcttcaggaatataaagtattttgttttctatcctttgtgcaattctgatattatattttactattttttccagatccagtaaaaacttctgttataatccctttagtcctctttttttcagtttttatgaagaacagtttgtcagcatcttcatttatgcaggacaatgtaatttgacccagtctccatcgaaggcaagagattataagaaggaaggagataaaaatgatgcaagttgttttgaacttccttatgtgctagataatatggataacatgaaagatgccacatacattattccgtagtaaataggcattatcttaagtagtcattgtttttaagtaacctaccaggtcacatatctaagccccgtttttcactgattgacttaattctgtttttcctcgtaagatcttttacatgttgtaaaggtttgtttttttggttattgttttttaaatagccccacatggttatccatttatattatgattttgtaattcaggtttagtttatggttgtcctttatcacttgtttttgtcatgcttgtgtctgtgctcatcttgtatgtggtggcagaacgcaacagttgtcccttttgaattttacttttgttttgtaaaaacctaaaatgcaaagttcctttgttatgctttcttaattgtgttgacataaggttgtgggttttgttttcaagatttccttgatagctgccgtgccagtactctattggctgagctcgatgatgatgaggacttacctgagccagatgaagaagatgatgagaatgaagatgacaatcaggaggaccaagaatacgaggaggttatggtagagagagtaccccattctctttacaaagataggatgttaataattgaaatgaagaaaggaaaagctaagtcataatcaaactttgaagcaaggaaatgtggcaccagtataaaaaatgtagttaattaagaaaagcagttttaatctgagcatttatgattctccacttaaagaaaataagttgcttatatttgaaaaattttagaatgtcacatgatgttttaacaggcttaaaagggtgtgaaattaggctgggtatagggctcatgcctgtagtcccacactttgacatttgtagtcctggctacttgggaggctgaggtaaaaaatcacttgggtccaggagttgcaggctgcagtgagctataattgcrtcactgcactccagcctgagccacagaatgacacaaacacacacacacgtacacacgtgtatgaacttagtgcagtggctcgtgctgccatgagctataattgcatyactgcactccaacctgagccacagaatgacacacacacacacacacacatgcgcgcacacacacgaacttagccagtgcagtggctcatgctgcagtgagctataattgtgtcactgcactccagcctgagccacagaatctcacacacacacacacacacacacgtgtgtgtgtatgaacttagccagtgcagtggctcgtgctgcagttagctataattgcatcactgctttccagcctgagccacagaatgagaccctgacacacacacacccaagcacacacacagtgtatgaacttacccagtgcagtggcttgtgcttgtaatcccagctactcaagaggctgaagtggccctggagtttgttttttagtacctatggttttgcaagcagggtccatctgttttttcattagttgtcacatgaaggaatgaagtagaggcataaaaaaaaaaaatttgcccttatcatcagagttaagtggaagagtgaggacccaagcataggcaatgtgatccagaactctcaatatttaaccactaggattgtcttctaactgaaaattgtgcctaaaaaataccctttattgtaactaactgtaaatttaaaatttctctttataaaatgttactagatttcaaaaaaattgataagttgagttttaatggagtaaagaaatttaaaaaatgcttttagtatatggttgctaagaaaacacaatacttcttatgaaggaggttagtataaaatgcatgatgaatttaaaacattgaactcataacttttctgaagttggctaatgaaaaagttttcagtgacacttttgttaataggggttaatatattcaggtcatggctgaaagggggcatrtatgggtcaaataattagacatgtatctcttgggattgttttattttagattctgagacgcccatccctgcaacgtcgagctggctcccgctctgatgtaacgcatcatgctgttacctcgcagctaccacaggtacctgctggagcagggagccgacctattggggagcaggtaatatcttcatgtttatcttccctaccatatgtatatttttcccttttatagtaaagcaccaacctaaatgcctacaaaaatgtgcagtgtggaaggggtgagaggagggagctaccaaacagttacacaaagaaacttcccctactggttgggtttcatattctatatagaatccatgattgctgtkacataatgcatgcaggagtttaatgcttgaaacccctttacgttgctttgggtaatagtaaacatacattaaaatggttaatatatggtatctaagatttgtagttttagtagtagtagaagtggtagtagatgcagcagtagtagtttattaatagctaacgcttaatgatcactaactaagtgctagagttgtttttgtttttgagacaggatttcgcttcattgcccaggctgttcttgaactcttgggctcaagcaatctgcctgccttggcatgagccactgtgccttgccagcatagttcttaatactttatgtatattaactaattctttccaacaaaacaacctttttagggttattgttagccctaattttcagatgaagtaattgctaaaagtcatacatgtwatagtagttttggttccaggatgcaaacccaaacattctgaaaccagagctgtcaaatgtcagtttgtttcagttaagtgtttaaaccaaactgtggatgtgcacgtgtgtwcttacatgctgtctgcctcatagtaatttaaagcaactccccagcattttatttggtatataagtaattcagtacaaaatgtaatttacgttttaaaaaccaacttattttaaaataattataggttcataggaggttgcgaaaatactccagagaggtcttatgtgccctttacctaatttttgccattggctagtttcatattacctaattttagtatagtaacaaagccaggaaattgaggatgtttgtgaatggttatctttttattttttttgagacagagcctcactctgtctcccggggtggagtacagagtgtagtggcacgatctcggctcactgcaacctccgcctcccaggttcaagcgattctcctgcctcagcctcccgagtagctgggattacaggcgcctgccactatgcccagctaattttttgtatttttagtagagatggggtttcaccatgttggccaggctggtctcgaactcctgaccttgtgattcgcctgcctcagcctcccaaagtgctgggattacaggcttcagccaccatgtctggccatgaatggttatcatttggtgaaatgtgtagatttgtataaccatcactgatgcaacttactttgggtaaactgaaatgatgaagaaatgtatgtatctatacatgtttaggttagctcattttgggtttaagaaatatggctaaggaaatgcagtagttctaaataacacattgctttkgcaacaatgaaattttgcatcttattatgtttgtgtgtgaaattttattttgataggaagaagaagagtacgaaactaaaggaggacgccggagaacatgggatgatgattatgtgctaaagagacagttttctgcattggttcctgcttttgatcctagacctggtcgtactaatgtccagcagacaactgatctagaaataccacccccaggtacagaatgttttggttttgtgatttaattttratacatactaaatcagatatgaaaagtagggtgttgcttttgtatgcacgttattaaaaatttttttttagttttgtgtatgcaggttataaaaaatttttttagtcagccacaaattctttaaaaagtaaaggtttttttaaaggagcaaattacmaattatttcaaattttaaaaaccaacatgtgttttgtatttgtgcaatttttaaggcaaagtcccatttaaaggtgggaaatttttactgtattttctactggatcaaaatttctaaggatttattcctctcagttttgaaaggctatccagtggttacagtcatgccctctagagtcagttggcctgggtgacaaccttatcccttacaaaactctattttagattgtggtaggcatactaatttctccccaaaatcaggttctaacctctggaacttatgatatattatcaaagcagaccaaagagactttggagatgtaattagggatcttgagaaggggagataatcctggatcatccaagtggacacagtgtaatcacaagaggcaggagacagagaagaacatgtgactaaggaaacaggagtyagagtgacgacgagcagtgagccaaggaatgtgggcagctcctagatgctagaaaaggcaaggaaacagattcttctctagagcctytagaaagaatgaagccctgcaaatccattttaggcattcgacctctagaactatgagataataaatttgtggtagtttttttttttttttttttttttttycccttgagatggagtcttgttttgtcacccaggctggagtgcagtggcacagcctcggctcactgcaccctccgcctcccaggttcaaacaattctcctgcctccrcctcctgagtagctgagattacaggcatgcaccaccatgcccagctcatttttgtatttttagtagagacggggtttcaccacattggccaggctggtctcgaactcctgacctcaagtgatctacccaccttggcctcccaaagtgctgggattacaggcgtgagccaccgtgcctggcaagtttgtgttattttaaaccacccaatttgtggtaatattttatagcagcagtaggaaactgatatattgggcaagtcaccaaaactatccaagcttgaatttcttcatctcttacatgagagaataaaggtccctgtttgacaaggtagttaaaaagcttaaatgaagtaaggtatgtgaagtgcttagcatgctgcctgatgtgtgtctcaataaatgtcagctattataatcagtaaattatccttaacaaagatttaaattgttgattaagtgaggagtgtattttttagcctgatagtattaggctgggcacggtggctcacgcctgtaatcccagcactttgggaggctgaggcgagtggatcacaaggtcaggagttcaagaccagcctgaccgacatggtgaaatcccgtctctacttaaaaatacaaaaattagccaggcttggtggtgcgcgcctgtaatcccagctactcaggaggctgaggcaggagaaattgcttgaacccgggaggcagaggttgcagtgagccaagatcacaccactgcactccagcctaggtgacagagtgagactctgtctcgaacaaaaaaagacacctgtwttaaatatgaaagtaagtatactcggttgtataaatgttctttggggaggatagatagactgaatcaaggtgttctaaggtcccttcaaaaaggaaaatcttgtttctttggatctcagagaaaaaaaatgaattataaaaaaggaaaacacattctagagagtataaataggcrcaaactttttgtagagctctctgccagyatattttgtatcttctgacaaagtgttgttgccattggtaattttaaatattagctctgtaccccgttttgtacacataggtgactgtagaagtatttatattttcaaaaaattggaaatgaccttaattatgtccagtaactgggatatgcctctgtttaggtacagtgggatattgtgcagtgaaagaaataatattttagaagacgatcatgataatgaagaaaacattcatgagctaataaaaaatgagagcattctccaaatacattatgaaactaattatatgtgtgtgtgtatatgtgtttacctcatgatgcagttattcagtgtgataaaaggttgacacgtcattggcccagaatatgtggttttctctgagtatggatacttttagttttctcatttataaaaaaaattkttttttgagatggagtctcgttctgtcacccaggctggagtgcagtggtgtgatctcggctcactgcaacctccactcccaggttcaagtgattctcctgcctcaacctcctgagtagctgggactacaggcgggcatcatcatgtccagctaatttttgcatttttggtagagacggggttcactgtgttacccaggctggtctcaactcctgacctcaagtgatctacccgcctcggcctcccaaagtgttgggattacagacatgagccactgctcctggcctcatttataaaattaaaatgtttccgaagtattcatacagttagtattattttcatgtaaaaatgagagagctctctatcatacacatgtattctgttctagcactctttcagtaacgtaggtgtaattatttccattacaaaagaaacagaaaacaggctgggtgcagtggctcatgcctgtagtaatcccagcacttcaggagtctgagacgggcagatcacttgagatcaggagtttgagaccagcctagccaacatggtgaaacctgccgtctctactaaaaatacaaaaattatccagatgtggtgttgggcacctataatcccagctactcgggaggctgacgaaggagaattgcttgaacctgggaggcggaggttgcagtgagctgagatcacgccactgcactccagcctgggcaacagagcaagactccatctcaaaaaaagaaaaaaaaagaaacagaaagcaaaaatgtcgacgcctagagagtcttaagtagctgacatcctttagctaatatatggcagagaggtttggatttcatgtagccttgtttcctagtgtagtggcctttcttggactgcttgttttagtataattgtttttcacccatcttccaaatttttagggacccctcattcagagctcttggaagaagtcgaatgtactccgtcacctcgattagctctcactttgaaagtaacaggtcttggaacgactcgtgaagttgaattaccactcaccaatttcagatcaaccatcttttactatgtacaaaaattgcttcaattgtcctgtaatggcaatgtgaaatcagataaacttaggcgtatttgggagccmamatacacgtaagaaattttaacttaatgttttggtagataatgtcctagtgtagagccaagaagcattgcatttattttggattataggaacagaaaagattttgtttttattctgttggctwacaggaacagataatagtgtttgggactcttggtgtrgaatgattaagttttagaagtagaaggacatttacagtctatactagcttcttacgtaattgttgaaaagagcgtcatttgaattctttgtytaagatcgtgtatgagtactaactatcttctttctgttcttgattttgggggtgtgtgggttaacacctgcctttctttgtacaaataatcatcaatgacttagggtaaatttatttaacatttttgtgcctcacattcctaatctataaaatgagagtggttttaaggaattaatgaattaacatgtataaagtgttttctttacttttctttttttctgagacaaggtctctctctgttgcccaggatggagtgcagtggagtgcagtggtgcgatcatggctcactgcagcctcaaactccacaggctcaggtgattttcccacctcagtcccctgagtagctgggactacaggtgtgcaccacgaggcctagctaatttttgtattttttgtagggatggggtttttaccatgttgcccatgctggtgtcgaacttctgagctcaagtgatccgtccacctcagcctcccaaagtgctgggattacaggtgttgagcctctgtgcttggcctgcaaagtgttttcaataccccctaggatatattaagtgctcagtaaatgttatctataaagtaattgttatttaataataataaattatatcatcattcttactgtaacttcacttctattagtatgttttctgatgttctcttaacatcactgataatcttatgtaatggccaataaaagtaatgtaggtccttttgaaatagaacagaaaatcataacggtattctcccgcccttcagttttttttccccaagttcccaagagctaggaaaacctcccttcaatttttattacagtttaaaaattgatctcaactgccttatttgaacataagcactcctgatcattgttatttctatccttctttccatctagacacagagaacctgtttcttatcccattgtatttttacaacagttayagccatgtgctaygtaacaacttttcagtcagtgatggaccatgtatgacaggggtcccataagattataaaaccacatttttactgtaccttttttatgtttagatacacaaataccattgtgttacagttgcctattcagtacagtgatatgctgttaaggttcgtggcctaggaaaaataggctataacacatagcctacgtagatagtaggctataccattttgttttgtgtaatgtactcagtgatgtttcacaaccaccagatcacctaatgctgcataacacttgatacagtcatatctttaaaagttctagatttgatacatgctttctttgtaataatgataaatttataaatcataattcaggaatatggtttctgctactttgccttatgtttaacaaattaacattttttcttaaaaatactccttgaggctgggtgtcgtgacacaccttaatcccagcactttgggaggccaaggcaggagcatcgcttgaaaccaggagtttgaaactagcctggacaacatagcaaaaccttatctctacaaaaaatatagaaaaaaagaatcctccttgagttcagtgttcagtgcaggcatatgtctagtgaatgacattcacttttttttttaaagaattgaagccttattggaaataatcacaaattatatatgaattaacttgaatatcttcatgtttagaatcatgtacagagaaatgaaggattctgataaagaaaaggaaaatggaaaaatggtaagttattttagaacattggtttactcttggctatttagttaaaagaagaaagatagtaaaactaacacagtattgcagttgaacgttgaagggaataatgactaacatggaattctttagattagaccaagtgcatgatcttaaagctacctcatgtaatgcatgtgaaatatcatagactttataattgggaaaggccaacatttggtttttcctgttgtagggttgctggtctatagagcatgtggagcagtaccttggcactgatgaattaccaaagaatgacttgataacctacctgcagaagaatgcagacgctgctttcctgcgccactggaaattaactggcactaataaaagtattaggaaaaacagaaattgttctcagctcatagctgcatataaggtatatattggcatcaaaacactattttgattgcaaatggcttcgtgctttgttttgcagctttggaagcttcttaaggaacagcagttcattsagacataattttaaaaatgaggttgaattaacactgttaatgcacaaattctaaaatttcaaatatggctggtagcattggatctgaatgcagactttgaccatggcttagagtggttatattttatttgggaattttaatggtttagaatgccttgatttatgtcttgtgttatgtttttatttaaaaagaaggcactttaaaaaattccaaccctttcatagtggtattgatacaatgatacactgtttttcttgaaaatgtgattaatggccagtttttctaattgtttctataggatttttgtgagcatggaacaaagtctgggttaaaccagggggccatttctactcttcaaagtagtgatattcttaatttaacaaaagaacaacctcaggccaaagcaggcaatggacagaactcttgtggagtagaagatgtccttcagcttctgcgtattctrtatatagttgcaagtgacccttattcaagaatatcccaggaaggtctgtaagaagccttgtttcatttctatagcagttttaaagcaagtcagtttatatttttattaattttattaattaattttatagatggtgatgaacagcytcagtttacttttccaccagatgaattcactagcaaaaaaattacaacaaaaatattacagcagattgaggtaataaaatcagacagctgaactcttcattctattactgttggacttttcctaatattccctttactttcttttctacctctcaccatctttcccttccctctgattggtaatttgagctatatggtcctttgcatttatttcctaattacaggtttataattgacttggtaatttttaataattgccttatagggtcaggtgtggtggctcatgcctgtaattccagcattttgggggccaaggtgggtgtatcgttagaggctaggagttcgagaccagcctggccaatatggcgaaacccagtctctactaaaaatacaaaaattagctgggcayggtggcacatgcctataatcccagctacttgggtggctagggcaggagaatcgcttgaacccaggaggcagaggctgcagtgagccgagatcgtaccactgcacaccagcctgggcaacagagtgagactctgtctcaaaaaaaaaaatgaacgaatgaatgaatgcatgcatgcatgaatgccttatagcactaagacattattatttgttaattcgcaggaaccattggcactggcaagtggggctctgccagactggtgtgaacaattaaccagcaaatgtccttttctaataccatttgaaactagacagctttatttcacatgtacagcatttggcgcctcaaggtaagaagccttttttttatgtttttagaataagtatgcttttatgttatgtaagttgaaaatgtacaactatactgtcaagactgatagagggaatatattatcttgtattcttataaagaatagtcagcattgccttttggcctgaactaccaatcttctagtaattcgccaaaatgactaatccaaaggaaaggaggagagatacccgatagatgttttctaggtcttttagaaaacatggagttgttcctttggccacgtatatgcaaatctaaaagagaggtgatactgtagacattaagggaatgggtactgttcaaaaaggaatgccccacaagtgttaccgtggctaaactggaagagtctacagtgttacccagcaggctgttggcattgctgtttttttgtttttgtttttgtttttgtttttttgagacagagtctcgctctgtcgcccaggcaggagtgcagtggtgtgatctcggctcactgcaacctccgcctcccaggttcaagcgattctcctgcctcagccccactgagtggctgggattacaggtgcacgccaccacgcgtggctaatggcattgttgtaaacaaacaagggcaagattcttaccaagagaattaatgtgcatattgagcacattaagcactctaagagccgagatagcttcctgaaacacatgaaggaaaatgatcagaaaaagaaggaagccaaagagaaaggtacctgcatttagctgaagtgccagcctgttccacccagagaagcgcgctgtgtgaaaaccaagggaaagaagtctgagctgctggaacctcttctctgtgaattcatgcataatagtgtttaaaaaaaatagccaggcgcggtggctcacacctgtaatcccagcactttgggaggccgaggcgggcagatcatgaggttaggagatcgagaccatcctggctaacgtggtgaaaccccatctctactaaaaatacaaaaagttagctgtgtgtggtggtgggcacctgtagtctcagctacttgggaggctgaggcaggagaatggcgtgaacctgggaagtggagcttgcagtgagtagagattgtgccactgcactccagcctgggcgacagagcgagactccatctcaaaaaaataaaaaataaagataaaaataaaagacctctggactgtaaaaatgtttctcttccttgagtagaagtgtggtgtcctctcccccaaagaaatacttcaggcaaattttaattttgtcctaagcctaattgtgtaatgtctttactattcaaatttaatgtatttcttgctgaaagatgtgagatggcttattgtgcaacaaattactcaattggttagaaaatggtcagatattatttacgaaatatttgtactactttgaagatagtccctctaatcatggaagaagtaatttaccaaaaaaaaaaaagcatttaaaaagtttctgttttcaggctgggcacggtggcccatgcctataattccagcactttgggaggccaaggcagacacatcactcgaggccaggagttcgagaccagcctggccaatgtggcaaaaccccatctctacaaaaaaacacaaaaattagctgggcgtaattccagctttttaggaggctgaggcataagaatttgcttgaacccgggaggcagaggttgcagtgagctgagattgcaccactgcactccagcctgggcaacagagcaagactcattgtaggtgctcaataaatattttgttgaatgattgtttaccttaagtactcttccaaaatagttgtaaaaaaaaagttataattyaaactgtttgttttcttccctgatagttacatttttgtaccatttaatgccatttacaaagcatttatatacatagaactataggcatgttgtgataactggcattgattataatttgttttataaatgaggaaattgattctgcacgtacttagctgatttgcctaagatcatgagaaaatagtagcacacatgagagtagaaccttcagcttcttattcctaattgtcggttcttcctcccaccataaatggattgttattaaaaaaaagaaaatgtggccgggtgtggcggctcatgcctgtaatcatagcactttgggaggctgaggcgggtggatcagttaaggccagaaattcaagaccagcctgggcaacatggcagaacccccatctctactaaaaatacaaaaattagctgggcgtggtggcacacacctgtaatcccagctactggggaggctgaggcaggagaatcacttgaacccgggatagggaggttgcagtgggccgagataatgccactgtactccagcctgggtgacagaacaagactccatctcaaaaaaaaaaaagaaaaattgttttaaaattataattaccgttttgatggcggctttcagtttgaaagatagcttaatcatttctaaatttctctgataggaaacatttttcctttttttgaatgatgttggggcttggacaacagattattatttttattgaactgctaaaataaggaggcaaaatatagacccagtactttctcagtttgcttaaggcagattataataaaaggagtttcatatatttttacttgtgacaggaagcagtttatgtaacaaaaaaagattactgtgttttaaaaatcacctgataaaatactattttttaatttcttaaatctttgaattctgttgctggtttagtagtacattcagctgttaacgtatgctgcagctcatagatatttttctatttcagagcaatagtatggttacagaaccgacgtgaagccactgtggarcgaacgagaaccacaagcagtgttaggcgagatgaccctggagagtttcgagttggtcgtctcaagcatgaaagagtaaaagttccacgtggcgagtcactgatggaatgggctgagaatgtcatgcaaatacatgcagatcggaaatcagttcttgaggtaatctcatataaaattagatttagggaacaggaatgacacttagggaaccagcccaatgtgtatcttcactgcattaaaaactgtggtaggtaaacatgaagaggggttttcctgttctgtaggcagaagccttctcctctggcagagcatctttttcataagaggatgtcagtccacctccttaggggttaggtcttgtgccattaatgagcaacaaagaagatctccactcttgaggtggcaaagtgcttgttctgcttgagggcttctacccatttcataacaaagttggactaaaatagtagtactcacaagggattcttttttacttttacattaaactgtgctgtttgatattttgggagcacctggttttgtaatattgtttcacttgaattgtgcttggtattatatcactggtctgtgttgagacatgttatagcaaatggtagtatgacatttaatatatttagtttagaaatgttactgtggacattgttggttttatttcatatacacagtattccctatatgaggaagagtggaaatacgtctcctgtcacaggggtgaakccaactggtttgtttttaacttttggatcataaactaattgcaagaaatatgatacatctctagaagatgtccaaggctttacatctttcactttatatacagactttcattgtattcctcctacccttatgttcttcttcttctttttttttttttttaatagagacaagttctcactatgtttcccaggctggtctcaaactcctgggctcaagtgatccacccgtttcggcctcccaaagtgctgggattacaggcttgagccaccatgcccagttgtttacattcttctaatatagataatctttttttttaaccatatgctgtagtttttattatactttatgcaatcactttaagggtttttgtccatactcttcctgttgcaaaaatgatttaaagtgtctttaactcagaaataagcagaagaggcgaggcgcagtggctcatgcctgtaatcscagcactttgggaggctgaggtgggtggatcacctgaggtcaagagtttgagaccagccggaccaacatagtaaaaccctgtctctactgaaaatacagaattagccaggcatggtggtgcatgccgtaatcccacctacttgggaggccgaggcaggaaaatcgcctgaacccgggaggcagaggttgcagtgagctgagatcgtgccactgcactccatcctgggcgacaagagtgaaaytgtctcaaaaaataaaaattaaaaagtggaagagtctaggctttggtgtcacacagagacacacaaaagtctgttcaccatcatttcttcaagcaaatgatttaacctccttatctgagatttggtttcctttggtgtaaaaaggaaataattattttgcagggttgttgtgagaagtaaatgtatgaatgatgcttggcacagtgcttaagcatgtaatagtgtacaacaagtggactctttaggaaaattaaaataacacttctgtgctgtttattatatatatacactgctattttgaaaaaaggtacattactggatcagatatgataaattttgacaagaattagattatttttaaaaacaccccaaactttacgtttaacccacaatttatttgttcatattttaggttgaatttttaggagaagaaggaactggcttgggacccacattagagttttatgctctggtggcagcagaattccagagaactgacttgggagcttggctttgtgatgataattttccagatgatgaatctcgtcacgtaagaatatttctcmttttgtgacttgagttgtgactctgctttcaaaagtgttaaaaataggttatgtgttcagagcataagccaggtttctgactctacttttattattgaataatcttgatgcaattaaaatagttctaaagcgataaaatttagtcaccaaaagctatttaataaaattatatacttttagatagccaaattcatgaagatgtttaatgtttatggatttttttcttagatgatgataggcttagtttctattaacttttgtttaattttatttgcatttcaccctctaaaaaattaggttgatcttggaggtggattgaaacctcctggatattatgtgcagaggtcatgtggactgttcacagcaccatttccacaggatagtgatgagcttgaaaggatcacgaaactgtttcatttccttggaattttcttggccaaatgcattcaagacaatagacttgtggacttacctatttctaaacctttttttaaacttatgtgtatgggtgacattaaaagcaatatgagtaaactgatttatgagtcacgaggtgatagagacttacactgtactgaaagtcagtctgaagcttctacagaagaaggtcatgattcactctcggtaggaagctttgaagaggattcaaaatcagaatttattcttgatccccctaaaccaaaacccccagcttggtttaatggaattttgacttgggaagactttgaattagtaaacccacacagagccagatttttaaaagaaattaaagaccttgctatcaagaggcgccaaattttaagcaacaaaggtctttctgaagatgagaagaacacaaaattacaggaactagtgctgaagaatccatcaggttctgggcctccacttagcatagaggatttagggtaagcattatatgtacattcttcaatccaatgcatgaataagttttaaagcttttgtttctttgtcgtcactgatttgcaatatatgagtaaatagtctgtcaaaaacagtaatatgctgtaggaaatattgatgatcgacttgaacctttgatttaatattataaagacaacactcagaatactagaatattagtttattaatcatcaaacctttagaagattacctgacttagccaatgtgaatttatatgcctgtgtaaaatgtccagagccaacaatattttgacaaattcatctgctaatatatgattcactttgcaaagctcaaaaattggttggtatgtcagctttatcaccaaaggctgtagcagttgagatgctgcagaacttttgataaaactctgttactttatgtacaggtaattatcatatcttcagctgtgattttaggttaactgcaaggccttttttttttaatgtttgctgataatgttggtaaactgtgtttgataaatggttatatattcaaggttttttttaatatatatttttgtacacagcgtgattgacttcagtaaagcaacagtttcttcctaaaagtcttacaaacatgttgctgtcataattcattgcaaaatttttagttcattaattttgtgccataagttagaagtaaaatatagaaaggtggtttcatgcaatctttgcaaagccagacagatttgataacagttggcctagtagattttgtccatagaatattgcatttaaaaagtcctcaacttacttctaagctggtgtactgattttgttggaggaggagaggggtgggatttatggttttgatagccatgttattttatttaattttttctcttgtacccactgatggcagatgatagtaatgttataaaaattaaacaccattagtagtagctgcatgtcagttaatttaatcttttttgtcctcccagtttaaatttccagttttgcccttcctcaagaatatatggttttacagctgtggatctcaagccaagtggtgaagatgaggtaaaaagtttgcttttaatatagttgtaagttctgacatatcctcttagcaaggccagttgtactagacactcctgaaatattcctagatactgacaaattttcttttgcagatgataacaatggataatgcagaagaatatgtggatttgatgtttgacttttgtatgcatacgggtattcagaaacaaatggaagcctttagaggtaattttaaaggatttttagcataattgctctcctttcactttgagacagttgaaattatggtcaagaattgctggtggtcggctgggcacggtggctcacacctgtaatcccagcactttgggaggctgaggcgggaggatcacctgaggttgggagttcgagaccagcctgaccaacatagagaaaccctgtctctactaaaaatgcaaaattagctgggcatggtggcgcatacctgtaatcccagctactggggagactgaggcaggggaattgcttgaacccgggaggtgaggttgcggtgagccgagatcacaccattgcactccagcctgggcgatgagcaaaactccgctgcacaaaaaaaaaaaaaaaaaaaagaattgatggtggtcgggtgtgcgggtgtggtggtggctcacacttgtaatctcagcactttgggaggctgaagcaggaggatcgcttgagcccaggagttccaagaccagcctgggcaacatggcaagaccccatctctacaaaacattttttwaaaaattagctagatgtggtggcacgtgcctgtggtcccagctacctgcaaggctgaagtgggagaatagtttgagcctgggaggctgaggctgcagtgagccatgtttgtgccactgcactccagcctgggcaacagagggagaccttgcctcaacaaagaaagaaagaaagtggacataggttgcatacattctagattacttgatcaggatgaattaacatgaaagaatcatgatgggaacaaagtatattacaaggtaaattacttttgaaaatgagaacacagttttgcctgacttgtatgacagaaagagctggtgaactccagactgagtagtaataagaatttgcatactgaccatagcaactgaatgttctctctctgttcacgtttgtgatgttaagcagggatttctaatttaaaatacagttttaatttcaagctgtcttaatttatgcttgtttattcaaacatttatgaatgttgaatattcatcttctgtccatttcatcggtaatgggtatttttttattgttgcataatatatgtacatgtttatggggcattttgatacacagaatgtgtaatgataaaatcagtctttaggacatccatcatcttggacatttatcatttctatgtgttgggaacattcaaattattctcttctagcttctttgaaatatatattattgttaactatagtcaccctactatgctagaaaacattagaacttactccttttatttaattgtaagtttgtacccattaaactacctctcttcatccacccccacatgcaacattcccagcctctgataccattcttttctttacctttatgagatcaactttgttgtttttgtttttttgagacggagtttttgctcttgtttcccaggctggagtgtgatggcacgaactcggctcactgcaacctccacctcctgggttcaggcgattttcctgcttcagcctcccgagtagctgggattataggcatgcaccaccacacccggctaattttgtatttttaatggagatggggtttccccatgttggtcaggctggtctcgaactcccaccctcaggtgatctgcccacctcggcctcccaaagtgctgagattacaggtgtgagccaccttgtccggccaagatcaactttttaagttcccacatatgagtgggaacatgtgatacttgtctttctgtgcttggcttttttcacttaatataatgacctccagttccacccatgttcctacaaatgaaaagatttcattcttttttttttttgagacggagtctcaggctggagtcccaggctggagtgcagtggtgccatctcggctcactgcaagctccgcctcctggattcacgccattctcctgcctcagcctcccgagtagctgggactacaggcagccgccaccacgcccggctaattttttgtatatttagtagagacggggtttcactgtgttagccaggatggtctcaatctcctgacctcatgatctgcctgcctcggcctcccaaagtgctgggattacaggcgtgagccaccgtgcccagcccattcttttttatggttgcatagtattccattgtgtacatataccacattttctttacacattcatcccttgatagatacttagattgattctgataatgggtattttggtttgaaatttggtattttggaatcgtaacttggaaactgagttgtatgtttgttttttgtgtttccgttacatgtacgatgtagatgggtttaataaagtttttccaatggagaaattaagttccttcagccatgaagaagtccaaatgattctttgtggaaaccagtcaccatcctgggcagcagaggatattatcaattacactgaacctaagctgggttatacacgtgacaggtatgtgatactattttccaagatcaacaaaattatttatattccccaaatcaaatgacagattctctaaagaactttaattcagtgagtatcataaagtaagtgagaaagcagtggtgtctcacagttaccagaatgcatatccactgataaggctgggaggatacaaaaagacaactgacagcaggccgggcgcggtggctcacacctgtaatcccagcactttgggaggctaaggcrggcrgatcacttgaggtcaggagtttgagaccagcctggccaacacggtgaaacctcgtttctactaaaaatacaaaaattacctgggcgtggtggcagacgcctgtaatcccagctacttgggaggctgagacaggagaatcacttgaacccaagaggtggaggttgcagtgagccaagatcatgccattgcactccagcctgggcaacaagagtgaaactctgtctcaaaaaaaaaaaaaaaaaaaagacaactgacatcatggctgatgttgattcctttcctcattgtgttttaattgttcatttttaaaatttggtaaattgtaagctgttgggctatatactacgtttatattaaactttttattgaatataacagataagtacacacatcatatatacagtttagaggattttgtcaaaatgaacacacctgtataattggtatccagaatatgaaacaacttcaaaaatcccccttcccaccatattcttttctattaatctaatcaccatatgttgatcagttttgcttgcttttgaacttttaatatatgaaatcatgtagtctgttttctttgtggtctggtttgagtaatattatgattatgaaatttatccatgttgtggcatgtcgttcatttactatttcattacataaatttatcacaagataattattttgctggaataaaaattatttcagatcccctttggtatatttatccatatttgaaatgattttgcaagtgcatcctgtgtttttatgatttgctgactttgttgcagaatagatggaccccatacactgtcagtattttttagttcttasaatttgtaagttcaagacagtctttgagggatttttatttttatttttgagatggagtttcgctcttattgtccaggctggaatgcaatggcacaatctcagctcactgaaacctctatctcccaggttcaagcgattctcctgccttagcctcccaagtagctgggattacaggcgtgcgccaccacgcccagctaattttgtatttttagtagagatggggtttcaccatgtttgtcaggctgctgttgaactcttgacctcagatgatccacccgcctcagcctcccaaggtgctgggattacaggtatgagccaccacacctggcccgggatatttttaaagtagcttatattagcccatttcatacttaaccaagagtctctagatgtgttgttgttctggtgtgaggatattgttttttagggggcttgttgctgccttagaaaatagtggtagtgattttcatttaaatctgcagtcaactcaatataactatatttttgttcttttagccctggtttcctgaggtttgtgagggttttatgtggcatgtcttctgatgaaaggaaagcattcttgcagtttaccactggttgttcaactctacccccaggtggactggctaacctgcatcccaggctyacggttgtacgcaaggtacaagctctctggctaatggggaatccaaatgaaatttagttactttacttttgaaagaaagaagtatttaaactcatggtcttctgttgtgtttgctttcttgttgtaggttgatgctactgatgcaagctatccatcagtcaatacatgtgtgcattaccttaagttgcctgaatattcttccgaggagatcatgagagagcgcctgctagctgctacaatggagaaaggctttcatctcaattgagctttgaagtgcaatgggagacatcagagactttaaaaatactagtgaagcctcttgtgtttgtgtgcagagaagtatatgatccaccatgctaatgacacttgcctttttttccaccattaaggctttaagaacatgtggaataagttttttagctgctaatgacaaaacaaatcctgtaactacccagccagcaagtatatagcacagaacactgtgttactttacaagggcttatgtgactggaataaggtggtcccacttgactgttccaaagagcagcttctcagatcttcagtgttcactggtaaatttctaacagtgtatttgtgtaaagtttgtcatttcatactccatacactacagttgctgtcactgatccctgttttgctggcttttaagctacttggtcaaaaatcctgcttccttaaaacatagagaattaatgagcatctcaagctttttcttttcctttttaatgatgcctgcactatcaagagtattctagtgttctctctttgtttggcatataatcatgcaccaaactttttatttctttaaggtgggagtatatttttatttcctaaatgccatactatgaagatcaaagtcttaagtgtgtttgcagctcaaaaataaagatgtattaaggggggaaaacctggtytaagtgcaaggcacacttacagcgagttttactttcggttgtattttctttktatattataaacatttatttaacttgttgccrtttgaagtaaaaaatttccaaaatgtatgctcaacaataatcattaaaatgtttgcagcgtacagaactgtgtcatgtgactatttcaatgcagtcatcagacttaagagctttagcaggtacttgtcattttgaatcatccaaagttttctgaaattactacataaagaaatgtgtttttctatagtaaatacgggtattaaaattgaaaggctagaagaaatatatattcacacacttgtgatccaatggttgggttcagttttaaagtatgcctcagctagaactgaccagttacttgtgttatttttttaaaaaaacaccagatccacaacttaactattgtatctataaggatatataagtaaggatgtaagtgagatccaagaatgatttttaaatgttgtgtgtcaaaacacggggataccgctgttttctggttttgaagaagggactgtatttccaaattccaaagtagattttccaaattccagttattaccatatctgtgcttataggtgaaaggaaagacactaggcctgatttagccaaatagcttttttttttttttttttttctcttaaagacaggctcttgctgtgttacccaggctggtctcaaactcctaggttcaagcagtcctgccaccacagcttctggagtagctgggattacagatgtgtatcaccacacctggctcaaatggttttttaaggaaccaaaagcatgtttgaaattgcccagtatcgacctgtttaaaaggcaaattctctgcctatgagagatatcttctgctataattacaagtctctaagatgtctatcagtagtcagcttttaccaagactagcctggcaccagggttagcgaactatggcctgctgcctgtttttgaatggctcatggctaagcatggctttaaaattttttaattgttggggaaaaaaaatcaaaagaataatattttatgtgaaaattatgaaatttaaatttcagtgtccacaaataaacacagccacgtacattcatttacatggttgcttttgcacttcaatggcagaattgagtagttagcagagaccatatggtccacaaagcctaaaatatttactatttggccttttacagaaaaagcttgctgaaccctggtctggcaggtagctacagcagataaattgataactttacataaaatagggcagggcacggtggctcacatctgtaatcgcagcactctgggaggccgagcagggtggatcacctgagatcaggggtttgagaccagcctgaccaacatggtgaaaccctgtctcaactaaaaatataaaaattagccgggcatggtggcacatgcctgtaatcccagctactctggaggctgaagcaggagaattgcttgaacccaggaggcagtggttgcagtgagccgagattgtgccattgcactccagcctgggcaacaagagcgaaactctgtctccgaaaaaataaaaacaaaaagtttatataaaatcatagctgtttttgaaatattaggagtcttcctcagaaaaagtccaagaacaaggtaaggctggccaaatataagtatgaaaagtcacttaaagcatcttagtgaagttatatggcgacacagcctgtaagaacacatatgcatgagtcaagtgttctgagacatctaccggggtctccacctcaactgtaagttcttaaatattgtttcctatgatacctaccaactattttttttaactgttattctctcaaggttctaaaatctgtgccgagatgtaattcaactactattttggtgtgacccaaaaattaattttgttcactccctagctactctggtgtaccagtttcagcagttacctgaatgtgcaactgatgaagtacctaccaactaggacagtgtttcccagctaatgtgtctgagaaagaccctccatagcacttcggtctacgctgggctttccccagaccttggctacttgatacaaaggtgtatctgtacacacagaccactcactgttcccacaggtcagaagccttccttttgccttcctgaacgagtccaaaaacaactcaggtttggagtccactattgactgactgcatttttatagacataaaccttgatattgcaagtggattttgagaacaggataaaaaaaagctccactgcctaccccccacaatacacagacaaaccaaacggaacagtgctgaatgataactctgaaacgtgcatttggccaggcgtggtggctcacgcctgtaatcccagcagtttgggaagccaaggcgggcgaatcacttgaggtcagggttttgagaccagcctggccaacatgatgaaaccccatctctactaaaaatacaaaaattagtccagtgtggtggcacacgcctataatcccagctgctcgggaagctgaggcaggagaattgcttaaacctgggaggcagaggttgcagtgagctgagatcatgccactgtattccagcctggacaaccgagcgagactgtctcaagaaaaaaaatgcatttatgtcctattttagaggctggagtgtcacagaagaatgaactattggatcattccataggctgggacagtatcttaatataccaaaaatagactttggccgggcagggtagctcatgcctgtaattcttgcactttgggaggctgaggtgagaggattgcttgagcccaggagtttgagaccagcctggggaacatagtgagaccccgtctctatatttaaaggaaaaagatttctactttcttcattgcacctgacctcccacccctacatgcatatatatagtagacctccctattcttgggggataagttctaagacccccagtggatatctgaaactggggatatctgaaactgaggatagtaccaaatcctatatatagagagagaaagagaatgttttttcctatacatacatacctatgataaagtttataaattaggcacagtaagattaacaacaataatagaacaattattacaatataagaaagttatgtgaaagctgggcatggtggtgtgcacctatagctccagctacttggaaggctgagcaggaggatggcttgagcccaggagttcaaatccagcctgggtaacagagaccccatctcttacaaaacaaaagatggccaggtgtgttagctcatacctgtaatcccagcactcagaggctgaggtaaggaggatcgcttgagcccaggaattcaagactagcctgggcaacatatggagaccttgtctctacaaaaaataaaaaaaattagctgagtggggtggcacacacctgtggtcccggctacctgggaagctgagatgggaggattgcttgagcccaaggggttgaggctgcagtgagccgtaatcatgccactgcactgcagcctgggcaacagagcaagaccctgtctttaaaaaaaaacgaaaaataattttatatatatatatgtatatgcatgtagtctctctcaagaccttattgcactgtactcactcttctcatgatctgtccatctggtaaccaagacagttaccaaatgactgtcaagtggggagtgtatacagcatgcatatgctggacaaagggacgattcacctcccaggcaagacggagcgggacagagcaggacaaagtgggatggtgcaagatttcatcacactactcagaatggcatgcagtttaaaacttatacattgtttatttctggaattttctgtttaatattttgggacctcagttgaccatgagtaacacaaaccacagaatgcgaaacagtggataagagagggactactgtacatactttcgcctaagacagttctgtatattcttctgttaacggggtagcaaaagcatatagaaaggttttggggggatgcagtgcattgctcttctgtaatgacagtaatttacttcaagacattgcaggagaaggggttaaaggagtaaargggaggaagagaaggattcatttcatgcctacctgtacagagacactttcttgctttctacttttttttttttttttttttttgagacggaatctcactctgtgcccaggctggagtgcagtggcacaatctcgatctcaactcactgcaacctctgtctcctgggttcaagtgatcctcctaccacagcctcccaagtagttgggattataggcgcgtgccaccatgcccggctaatttttcgtagttttagtagagacagggtctcaccatgttggccaagctggtcttgaactcctgacctcaaatgatctacccaccttggcgtcccaaagtgctgggattataggcgtaagccaccatgcctggctgcattctacttttaaactttgaactaaatttcattaacagtaagcttattaataagcaaaccttttaaaatgtggcataaaaagactgggcacagtggctcaggcctgtaatcccaacactttggaaggcgaaggcagatggatcatgtgactgcaggaattcgagaccagtctgggcaacatagtgaaaccctatctctacaacaaaatacaaaaattagctgggtggagggggtgcgcacctgtggtcccagttactcaggaggctgaggtgggaggagcacctgagcccaggaggtacaggctgtagtgaggcatgatcacaccactgcactccagcctaggagacggagatgctgtctccaaaaaacaaacaaaaaacgggataaaggatagctgtaggggctctctggggctgtcttaatgtctgaccatccattatttgaaagtaatgttctctatagagttaattacataatggcattgtaattactaagtgcccttaaaatgagtatcaaaggcttttacaaactggcaaataaaatttaactctgcatctttgttaggtacatgttataaaagtttttttgttttgtttttgtgtttttgaggcagggcctcactccattacccaggttggagtacagtgttgtgatcatagttcactgcagcctcaaactcctaggcttgatcaattctcccatctcagcctcttgagtagttaggagtacaggtgctcaccaccacagctggctaactttttaattagttatttacttatttttagagacagggtctcactctgtcgcccaggctggagtgcagtggcatgatctcggctcactgcaacctctgcctcccgggttcaagcaattctactgcctcagcctcctgagtagctgagattagaggtgcttgccaccatgcctggctaactttttgtatttttagtagagacaaggttttgccatgttggccaggctggtttcaaactcctgacctcaagtgatctgcctgcctcggcctcccaaagtactaggattacaggcatgagccatcacacctatttattttttgtagagatatggtcttgctgtgttgcccaggctggtcttgaactaatgggctcaaccaatcctcctggcttggccccccaaaatgttgggattacaggcctgagccaccgcactcggacttttttatttttgagacagggtttcactctgtcacccaggctggagtgcagtgacacgatcatagctcactgcagactcgaactcctgggctcaagaaatcttctgcctcagactcccgagtagttgagactacaggtatgtgccaccacacccggctgatttttgcattttttgtagagatgaggtctatgttgcccaggctggtcttgaatttctggcctcaagcgatcctccttcctcagcctcccaaagtgcaggggttacaggtgtgaggcactgcaccagccccacattacaaagcttttagagccaggccaggaaggttcaaggttgtagtacaacatgatcatgcttgtgaaaagccactgcagtccagcctggacaacacagcaagacctgcttctcttaaaaacaaacaaacaaaaaacacctcttggctgggcatggtggctcatgcttgtaatcccagcactttgggaggctgaagcaggtg

SEQ ID NO: 94134 - DNA, 59866 bp, Homo sapiens
  misc_feature (1)...(59866): n = A,T,C or G
tatagggaaaatgtggagatgtcggtcaaagggtacgaactttcagaagatgaaccagttgtgggaatctaatgcacagcatgggtggtgcatttgattgtgtcaattatttcacaatgtatatgtatattgaatcatcacattgtataacttaaatatgtacaatttttatttgacaattaagctatttttcttaaaatgacttctattgattggatttgccaaagtcttaccctgaatggtagataccaattatagacataattaactcatgttgggatatatgcctacatgcctataacacaaaagtcacctaacttttgatactctatttcctcagaccagttgaggatttggagaatttcatcctttacatcccttaacaatggaaaatgctatgacgagtttcttcttgtgttctctaaaacctaagattcatacagaaattcaagttcaagtgtggtgtgggaactaacatgatgcagttagaatgtaggctcaggaaccagatttaagatttggtctttactcagtcacttactagctgcaggctttgggtgagttacttatcctctcaactttagttttgtcatttataaaatgagttattcatagtatgtatttttgaagatgatagtaagttttaaataagctaatgcatcacaaaatctggctttttgtaagtgatcaataaatgtttattattattttcataattttactcatttcattgatcttttggctgggctgttgtaatcattttcatattgcttaaagtatgatgcttatggggtcaccagtataagctttccatcaatggtataagtttcactctgtatgatttgtaatttatgtcacacatagatctatttacatggacaataaattgggggaatatgaaggttctgtatcaaaggaataattggaaaacaacttgagcagcatgatttcatgagagaaactagaaacatcatttttatgaatggataaaataattgactacttattagcattactagttgaatatgggagtttcaatttgtataatgagcaaatagaaaataataccctatttatttatagataattaattcttaacttttttggtattatgctataatagttttgtggctactaatgaatttaatttacattctttttaaaagaaaataactacccagattttcttttccaaacaagttacattcctaaggaattccctgacatatctaattattctgaatttgaattgtcagctttttgggaaatgaatgtccaactttaggaaaattcaaacttaccttgtttggggatgaataaaacattttcaggaaaatttttcttaaaacaatatatagaacattatgttctaataaggcagaaattatactgtggtgttgatcttatagcatgaaaccacaaaagcaaaactggctgtggtggataaaaggcccttgggctccacgggcttacggaaatggcatttgtgaattgagacactggcttaggtaacttttaggattaaataagtgcaccatagttaatcactatttcccagcattccaactgcaaccagtaaatagcagcaataaggaccacatgaagtataaggtaatgaagagaaaaacagaatgtggttactgaaatactataattttctgttgattgctattcccctcccttttcttttctccccaatccccaatcatccgtctatctctcaaacatstgtatctattcaactatttattctgacagtacataatgggacagactcaaggcaaagatttccttttaagtatgactcttttttttcttccttttcacagtgttagtcagatatagtcattctttgtggacactaaaattctgaagatgtgttatccttccaggaaaatgtgggaagcaacattgaaatcatagccaaatttttactttataaaaaatgctctaccaatactgcatttccaggacttggactaatcagtgatactttgcagtaacacaaaattgatcctttactcaaagagaagttgtacatttattatgagacaccacatacttattctcagatagctttggccactcttatcatttctcatattttgtggctaatggaaacattgtttacttactggatggaactttcaatgcgtgtaatagtgaggaaagcagcgaggtttgccgtgtaagatgagataacaatcaaagcaaatagccaccaagcccccatcatcattcgggtagccagagtcgtgtacgggacttccccgcctgtagaaagaagcaaagagataaaaagaacatcaactagtatttattgaggatctgaagtcatctatattcaacaccaaattaacttgcaagtagtgagaattttttctgcttaacatcaacatagatctctatattttcatcactccatatttaattctcttttatgagattatgaaagacgcagccaaaagaagcatgataaatatttagtataacatgtttaaatgatagttcttcccccttcctgttcaaccctataattaattaccttttattataatcacaggtatatgctttctttccaagggcttgattattcattagttaggtgacattaatattgctatgcctatatttaatacaaattttcagatttccagttaaataaataatattgaaaggattattttttgttatattctctagaaacatagcttgttaatgatcatgggatcacacatattagtgttggcttcagcatcacatacttgctttgttctacttttaattgacttcctactcttacaatcttgttgcagaatcctcttctccatcttttaaatgttggagtgttcttgggctcagtccttagactgcttctgttctctgtccatagtctcaccatggacaatatcaacgagtcccctgactttgactatgatctacagtatactttgataacactagaatttacatttctagccccctaccttgactctttctagagagctatagataaaagcctacatgattctcacttgcaattcaatatgcatctctaacttatgacatctaaaacagaactcattttattttactcccaaattaactctccttcaagccagtccacaccatgtcagggaatagcaccactatttactttatttcttagaccaaaaataggaattttcaaacatcttcttcaatagcaagtcctgtcaccattacattcaaattacatcccaaatcctacctcatctcatcctgtctactgctgacacccaattcaaagatgacatctttgactctactactgaactacttatgtggtttccccatttacttacattctagagagtacctctcctaagtctattaccatggtgcctttataaacgaaaatcagatcaatgggattcccctatcaaagcttccagtggcttcccaggactctttaaaaaataaaataaaaatctctaccaaggtttacaaggctctatgtatactgatcttaggtcaattgtctgactttatttcttaccattctctcaatggctttcttgaaatttcctctatagagccatgccgatatatgtcccagggcccttgcatttgcaaatggttatgcctaaaattttctcctctataattcataaattccgtcttccttcaattttttcaggtttctgctcagaggatatctttttataacaatcttttatcaccactctatctaaaataactccccacaaccctatactgccaattcctttatctttttaaaaataacaatgtattaggctttaaacatttttgtttatttccgtcctttataatttttgatataggaacagtccttgtcccatattaagtgggtaatgtttttttgaatgaatatgtgctgtgttatggactaaattatttctctctcaaattcatgtcctgaaattctaacccacaatgtgattgttatttggagataggacctttaactaagtaatcaaggtaaagtgagattgtaagcatggattctaatccgatatgactggtgtccttatcagaaaaggaagagacaccagggatgcacatgcatggaagaaaggccatgtgaggacacagcaagaaggtgaccatctgcaagccaaggggagaggcctcaggaggcaccaaactggctgacaccttgatcttggacttccagcctctagacctttgaggaaataaatttccattgttaagccaccgagtctgtgttattttttatggcaatattattagactaatacatgctatatgtgaactattaataggccttctaaaagaagttagttttatactcacggtggaaataaagagatacaatactacattcatgtagttctatcaatacgtgaatgacttaacaggattcgatttactataatatcaggcatattttaattacaaccacgagttcccactacgtaatatgtctaaattttatacgtggggtaagtacaccctttggttatattctaagctattcccctgatgtattatattcagaacaggctaacctctgatatctggaacccatttttcaaaataagttacaatgcattttagataccttcttcttaaaagcaaaataattatttacccagcttttgaaaggtaaaagcaaaataaaatatttatttttacatccatatgaggattttctggtcaaaatagctaattgaaaaaataataataaaatgtgaacaagatgatagccaaagactaaaagatgttaatatgtataacaaaattagaacaataaatttatgaatgaaaatgctaattgggcattcatttctattaaagttttagccttgattagagttgttatcacccacataaaagcatacttgagttttttaatctttgttataaaaattgcaactcaaggaactcaaatattcttgtagaatgcaaataaaatgttatttgataattacatttaggaatcaaatattaaaagtaatgggaatcttgacttccaattttggtaatggttggtaatggttggtggatgaagccattcagaacaatcctcccactgacaacaactagaaaaattgaatacataatgtgttttcagagctaaagaggcagtaaaaatttataggcccagagtcctggagaagaaaataacccagaaagatagcttcatatttggaaatggttttccctgaggggcatataccaatttaaaaaaagaaagctaagaaactaacaaactgaggaacactttaaaagtattcaatggttaggtggtaataaaactggggtccagggcttgccaaatgagggtgggactgagacaacaagaaaatccccaaatgagcataaatgaagtcatgggtcaaagaaaatcaccagagaaatgaaaagtactttgaataggatgataataaaaatactccatatcaaaatttcacaagttttgaaagtagatgggatgcagctaaattgtattgaaggaaactgatagcctgcaatgtataagaaaagtagtctgagttactcatcaatttaaagaagttgaaaaaaatcagcaagttaaatgtgaacaagtacaaggaagaaaataattaagagcaaaaattaacaaaatagataagaaatgcaattaaaaggttgatctgacagaagtttggttctttaaaaagaccaaaataagctgttgaaacttacaaggaaaataagtgaagacacaaaaatgtaacaggaattttaaaagtacattgttacagatgttacagataatagaaggataacttatgtacaaatttatgccaataaatttgaaaattaagatgatatggacaagttcctaaaaaagttcctccccaaagaaatagaaaatttgaatggttttgtaactatcaaagatttcaaatccggaattaaaacctacgcaccacaaaatgtaaggccagtggtcttactaacaaaatctaccaaatatatgagggagtaattaattttaattgtacacaaattcttcatgaagttagaaaaaagcaagacactattcaatccattttataaagaaagcacaactttgataacaamacctgacaaagttattccaataaaaggcaattataggccaatctttcacatgattgtagattcaaaaggtaaataaattagcaaacggagaactgcataaataaacagatagggtttattataggamagcaagattggtttggcattcaaaaatcaatcattgtaattcgctactttaggaccaaaagagaaaaattatatgatcttggcagatgaagaaaaggtacagataaagttcaacatccagtcttagaaaaacaaaaccaaaacaaacctagaaataaccagcaaattggaaactttaaaaagtgttcattatttttataaagagtactttaagaaaatctatatcaagtatcatacatactaataaaataaaaatttttgactgtcttaaaggacacaaattgctaacatttctattcagcattgaattggagttgtgctagactctgtagtccaagaaaaaaaatcagaaaaaagtatttaggaattggaaagaatgaaacaaaagttacggattagtgatgatatgaatatgtatgtagaaaatctaagagaacaaaggataaattactaaaattaataaattagttatcagcttgctatgttacagaatcagtgttcaaaaaaagattttatttatatataacagcaacactgacaacatagaattaaaaaacatatcatttgcaatagcattaaatgatcaaataactaggaacaaactcatttaaagatatgagagacctctacatgaaaaactataaaactatttttgagtaaaataaaggaagattcaataaatgaagatatagcatgttcattgattgagagacttaatastgtaaagatataagttctcctcaaattgatctatagattcagtcagtgaattcccaattaaaaatcccaggttgtgtgtatgtgtgtgtgcacaagtaaatgtgcttgaagctgaatgtaaagtttatatgaagttgcaaaagtacaaaaattgccaagatactcttcaggaagaagaaaaaaactggctcttgatgactatagattaatatagtaattaagacagttggttagttgtacaaggataaaccaaataaataaatgaaagttgtccatgcatacataggcacttgatttatacccagctggcactaaagtatgtactatagagaaagggaggtcttttcattaagtagttctaggttaattagatatatgtatgaaaaataatgaaacttgtctcttaactcatactatacacagaaattaataccatgcagcctatagatataaatataaaaggtaaacaataaagcttctagaaaactatataggagaatatatccacaagtttgggtagaaaaggatttattaaacacagcataaaatgcattaacacaaaagaaaagattgataatttgactgcartaatacttcatagttaaaaagataccataaagagagtgaaaagacaagccacagtagaagatatttataatacatatacctaacaaaaaatcatcaataaatattaactcctataaatctataagaataaatgagacaacaatcagaaaaatggataggtggtttcataaaagaagataaccaatggccaataaatatatgaaaaggtagcaatcttattaactactggggaaatacaaaataaaaaaataccactccacagccaccagaatgattaaaataaaaagatttacaatagcaagtgttggcaaggacatgggactatcagaatgcttgtaccctgttgttgggattgcaaattggttcagtcaatcattctgataaaygatctctgaaaactaacgtatgcatatcttaraatacagaaatttcccccattaggtacatacccactagatgaatgtacataccaagagacagaaatgtttgtagaagcattgtcataatagtctaaactggaaacagcccaaacatactttgagagtagactggatacctccttacatattttaagtttggcctcaaggtttcttcatgcgtagtgaactgtgacctaactggatgtacaaacagactgtaacctactcttgtaccaatcacagagtttcagccaactataggtgaccaactgttcaaactgtgttcaaataaggcaaatgtggagctgtaatcaatccagctgtttctgtacttcacttccattttctgtatgtcactttcttctttctgtccataaatattatctaatcttgtggcagccccccagttgctctgaacctatctggtttgaggggctcctcaattcctgaatggctctttgctcaattcaactctgttaaatttcattcatctaaagtttttttttgaacacaaacaataaaatattgcacaacaatgaaaacaagcaaatctcacttataaacaacaccattaatgggttttatgaacctaatgttgggtaaaataattcacactgtataataattgttcacaagcaagcaacatgaatggcagtgttgatgatcccatggatggttacctttgggaagagtgaaaaatgattgaggaaaaggaaatgggggctgggtcactggtaatgttctatcttttcctaggtggcaattatacaggtggaccattgctggtaattcattgagctgcacaatatgttacgtacttttctgtaggcaaataatacttcacaattaaaaactaaataaaagaagaaaataaggagagagaatagtgaatttaataatgatatttgttttctttctcctttttttatccacaattagaaaaaaaatatgcattttcatagagtcaggatgccagaagagagaattaggtaaaggacaaaataattatgtgccaaattaaaaaaaaaacataatctcaccttgctaaaaaagtattgcaaaaattaggctgatacttcatgacacttcagagtgtgcaaaggtctgactctgaagttgggtatttggattcctatagcccytgataagtttaaagtgctctgctaaagcatgaaaaatttttattttccaaaggacccctctgttttaaggaaaatcctcttgaccagattttcattttgatgtgattgttttaccacatgaaaaactacattaaccttgctactgtatacattagcttacttaaaaaagttgttaaaaataagcaatttcttcaggcaagtttgggaaatttgataaatccatctgagtcaggcaaaaatttgttattctaagtcttattctgtgtgagtatatatgcatctttgtgtttccatgaaatatgaaaaagcaattaattgttgaagagtctccaatttggttgtttggtaaatccacttcttataggtttaaacactcacaacatttttaatttgtaatctggaatggtgggattattttataaattataattagaaaaaaatgggagaaaactaataccttttttwaaaaaataaacattcctttttcaagagttggatctttattggaaacaggttactaacaaaatggctaaaaactcatagtaaatagaaaattttcattattcaagctgactgaatagttcatgtaagctgatcaattaaaatgtaaataaatattagcgtgttttacacttacagaatcacaatgtagaaaaacaaagaaagatgatattgttggaatttgtgtggaagtcattgccagcataagcatattctacatttaaagataggaggagataatgtatatatcatctctgaaatgcttcatttatgccagtcacctttatataagtattgcttaaagtttattgatagtcaaattgagagatactgtgaccagatctgtaagtgttttatttttttgacagaagatgtgggggtaataaggaagtgaacaagagatacaagtgcggtttcctgttgtccacaggataatgggttcactatattgaacccatttgcaagctagggtagattttctacaacatgacatgtctatcatgggtataagagatggctttttgtggtagggagagagagcacaaaaatcacatcatgttacagtgagtaagttgttccatttacaattaccttttagaatttatttatttatttatttattatactttaagttctgggatacacgtgcagaatgtgcaggtttgttacataggtatacatgtgctatggtggtttgctgtaaacatcaacccgtcatttaggttttaagcccctcatccattaggtatatgtcctaatgctctcccttcccttgccccacaaccctcgacacgccccgctgtgtgatgtttccctccgtgtccatgtgttctcattcttcaactcccacttatgagtgagaacatgtggtgtttggttttctgttcctgtgttagttttctgagaatgatgttttccagtttcatccatgtccttgcaaaggacatgaactcattcttttctaaggctgcatagtatttcatggtataaatgtgccacattttctttatccagtctatcattgatgggcatttgggttggtttcaagtctttgctattgtgaatagtgctgcgataaccatatgtgtatgtgtctttatagtaaaatgatttataatcctttgggtatatacccagtaatatcatggtaagaacaaagcctcagataataaggttctgaaattttgattttacttttacaaagaaaattcaaatctcaaactccttttggcattcaatggaactaatttgtattcaatgtttcatttacattaaatgtattttatagttattttctattgaatgcaatgacattccttttaagttgcattagtgaatattaccattattaagaataatataaacccttctgtaatctgaatttcaagcattccaatctcctatgccatcttcaatcttttgaccttcctccctccatcaagcctgcaatccctctgggatctaagatgcactgaccctgctcatttttgctgtccctctccaccctcctagaaacacttccttcttaaatttagtaattgaaacagaaccataaaaatgagattctgagattggattgctcccatatctctgtagcacatattgatgggaaatggaactgtgacaatttacagcctgtggttacattayaattgtttaaataaccaccagagttggcatggaatgaagtgcaggtggaatgcaaggccatggcaataatagtgattttgaagattatggttccagctaactgctctgaagtctccgaatgaatacagagtgcaaatgagaaacttaaggccatgaatgcctagctcagaaataaggtaaaattttaatatcttgatggcagttttgaagaactctctttatcctgtagttttagggtagatactgctgaggacaagattaaggcttgactgtagcacagcttaattgctgattaaatcttctgccatataagatatctcatgcattgataagaaatttgaactttcaaattcttctgaaccttcttgttattggaagcaacctctcaccacttctgagggaatcagccttcttctgcacaaatgcttttcaataacttgacataggaaatttcacrgatctcttctggactcaccacgttactccttattgactccatgctacaaattaggtcccaaaataattgagtcaaagaagtataaagcccacttataaaagtttacaccaaatagtatgacattaagtatctattagggcaaatatattgtcatgggtggtaagatttcagatttgggrtttaatgtgctgacttgatacttgggcagggggtggtagtaattcattagattggctaattaaagaatgaaccaaaaatgcatgaaatttgaaaataacctatatacaacctccctggcctactgtagagattcagggaggtgggaatgttggaatgaatctgttccaagaaacttggtcacctctcttacatgagaaggccaatccctacacaaagacattaaaaaatgcatggaagggggcagaacacaagtatctctgaagagttctgtgtgcttctcctctgaagtctcagataacactggggaatcctgcaataaattgcatttcttgatccaaaatgaaagcagtatcccaggtaaaggcgtggtgtggatgactaactataagagatgaggtaaaattaccacagtgagtcatggctgtttctcagtgataattgaagtgtattatcttcagagaactatagtaatagcttattgatcacagtgaccctaaaaataaaataggtgcctctatttacataatttacataatatacaatctattaattacaggttatactttataaaccattaaggtgcttcttgatatgtatggatagaaaaattccacatctgaaggcagaaatctagcctcaattgctgagtgggaatttggaacctcttatctagttcccagaactaacccagtgtatatattcagaagcccaatactgaagaaggggtcaaggtagcattttttgatatgtccttttttggcatttttaatgtgatttttcagtagtaatggtcaggtcaaacatacaattttgtatcctatttactacatcttcaatggctgaatgatattgctcagtcagttctactatagcttatttaagtattctcctagtttagaaaagttggagatttttattctatcacatattacattgctataaacatcttcaaacatgtaatgttttaaatattttgacttattttcttttgacagaatccatgaagaaaagctattttgtgaatgaagttagttttttatatcttatacaagtaaagagaattttcaagcacattttataacatgatttattgaaaaaatagtgataggtaatgtcatttctctatttttgctatggctcattttaggtgtcaactggattcaggaacagacaactggtaaaacgttacttctggctgtatcagtgggggcttccagagaagactggtgtgtgactcagtggactgagtgaggaagattcaccttcaatgtaggtgggtaccatccagttagctggcggcccagatagaacaaaaaaggagagaaaaggatttcttctctctatgtctcctggagctaaaacacagtttttcccctgcccctggacatcaggatccctggttttctggcctagggactccaggacttatgctagttccccgccccatccccactcccaggttctcaggcctttggcctgggactgagaattacatcatcagcttccctggttttgaggcttttcttagtgtttcagaatctctaggttgcagacagcctgtcatgagaattctcagcctccataatcatgtgagccaatttctctaataaatccccactcaaatatctatatctacatctctatctatctatatataggcatacctcattttattgaatttcactttattgcacttcacacatttttttacaaacttatttttacaaattgaggctttgtggtaaccccgtgttgcaaagcaccatttttccagcagtacatgcttacttcatgtctctccatcagcattttttagcaataaagtatttttaaaatgaaggtatgtatattgctttttaggtataatgctattggacacttaaaagaatacagtatagtgtaaacctaacttttatatgcactggaaaattaaaaaaaattgtgtgactcactttcttgggatatttgctttactgtggtggcaaaaactgaacctgcaatatcctcaatgcacgcctctatgtatcctattgggtctgtctctcttgataatctgactaatataattgttatttcagttggttttaaatgactaaatattgttatggactggctataggtctatttgcaaataagcaaaagaaggctacaagacattagatcatgtaattgaaatgaaaatttcctgtagacttctctgacttaatatttacatgtcataggcattatgatacttgtaaagcttataaatagcagttccttctttccaccacttttatattatttgtgcttttctagtttgaagagttccatgttggttgaataatgcgtttcagtttttaatatattttaatgttaacagttaaaatataaaatgtttatacttaacattaacataatgttaatttaatatgtagttagttaattttatgttatgtagttaattatataatttaatattttatcatatttaatctattaaaattaatagaattcttttatacatacaaatgccatctatacatatttacttaaaataagaatgttctgagcaaataaaaatatgttatttcaaattagaacttcctacagaaggagacgatctttataatttttgaaacttcagacttaataccagcagttaagtttattttaccagacccaataccataaaatatttctgatgagcagatatgaaaaatgctaaattaaaaattaaaatcaaattaaaygggtgctggttaccacacataaaccttacatgctgattttaacttaacttttaagtgccaattgctataactcatattagaactaaattgaattttattacacaaaaacatattacttggcagtttcttactttcacaatgtttttgttactctagcctgtataaaattcccactgtttctaaagagctagggaaaaaaagagcccattgaacatcaatcacagatttcaggtttccagtttgtaaggtgggctacattacaatttgacacagttgtatgttaagtaacagtaaaaaatactgaggtaagtgctgcattgaaatataaactctcttaagtgcaatgttaagaacatatgggtgagtaatacacataatgtttatcattaattccccaccgcaaattgattaactttcctgtctccaagcatagtggcagtgatagcatttagaaaccctttctgtaaattctatctctaggtctcatttaataaagccttttattcctccattgcactaattgctttgcattcagttctactggacagtctgatcatagtatgaatgaaatgcactaatatccactgaaagtagcttgttatacaagaactttattgggtcaggcaaataaattttccagaacattaattagcaaagttcttttttatgggactgctaaatccattttgaattggtaagtttacttttttatagattctgaaatgacattgaaattagaagttcttttatctgttttaagagagtgtttctaaacaagcttctaaatatctgaaattgaatgttttggtcgaaaggcttggtagtatttgtggctgttcattgaaatttccactaattcataggtttgcatctcacaatattaatggataatcaaagcaggtttagcacaaagcagaacgggtcagtgctatggctgaatgaccttccgaacattcatactgaaatttaactgtcattgtgatagtcttaacagatgtaatctttaaggggcgattaggctatacaggcagaacactcatgaatagattaatatcattattttaggagcaggctcattgtcacaagtgcaggtttttacaaaagtgagttcagctttctattgttctctggctacttctggaaagttctctggctctctcacattctcttgcccctctgccctccaccatgggatgatgcagcatgaaggccctcacaagatatcagcaccttgatattggacttcccagcctccagaactataaaataaatttcatttattatatcatgcccactctgtgatattttcttatagtgaaacaaaatggattaagacagccagtctgccacatgtcttccttaaatttcccattatttttatatgcaacaaaaatgtatttgtktatttctttttctgttctcatttccagtatctgtcaaaactacctttgtaaatgttaatgayaaaaataagactatatcttcasaacattgatataagtttcaaaaacaatggaggaatatgtcccaaacacttattgactcccagaatacttcccatcacatgtattgtttctactacgtagcattttgtcaaaaccacacacatatatttagaaatatcttcagcttttgtattcacgctcttatatstgttccattttgatattttagaagttttgttaaaaaataaaaaggagaaaccaagtagcctcattctttctttcctggtttggctttagatatgctagatattttataagggtgtaaggctaagattctggaaaaaggcttaaatgtatcgtaaaaagcattttcctatctaatactacaaaattaaaacatttgaaagtttagaaattcaattgaaaagagggaaagatattcaaacaaatcccttaatatcttcagaaagctttcagatagtatgattgagggatacactgcaattttaaaagacaatttatatatcatccctgtgtttttctcacttccaccatatttaacatttcatgtattttttatttattttctgtgtattaaattacttgatttacactgtaggtgttttgttttctacttttaacacatcattgtataccaattgcctatttgctcaccaataaagtaaacaaccaaccaaaagaagaacacaatgcatggtttgaataaggaatatagtatgattctttacatatatacaaatgctactttccagaaggtctcaaaaattattctcttttctttttatacttttttttaacctactgattttaccacagacctggcaatgaaatgagggctgggaaaggcaccgaaacagtaaatattgtctagatgactagtcgtttgtcaaacagcatgaagcaagactgcagttgagtcagaacctgccactctgtagtgatccattagcttttaatgttttaaaataattatagtgaggcctaagccactatataaaaccactatataaattctagtgccattagcaaccccatttttcagagattcaatcaatcagtagttctgaggaaaattgcacccattttgccagtcccagaagcatgaaagttcaaagggtaagcagcagttgtcaacaggaatcaaagtgaaatggatctcaaagtgaagtttttaatttggaatttctgaggttggttactaaactaggccttatgcataagtatgtcattagttctaaaaggtcagagaatgccaatacattttcaatcagttttaatgataaaagagccaaaagtaagtctaaaatacatttttaagcctccaaaatgtcatttaaaaccagcaacctgttaaccaccactggagattagttttaaattaaaatgactttattgagcatacattagatttataatttgatagagaaaaagggaatcatttaacattatgaatctagtcttacaaaacaatatcagctttcctaattttgaattttcttccgtaattttcagttttacagagctcttatgcttaagttcttaggagagtattttaaagagttgaagagaaaaattgattctattctgatttcttttccacatattcttttgaataagagatttaaaaatggttaaaataatttttccaggaagttcttacactttcaacttacagcctctggagtcactgagttagggacttgaattgatgagcagtaggaaaatcaggaaacaaggttattgtactgggctgaagcagtaaatcaaaaccatggatgtaacaaagaggaagtaggctcagggaggaaggggatcagggtgaagttgcaaaacaaaacaaaaaacttattaaactcaggtcaagatcagagagtaggaggttacaaagcaaaggtcaggaaacaaaatatgaaagcctctatttgttaagtatttactaaggcattatgcattgttttaagtgttttagaactgtattcttatttaatcttcacaacaggcttatggtatgactagaaaagcaatattgggcttcctaacccaaggtgaatatcatagaggagtggggaaataatacaatatatgatcacaggctatcatagggaagggagaaaaccaggcagggagtgacatatgtcagagaatttaggaagcctcctggtgtctccgcctccaagtacatgcgccatttcttccaccaagggttctgatttwttatttccatttcgttttctccctctattctcctcaatgactagaataaataggtttagatcatgggcttcctacactaaaaatttagggcaggttcaagcaaataaatttaaaacaaacagaataagagtttgtctataagactcagaaaaactccccattattttgagttggaaataatttacttagaccaagttatttagatgattctaaaaagcagtcaacttaaaacataaccaatataatgaattgatgatcctggaagatgtaaagaaaatagatggaaggtgatattgcaatgacaagagattctaatgacaagtaagagaagtaataggtgaataattctgtcctcagagttgttctaggaggcaggctgtgattctacatatcttaacttcatgttctagtgataactcaacaaatgcatttgtcgtttctctattttagtagtagtatataaacttttaattgaatcataagaaaattctaagcacccagtattggaattataaattgtttttatattttcttttttaattacttaggcaaataactttttatgtaatcttagatataatagattatatgctagtgaatagcactttcaatgtataaattgtacatgcaaacaaaatggtgagttatatttttgctttccttttcccaaaaggcattcattcaccctacttctctgcataaatttattgaaaatagaaaaaaatatgtatttgctgctttttccaagtttcacagacttagaaattttttatgcacatatggcaatacacaagagactcttacaatatttgaaaattcaagctgctattcaaaaaatagacatctcgggtagtttttatgtgaagacattaactgaggaagcaatatgaattagttatagccttcttgcattacatggtattattttatacctttataaacaccaacaatacacatataaaggtttgagctaaatttcagtttgccttttgcctacgtttttaacatttacattatcagcaacaaatttcaaacacttttgtccaaatgatttaggtaatttttaaggtgtgcagagttgtcatgttttatgtccaagtagtttcaactgtttgaatgtacttaagcttcttctcaatatctagtgggacacagtaatgtaaagctgaattttacattattttaattgactattacttttctaaataaatatttttaaagtctattaaaacttatgtgattttaattgttgaaatgttcaaatatgaagtatggtacaatgttaagctgaaagtatcaagtcttagatgcatacatatcatttaactcagaagctgcatatctaggataatttcttcagaaaatgaccatggatgtgcacaaagattgaaccactagaatgattttttaaaattgtataaacatataataaaagggaagttggcaaagaagttatatttatgtacacacatacaaataatatagtcttatatagacagtaaataatgttacaggaaaaaatagttaaaggaaaaaatagatgtcaaggatgtactagtaatttaattttaatagcattacatgcagtatgaaactactgttgcatacatattaatatatttactgttttttgacactccatcaggcactaagccctgtcgtgtgggtttctggtttattctctcttttctattccttcttctgtttttgttgtggtagtggtggtggctgattttcttcagctttgcattacttcagctattctatttcaagtctcataaccttcaaatcatgcttcatactgtctgcaaagagcccagttttaaaacataaattttattgggccagtttgatgatgaaacatctttaatgaatatctatcttctgtaacataaagtcgattttctttgtgttctacctgagcatgtctgcaatctggcccctaacattttctctagtcttatctccaacctttgttccattcatatgcaaaaatgggatcctcacactgtttaccagcttaaactttgaaatgtctggaatattctttttccttatttttatctgataagtttactttttaaactcctgataaatacggagaatatccaccacattgatcatttagctatgtgaatgaaatgctcttgttgtggctttaaataaaggaactatatattcagtagtatttcatatttttaatgtatatggataaagtctaatctaacatttctttaattatggttaaaagttataccctgagagatcatctgctgataaaattataactttttttttgagatggagttttgctcttgttgcccaggttagagtgcaatggcgtgatcttggttcactgcaacctccgccttctgggttcaatgattctcctgcctcagcctcccttgtagctgggattacaggcatgcgccaccatgcttggctaattttgtatttatagtagagatggggtttcttcatgttggtcaggctggtcttgaactcccaacctcaggtgatccgcccgcctcagtctcccaaagtgctgggattacaggtgtgagccaccgcgcctggccaaaattctaacttcaatcagcataaataaaatattaaattcaaggctaggcaaggtggctcaagcctataattccagcactttgggaggccaaggcaggcggaccacctgaggtcgggagttcgagaccagcctgaccaacatggggaaaccccgtctctcctaaaaatacaaaaattagctggcgtggtggtgtgtgcctgtaatcccagctactttggaggctaaggaaggagaatcacttgaacccaggaggcggaggttgcagtgagccgagatcacgccattgcactccagcctgggcaacaagagcaaaaactccgtctccaaaaaaaaaaaaaaaaattgaattcaggagaagaaataacaatgaattaagtaatgaataaggaatatgtcttaaacttgaaaagtatgtataatcttgagaattgtttcaagctaaaatttccacatttctctgtgttaagggtaaattttctagcaaacaaatcctgataaccaattacacaccaaatcaaagatcaaaagtactagatcatccggttaggatctctgtaagcttcatttgagtcttcagacccctcagacctattatagaatttgccccatcacttttgtttttggtaatttagtcaactaaaaactgagggataaaaactagaaggggagttacggaatacaatttttgaaatgcttatcttatgaagagacagtttaagagttgaaagataatgggtttcccctccttgcagcctatctataagaagcagcacagcctcagttactttcagaggaaattatcaaaatatcatctgcacagaagcaaaagaaggaaggaaaagagttttaataacaaagttttatccgtgaggtttgtttcattttatttcactcatgccagatgctcccatttaaaaattaaatctatattttaatatcttatttataatatctttattycactaggcttttctcattccttyacttcctttgaattccctgatttcaaatatttttaattatattgctaaaagatttgtaaaatagattagacaaaaatgcacgtctaacaaacattgtgttacttgtttgttttaatatcactaagaatgagccacattttacaatatcataacagaaaakaaaatataamaatgtactattttatatgaaaatggctcttaataagactgtttagctaatacttaaaatttaaaaataaattgataagaatatatctgtagatttttgtttttgaaatcatacacttttgcttactttctgccatctgtgcattacacaatatttgtttttaattttgtcaattagtgttagaaagtttatgaaactacattgaaaaatcagggagagatcgtcccctaaaggagaaataagatatatgtgtgcgtatacacacacgtatgtaatatgttaacttataaactcacaacacatcacgataatatttatttggtatatggaattatctacacctgagctataaactagtacaattatttttaattttcttagttgataagctccctcaattcaatgatagtctcaggtagtcacagatttgaggattaaattgcatcgctgtcaagtcttggagtgaaacaagtaagtatagccagcttacaagtttgacctctgcaattactgttcattttctaagtttcctgggggtaaatgcatgttaaattgccttttagtgctgggaatgacttttacttagccaaattactctcttttggttcatcagttaaatatgtactgtatataatttagtagcaagaaagttactcattccgacttaaaagtgtccatcctggacattgtttgtggccagattcaatatcttacattattataaaaaatgtgtttgtgttactaaagtaggcttttatatgcttatcctttttaatgaattattcaggtcatcaaatgtaattttcaacttgcttaacctaatttaagtcagcatttgtagaatgtcacttgggtcaatacaagctcagaaggaaaaattaaaaatcaatgaacatcatagtgaacattttaattttcactttttaacctaatcctttttctgtatttggaggactgaatattaaagacccatttaaaaatatttagtttttcagaaacrtcactaatctatacaactattygcaataactacaggggaccrgttgcactatttcctgtgtcaacagaagatctgaccttgttttccgatagcttagagattaagtgcagccctaatagaagaactgtacatcattttcaaaggaaggttttctggaggataatgctgagtttacagattcctactgtggttgaacctagtgtctatttaatcttatactccagatggccttttgtggccaaatgactgcaaatttaaaaatcaagaaatgtttaaatggaaagagttggccttggtaaggaagattggagatagaaggttattcatttttttttctgtgagtgaagcaaaagaatgcactgctattatgaatgttagcagattttaagatctttatggataaatagaaggtatatatacattttaaataaataaaaataataaaaatattcaatttaatttcttttcaggaagaattttctaaaaagaaagccttatttaattctactctgaaaggcattattagtagattgatttgatgtagcaaagaattttttaccatatatatgtatatttctttccaaatacatttcaagtaaactggtaaactgattttgtgaaatagcatttattcttcccagaaagaaactaggttgattgagaagaaaaaaataarctaagaatgcctgtacttttgctttctctctgtaccttctctaccaaaagcaccagggaagatttatcagaaaagaatggccttcttcaggagtcatcaccacaaatacagctgggaatgagacgtatctcttgatttacttgttaacatgtgttccawaatggataaccatatgtgtctgatctgcagagtagaaaacattatggctagatcttggagttaaagttttttaaaatgtacgayggctgggtatattttgcaaccagcatgtatctacctaaacatgtatacatttgtatacctataaaatataatcatgactcctttagatacaaatctacattttttgaaacaaatattaaatcctcaaatatgccagatgtggaaaatagaatagctctagaaaagtttgtcaatgcctcccattacaattacatatatttgtcttaatgtttgtcctgtcacttctctgcttaaagtactccataattctccattcctctcagagtaaatgtgaaagtctacaaaggtcaatctcatctgaactcatggacctctctgtcctcacctcctactaaactatgcttccggcctcttcaagcagaacctttgcattttgaacttccctatacctgatcatctttcctccagatatctatctataaagtatattccttcctatccttcaggattttgttcaacatcaaattctcaaagaggcttactgcaacaaattgaaaattgtaacagttccatacatacttccaattctccttactctgaactactccttctatagcatttgagttctgatatatgtagtttatttatttatttatttattatggctgttatttgttgccagtctccctctactagaagatgagctccatgaaggcatgaatatatgtgtgtttttctcatgaatacagccccaacagcttgaatagtgcctggcacattacatacactaactgttgaatgatctttaatttagacccaaaatgcttggttctaagataggtaagacatgcttaatctgaaaaaaatgcttttctcaatttatgaaactgtacataaaatttgttcaaatgactgaagggatatgtatcacagaggaattcagacatatattttggggctcttatatattattaagatgtctaatgagtttagaagaaatgatgcaatatgattctataagtacaaacttgttttctcagcagaataaactggtcttctggaaaggtaacaaagacatttcacttatttcaaaacatgttatgatgatgcaggtatgacaagtttaacacttcctttgtttaagatagcattaaataaaggaagtttgtttccaatgtaaaaattagtgtagttaattaagagaaaatgtcaatagaacttaacattgtcataggataatggttcctgctgctagctatatgtcaagagaaagataaataagatggagtgatttattaagcagtgccacactgcaggcaatgcatttctagaggattatagcactccttgggtggtgatgtaaggcagaggactaaaggctaagtggccttaaccctttaatcagtacaacaatagcacagaagcgtggtacttgtagacagtccctgctgatatagcaaaatgacttttatatttagaagagactataatgatatcaaagaggatctaagttagaagagaatgccatcaacaattccttatagctttgtagataattatgtgaagaagtcatactatttcaaaatttaaaagccaacaaagtttgaatcacctttatataaaatacagacttcttaaaaattactttaggcaaaaattggttgctgatttaggaacttggtcattgttctcagcaaaatcggtattaaaacagtatttggaaaaaacatctaaagataattttccttttcaataattttaatagtataaattattttcagattgtttatattaaataatgtcaaagatggtttaaatccagaaccaacttttgcaatctggcatggcatgttcttcacttcaaactgaactcagaatactatcatgaactttgattttctcagatcaaagaaacaaatttcactggttactgagaatttgttttcagatccggcatggtatattttagtgttgcaataacataaaatagtgggaatagatacttagcaagattctttatatctttcttacatgttaaattgtatttcataggtatttacaatatgtattacatttaagtttacaatgaaaccagagttcagtaattctgttaagcttaaaggctttctttcaatctatatttaacataggttatgtttctatataattgacaagactgctttcagtttcattaacatattaaactatcaaatagttattaacatgttttaaaattataaaacattttagtttttagtattgatactgaggtaggaggtgggattcaattccagaggcagggctcagacagtgaaccagattaggcactggctaaaacagggccggggcagaagcagcttgtcatcagacatgcccaccagcctgtcaagtcaatttaccactgccatggcaacactcgggagttactgcccctttccatggtaatgacccaatgatccaaaagttactaccccttccctagaaatttctgcataaactgccccctaatctgcatgcagttaaaagtgggttataaatatgactgcaaaactgccctgagctgctactctttgcccatagggtagccctgctctacaggggcagtcatggagctgtaacaacactgcctcttcaataaagctgttttcttctacctctgtcttgcccttgaattcttccctgagcaaagccaagaacccagcaggctaagctccacttcggggcttgcctgccctgcatcaatactatgagaatatcaaaataaaaaatgaaatttcagcatcatcatcatcattttagctggaaaaagcccatatggtttcasactgccatcagtggcagtttgtgaacattgcttagtttagaaactagccttcctgtaatgtttatacttaatattgtgctattttagttgcagatctcgagatataattcccaaaacaaaaccctaagtgtactgtttttataggacattaatccccccaaaacctaagtctttatgagccccaaagaatttactatataaattgcaaacatcttgaatcacaacttataattccactcaatttgggttcattaatttgttgtattcctggctatagtctattataaaaacatgtagtaatgacatgcttaaatagggaaaaatgtttttgtagtttttcatatttacttgaatgacataaagttattgtgagtttattagcatatggcttttactataaacattttcattagctaaacaagttttcctaatatatttccttatgcttgattacactatgcttttttaaactaatgcttattttctggaagttaatgatgaatattgaaggattaaacaatatggctgattctatctcttgccgtggcctttggaaacagtgaggaaaaaataactataatgttctgtgccgaytttgtgtcatgaatacagttctaatagttttatatccatgagttcttttaattttctcaaacacctgatgaagtcagtaattattatctggtgaactgagtcacctagaggttaaaaaacttgtcaaatgtcacatagctagtaagtggtaaaaaacaggattgtaaactgagctgtctcttaaggaaacacaaagacatgaaaagagtagtttagttagatatttatgttactgaatcttacatttttatagataaaagaaaattttaaataatctgacactctattgaagcaaagatcaagtgagttatttgaacaatttctttcttcctttgtgactaggtaaaaaattggctcatggtctgtgttcctctctttcagtatcacaacttagtatgtatttgacccagttgcagtacgctaaatagcaggatatctgtgaattccatgttcgtggtgtcttgtgtttcctcagcatgacaattgygattctatgatggagctgcatgcttcctagtttgtgtcacttgtgtattctaagctccatgaaaacagccatcatgctgtcttattcacctctgtgactagttaaataattcttgtttaatatccaagttggtgtttactagagaatgaagaatttaaaatagtaaaggcagaagatatacttttaggacatgctaaagtagagcttaaacaacggatataaacactaactgctagaaaacaactgaagcagatagaatacactgtgcagcaatcccaaatggattgttaatttggagtctaagataaagagctgtaaatataaagagactctataaattttgggcacagtcaaaatcaaagaacaattttatgtgtctacagtgcattggtgggtcatgcatttatcttttgttaaattttgacacaaaaaagaaaaaaattgccataaaaatgtagttcactagtgacattgatatatataatgagatacataatgtgtatttatacttctctattaaacattgaatttttctgccttataaatgtgaaaaacaatcaagtaaagcttgtaccactttcaagggtatttaacaaaatgtcacaaggactttatgaccaacaatttttttaaagttgaagatggggattttaaatacagtattatgtccatgataattgggttttaaggatgcattctagagctaggctaaatgctaacagtcttaattttcaaaacatgttgactttgtttttgaaggctctggtcagtttcccatgctttaaaaaatatagccatcattattaaacctctaattacatattcatagacaaagggggaaatggattcaggtttgggcatgtcaaacagaaattgaattttcaaatttatattctaaataatttaaatgatgttctctaccaccacctgctttcccttgagcccaatactttaacttagaccaatcctaaatcagctttaggataagtttatgttgaggatgtttgttcccatttttactacttaagctgaaaaaattgtaatatggtactgtaaaaacactgagttctactcagatttcagacaatactattttaaagaatctatagcacctgcttgtttttgtttttgtttttgagatggagtcttgctgtgtcgcccasgctggagtgcagtggcacaatctcggctcactgcaagctccacctcccaggttcacgccattctcctgcctcagcctcccgagtagctgggactacaggtgcccgccaccacgcctggctaattttttgtatttttagtagagacagggtttcaccatgttagccaggatggtctcgatctcctgacctcctgatccacccaccttggcctcccaaaatgctgggattacaggcgtgagccaccrcgcccagccagcacctgcttgttctatcatttaaatttagatttaaaaatattttctcaaaatcacccttcaattttttagtgtctcttaggaaacagcttctttcttttgttaaatactaaaatagtaattttaattatggaacatattcacaggtagttcaaaggagtcaaagaagatgttgattgtactagttcttgttttataagtagaaatatgatttctgcctcatgttctttgatttcttttaactcttcaaaagcccagttgagcatgagaaagaattttctgactcacgtcatgaggagtcggtatcaagctaaataattttcagggccatatagtatgcatatagttcatagcataattgcttaggagttcatcacagttcattaggaatgtaaaccaatgcattcacagcttaaaatcatggcactgttttctagtacacaaattactcctcactattggtagaatttgaacattcactttcagcatgaaagttcaactttttttttattagttgtgaagaattgtgcgataaaaagaaagaaaatgggcacctcgtcatgttttaaatcagcatggggcaattctcaagtggatgtgacagcactcagaatgcattttggtccctttgttaaggactgccaatcataattaacaacaacagagatgttgtttgagcctaaataaaaattatggagagctgttttaatttaatacctgtaagaacacaatgtagaaaaaaacctgtctttgtagtcgagttaacctgtcatggggaattactctcatttttcctctgttcactagggtcagtaaacaacagagctagtcaatgtcatttttattatattcaaattgaatgtgaaatattaggtaacaatataaagaaatgrctttagctactgcattccaaggcttgaatcctttgagagtttgtaaataggacattggtaagtttcatatatttgatatctacactattaaaattgatgtctttttgagttatccttctgtgcaaagttttaaagagatggtctcccatcaacaatctcttctgttgcctaattcaatagaaaagaatgtctgactcttctttttgtggatatgagaaagttggattctgtataatagtgtgatccatctgacagtaggaagaactctttattttcttccaaaaattgtcttgggatttcaaaatcagtgggttgtctcttatgttaactcttgtgcaacagcatcaaattattttcagtatttctaacactcctaaaggcacactttctattcatcattagcatctgtggagctatttgatctttaagaaaactaccaaaggaattttccttctttattcttttcaataattctggctgctcctctcatcagaaatggtttattttgatctcaatttggttaagatccatcggcgtgatgttgaacactcctgcaagaactgtttttcttatttagcatcatactcaaagcacataggccaggcatggcacatagtatactcgtgaaatatttattaaaccctagttaagagttattccttattttccttttgctactcatgttcctggcacattgttggtgcttaataaatgcttgctgctaaataaacatatatgtggttgcttcaaatattttacatgactataaatatttctatttcccataatcagacacaaacatctgaagataattctgaaatttccctttgcatgtaaacagaaagcaaattacatacaactacatttgcaaagtcattgaagtcctctggagaccagatgatagagtcactgccaataaactaaacataagagacttctaaaaatcaaatccagtttcacttaagaatattaattgaaaggagatgtatgtasacatggagataacggaggacataaaatgacaacaaaagttgtataaaattggtctctcattcgtgcattttacaacctaattcacaagctcttaatgttccagccaaacagatgtactgagtttatctctataatggaccatactgcttttgcacagttggattccctgagctatttttccagaatgctttgaagttacagattttttaaaatgtcaggattagtaaacaactcacatatatttaacatttttctgcttttggctgtccgtgaactctttttttagaaatctgtctgataacacatgaaatgcctctttatccctattcaatctggtatagtggctcaatgaagactgcaattctgaaataacagctgtacttcctcttaaaagactgtatttttattggaaatatcaccagttccaagtcaattgcctatacatggacactgtcattgatttattctctttttcatarggtttataagccttttcttcatttatttttaatcagagcataaagatgctctcagtrtcttttaatgaattcaccttttcattgttagcaagtggaakaatagcagcttttcaaagatgaagtagctaatcatatgcgattcagcattatctgtcattataaatttgtataaatgtacaatcaacctgcaggctgtgcaactcatttaagggagcagtgggatagaaaggtatttaacatatttataacttttgttatctgttgcatgtttatagaactagaaaagcatgctaaccatatgggtaattctatttatcttttttcctgggtgtgctccaaaacttattgaaatttggtcacttggaggaagaattcagaaagccaattcataagtatgtcaacgtcttcacaaatgaggcttcaaccaagaggatgccttacttataaactcctcttagtttcttacaacaactcagtggggacattacagataaatttctttttggtttagtgagttttaagtcatttgtggataattttagtgttttatttgagactataatytaataaacaaaatattgcagctaacctccatgctttatttagttaagtatttagcatcyattcattaaatttatcaatatgaatttattaaatgcctaacatgtacaaggcacttaactataagcaaagagactacacagattaaatagtacactatcttatattcaaaggactcaggtggagacatgtttaaaaaaaggaattacactatggttggtaagtactatgacaaatacatgttgaggagtatagaagatggttctcaatcccaggaaagacttcttgaaagtagagaaataaaagcaaaaaattagaggatgaataggaacttgctgtataaagacagagagtgggagtagagtctaatcaggttggtaacaaaggcactcaaggaattggaaagagcagatacaaaggtgaagagttaggaaagagtcttgtcttatggtcaaaccgtaagtttggagtaactgggcaattaaatgtgaggcacgaatggtaagagatgagaactgagtgttggacaggagccaggtgatggaatattgtttatgctctgaagaactcagacttctaaactgtgggcattgggaagccaagaaaataactgaagaatgggaattatgtgtttatctttccatggcatggrtaacttgggtatatatgcaagtatgtgaatcgtatatttgcaggagacaacactggaagaagaaagacttatgagactcctatagttcaggtgaaaaatgaggtagcctcaatctaggtgacaatctaggctaatctttctagataagaagagatttccacttctagaaatatttagtaggtaaaattgacaggacttgattatggttggatatacaagatgagaaagaggaagaaatgaaaactattttcagagtttctaacatgagtctgaatggttggtggtggatcagctggaatagagaatgtgagaggctaagaaggttcaaattctaaaatgaattacatttttggcatgttcaaatttatggtgcctctggtatagtcagagagttgcctaggtaacagttgaatatacaaatctgaagttcaagaatagatgatgtagatctgggagtcatcagcatattggcagttgttgaaatcatacactgaaaaactgaataaattggaagaagtaagatgaaaacagaggttaattatatctaggtatgtcacctcctatttctggtcaatgctcatatctatcaacatccttgtcatccttccttatttattcacaactttgacacatggctcaatttctttttctccagtctaatccaagccatcattacagctggctcacctaaccctttatctctcagttccttgatcagctttgaagtccttcaccaaatcttaacatctggaatttgtatccacatacctacaacatgttctcctctattacatttcaaaaaaaattaggcttagatgtcctattttataaatacagactccaaactcatttataattatgttttcactctttttctgtaatcttattgagacctctactactctctcctaactactctatctttttttttttttttttttttttttttgagatggagtttcactcttgtcatcccggctggagtgcaatggcacaatctcggctcactgcaacctcccgctcctgggttcaagcaattctccagcctcagcctcctgagtagctgggattacaggcgcccaccaccatgcctggcatttttttgtatttttagcagagatggtgtttcaccatgttggccgggctggtctcgaactcctgacctcaggtgatccgcctgcctcggcctcccaaagtgctggcatgtgccaccatgccaggcctactctatcaatttctacccttactcttctttacattcgcattcttggtccttctctttctagttctccatataccccatgatctactatttcaatcaatatstacatcaaaatgatctacaatcatttgtcttgttatccctttttttacatatgtcaattatctgccgctgagtctaattcattgttttatttatttagtaaacacttatgtgacacttatataagttatatctaagaacttcacaattttaaccattcattaataaattctcataaaaacccatgaggtgggtacatccaggatgttctctgcaagaggaattcacaccatcacacaagtttatgactcccaacctggaacataaaattctttaattgggatgttctctgtggagaaagcaactaccatgctgtgagaaagtcaaactatcccatgcaaagtgacctcatggagaggcccaaatggagaaaaagctgaggccactagcccacagaccgcatcaaccaccagacatgtgagtgaaatgaacaagcctttggatgattttagcctctggcctctgaattgtctagctgaaacctcagacatcatagggcaaagacaagccttttttgcttcaataataaatttattgttaaatccaacaaaaacctttcaagccttaatttcatttgattctttgaaaggtttaacacagtcaaccaaacgtatactactagctgctctgattttcacttgtgcatttatagtcactccttatcaggcaccactgagtgctcctctatccattcctttccttagagctctgtcctaggctttgtatgggccagtggtcctcaatcaggagtttgcaattaagagcaactactctgtgtgatctcattaactcccatgtcttcaaaatttcctacattccaatatctcctaaatatatattaagtccagatgtctcttctgtgcatctgacaaatatatcaaaccactaagcacacattagtaatactcttttggatgtttcacggatagctcaaactcaatgtgcagcagaatgaatgtatcatctctcctgtcatatctgttttttctgttttattttttcagtaaatgagatccacatccaatatacataattttctattcaaaaacctaggataaaactttatctccttttttcttcagtactgacccccacaccacgctataggtaatcaaagcctgttgattccatttcatcaatactctcctcttgactcccaaagctaccttacctttgagcaagccacatcaactctttgctcagttattgtaatagtcttctaatttgtctgacttttcacattgccttttttcaatctattctccacattataaccagaatatttctagagtaaaatttgaatctgtattttcccatttattatctttaaatatctgatcatttcaaggatcagttcaaactccttataataacaaatgtagcttcagcctcatctttactagatcctctctgcttggactatcttaatttctctctcacttcttggtctgaaattccatcctaaccgtttatgtctccttttctccattcatcttcctcaagaagcactttccatagttaactctgtctctctgtataaagtgttactttaaaaagccttctctgcgacattaacatatattaagtgcttctacacctatgatctcctaacagtctatgcttatcctaccacagractttctacccacaattgtaatcctgtgtttacatgtttgtgtctcattagacttctgttgtggcgcaatgatggcaaagaccttcttgctcaccatcatacactaattgcttaggaaagttctacttagatagtgtggattaaatatttactgaattaattattaatgaaagaactaaaagtgtctgtgaaaaatatacagtaacaggtaagcttagagccctggatatggaagggtggagggaaaagcatgcttacaaaaggtttaagggctagattagaagttagcaagtcagatgaaggttctagactaatctttgattaaattagaatagaaaaatgaagttaaatggaaggtccaagagaaaataggaataaaaagaaagatgttattgagagttgtaaatattagcacaaaagtataatgtctccattgtagcaaacatcctcctcttcaatatatgtgtagagcttgcaagagactatcaattttcttactatttcattctctatgaggcaatagtctcaagtaaggaatgcaataaatattattctattttgaaacagtgagagccaaataattaattggacaagtttaaagagttgggcagattggatattaaataacagagcaatgacattctttagaaaatagtgaaattgtaagttaaatcaccagtaaagattacatatcaaagtaaaagataaaacacaaaatttctcatcagtctcaaattaaccaaagtcttttcaatgacaatatttttaatgcatgaaataatgtctctgaacaaagaacaagtcctaacatttcttacatatgtaaataattaaatagtaccttctctggtaataagtaatttcatccttataaggctatttctcagaaagtcagagtttggagaggaaaatctgatcttgatgttttctgtgagctttacctttgacattcacatttgcctttgttgatgaaattaaacttacatcaaaagacaatgaaccattattgctggaaacttggtgtgtctgagatccactaggaggaagtagcaaatgttcttttctgagcatttctgtgagtaccctttagaacacttattgatgtcagatacagaaccttattaactgaatacatggctttggaaacatcacattctattttttttaaatactagaatgtacttttgctccttaccttgttgtacaaaagatccatacacaaaccacatggagttgtagagagtagtagacgtcattgatcccatttgtaatcgtgggggattaagccagttcaagaggtagaccagtagacccaccagaaggactgtgccagcaatgcaagcccatagagagagatcaaatggtgcaagacaggcaaacatatccactgtcttttcagcccttcgaagtagtacccccactgagtagtccatgtaacgtgtcgtaaagtccaccacattttcacgatctggagtgatggttaaagcagaaatccctatgtcggctctctgagaaattgaaagagaaaggaatacattaacagtgtgaaaaacaatttcatttgtgccacttcagcttgcctcgaggaaaaaaaaatagatgcctcaggcaatataaatctttttatataaactgaaacactgcatagacttcttacagaagagctatgtgtgaattttgcatttcttactgaaaatcttgccccaccagagtcagacaaattaccttgttcatattatcagcatatgtaaaatcagtgaagaatatttcagacacagataacacagggagaaaattgtcttttttcgtgggtcattttatcaaagcaatcattaacagtaaaggaaaagcttataatggagaatcttttctaggaacatgttcccaagatattcaatatgttcttaacatgtaaattactaggtgggctatttagaaacttcaacatggcattttaccattggtttatatttctcttcacagaaatttatattattgggctctaaacagatttgttagagtttttatagcactaaggtgtcatatgcctaaggtcactactatgattgtattgtataaacttcagaaatattttaatgaaaaagtaatgattaaggaaagagaattcttcttggagtaataatccctttctaatgtgtcttcttagattctcagtgatagcactcttaactacagcatttactatttatttaaaatgtaacagaatctcagtaaaccagagggtagatgacttcacatttaaactgcataatatgataatacatatttaaatatctaaaagatgtgtcttttttgaaataatgatcttcagctgtgattaaagctgcaggatgacccttccagacaaacaaaaacactagtaaattattttttgaacattttcttgtattttctttttaattgtttcaggaaagaagataaaacttgtgtttatagcttttgggaacaaaaacaaagaaagatatgaaaagtaacatccctagtagaatgctaaaccaacttggatgaatctagtctcaaactaataatgcttttaaaaatattctagctaaagttaagcagtgtgggtacgtgtttgtatgtctgtgtgtaccgagttcatatatctttgttgctaggccctgtgctaagtatttaagtatttttttttacttagtccttacaatgaactatgaattatgtgttttcctctccatttcgtaagtggagaaactaaaccttagaagtttaagtaacttgttcagatctcagttagtaagtacagaagttagatattaaagctatgttttacttattccgaaggctgtgctcataatcattttaccatattgcagctatcattcattttccaaatgaaccatatagtaggcactcagggtaattggttctaggaaattttttatattaaaacagtgtgaaattttgctgtttaaactgtactatttacattataacaagaccatattagtatacgtaycatggatctacaattattaactgaatggtattaaacttaataacgctatatgaaaatgaacttgcagaaaaatattgctttcaaactcatatatgtatttaatttttatagcaagatattgggaattgggtcttttcagatggaaaatctaacctggatgtttaactcccttgtcccgtcttttctgagctttagtttaatctatttgtgaaatgaatgtaactgttcagtttcattattgtgagctgactcatttatcttgattttaatgatgaataaataactaagattcaattaggtgctcagaagatgcatttactttttcaggccattaaagtactatggatcagtaatttactaattgatcactagtgacccaaaacatttaatgactcaaccaaagtcagaaaattccacctgaggaggaatttactgacaacatgttgataatatttataaaatgttcacaaatatttttctaataaataattatatgttttacttttaaatgattataaattggaatggttactgattttaataatggatacctttaaatatcacgaagtgaatttttaaaatagaataaaaatagctaaagttttttatttaggaaaagggagctgattatttgtatgtgctacactatttattaaatttaacaattacttgtcatatatctataaacaaattcctaaattctggtctattttcaacatttggctattctattttcaaggagaaatttctagcctccctgtgggaggcatatcagaatcatataatgaactttttctaacaaatacacacactctctctctctctctctctctctctctctctctctctctctctttcccatctctgagttttgtatagtcttcctaaagaggtgcttcactccatccttcagaatcaatgatacagcagaacactgtaatggataatgagtatgtggtagtccttacttatattagaggtgctgcactgaagcaaaatttaaaaaaaggccaagcaaggacagaaaaccaaacaccgcatgttctcactcataggtgggaattgaacaatgagaacacatggacacaggaaggcgaacatcacacaccggggcctgttgtggggtggggggagggggagggatagcatttggagatatatctaatgttaaatgacgagttactgggtgcagcacaccaacatggcacatgtatacatatgtaactaacctgcacattgtgcacatgtaccctaaaacttaaagtataataaaaaaaaaaaggccaaggaccactaattcagaaagacagttctaaaacttcctaaatatcaataaacaacataaccagaaataatcaaagacaattatttattcttacccttcttaggtttttatttatttggtcaactcacttgtccactttttacaacgacttgtcacatctttaatcctactgttattatatagagaacatagaagatgggagattaaaaatcatacttatttctgtgttccaacctatagcccatacccagtctactctatttatctgcttccacaatacaggagctgtcccctttcctaaggctaaccttccatcattaaatgtatcaatctctctctatttcagatacttaagttcctgtctcatgcattcaacatcatcctattaactagatttcccattaaaagattctttgtttcttgttaaaatgaaatcaaagagattgagcccttccctctactctctggttactccacattaccacattttctctccatttttatatatcccagtcactctgagaaaactctttttccccatattgttggataccctattcctcatggaaaaagtacttcttaattattgtattgttgaacgtagtggatatacttcaaagctcatctaatcaggtctcttgacatttagcattgatgatttctccctccatcacaaacacaactttcccttgaatttcatgacataacatacacctctttctcagttcctttttcaagctcatgttagcagttctctggacttgggcctacatccttttctcatttgagctcttctgcctaggcaattccatctgtgttcattactgctattgtccccatctacacacaatttacaaatgtattatttctagatgtgtatctgagctctgggatctagactgatttattcaactacataattgacatttctactaaatgacttaaaaatacctcaaatttaacatttaacatggccaacatcatacttatgatattcaaccagtcctcttccaacatctcttgctttaatggtgtctttttatataagtcataaaacttgttagcttcattatcttctccagcctatgccccctatcaaatctatcattattgattttacctcctgagcatcctaatatccattcatttctttactatttccagctttcattgttttcctaggctccagctccttgtaagactacctgaaatctacctttcttcctcttcagtctccctattgtagccaaagtagtctttctatagagcaaatctgatcctgtctcctgccacactttaaaaattttcaatgaatttgcatggctcttaggagaaagattaaaaacatggtctacacacctttacgtaggctatccccaacctgcttcaacatattcatactgtaccattttcccttccagcagttcttcctgatgcatggtctttgtacatgctgttcccacagtctggattgaccctcctgaaacttcaagtaaacactcatttatatctatatgtcagcttgattttcattttcacagggaagctatccactatctctttgattggaacaataatttgtttacactatcagaagtttacattcctcactttcctagccactatgacagctgcaatcttacatatgtttatatgatcttttcaataatgtttgactcctccactaggccataagctccatgaaagcaaggattgtgacttttaaaaaaattacatatcacattttctggcatagaattcatggtcaataaatacttgctatgaatatatgaataaataaagatggagcccctactaaacttatattacctaattattataaatctcttccatctttttgtctgcattcccaacagagagaggtatttaaataataaaaagaaaatggcaatatgaaaattgactgttttatagcaatgataaaagattaatatcctgaataattatgtcaataattaaagtaaggttcttgatttatcagtatatttacacttacattatttgcaaatagctaagataattaggcatctactatagaaaattcaatatattacaaaatattatatgtcaaatatttattgtaaaatgattatttaaattttgattaggactagcactaaaactggaatataaatacatttttaaaattattttaattatatagtcataatattttccttgagagaagatacaagatttgcattctctcaagtcatgaaaaggatatggatggatgatacaatggagcatgactaataagcaatataatcactgaatcttagaagcttagacaaattgaaatacatttactctaaatttaatctaaaataaatgattatatgtaacaactaaagatctaatttattcttgaatataatgctaagaacattatattggtaagattaatagtatgcatttagttagtgcttactatataccaagtatcatgtgttttacatgcattattttaacattacaccaagtccagttgctttttctaagatgaaaattttgcatttgaaatattctaattattataaaactttgattttataatgaatcaatacctgcttccctgtactctttattagatgttttagttttgtcatccatacattatgttatcaatctaaatagatctgccctatgacaagctttcaaactttttccaaagatatgattttctgtccctcaaaatacttgtcattctcctgtgaacacagtctaaataatcagtttcctcaattgatataaattatacactttttaaataaaattggaggctgtatcatttttattaggtgatttttaatactgccttatgctaaatttaaggtcaaataaaattttaaaaatatttttaaaataaayactatcaaactagtagcccacaaagtcttatgcarttgaagcaaatgttagattttatatttgtctctttaatttcattctttggttcttttgtatttttcacatctactgtaatctatacttctcattcattatgtcaactttattttaccatgtttgagccattcagaagttgaggagcaagcctttaattcttcattcacattactagtaaagtattgatgaaacatacattggcaagttcaaagtatggcaatatgcctctaaagttctatgcactttgatgatagctcactagttaaaactttagatatagcttttcaatcacctataaatattccttactacactgccatcaagccacgtttgtctatagggtttaaagtgctttgtaaaaggcattattgaactcaaaatacatatttaatcagatattcatttgatcctgaatagctaatgctatcaaaaacatgaactgctattttaatcatctaaaacacatctgattaataatccattctgtaatttaatctgagaataaaatcaaactcactgctctatcagaatgaaaattttatttctgattttgaatatgacaattccaaactaaatatcacctctgtttttcatgttttgtacatattgcttgtagtaattcacgtatcacttcaggaaatgctttcatttcaactttaaatattttctacagaaagcagaaggaaaatagttactgaagagttttggcacacatttcacaagtactaggtctacttctgcctatctaacttactaaactgtttccttctcttgctgttcaagagaataaatttttgtaaatatttgaaatttcttgatagttttcttaaatattatttgattttatttggcttttaaataatattacaatgtaaagattccaggtttgcttgggagaaagtaaggattgaagaaatgctaaaggaaggaagaaagggtggaaaaaaaagggaaggaggaaaaataggagggagatggagaagaaggaagnnnnnnnnnnnnnnnnnnnnagggaagggaagggaaggggagggcccaagactactaattacgcctttaagtatcctttacagattctgatatatagtatttttattaccactaattttaaagataatttttgtttctttttctcttttctacagttgtttaacatgatgatttcttaatttcaggtgaaaagccttctcttactgttcttctaaatttctagttttattgtattttgatgagggaacactatttgtaataaagtacttaaatggaacttaatagtgttttctttgaggccaatcaatatatgattgacttttgtcaatgttccatgtatgcttgagaaaatggcatattatgagggtgtagtgtttgatccatatcccaaaaatgtatcttatttaatctattctttatgttatttattattgtgtagattttgttatatttactgtgtttttctatgtagcatgttttctttggtaggtttttcttttactatctagaaagatttgcacttttattatagtttttaacctcaatatttaaaaattttattatgcttttactcctttttttccagttaacgttttgaaaattttaaataaaatctgttacttccacttattccctaaagtgcattacgatatcctattttcccctactttccccttttcctttgattttttaataccattctttcatttttagaacacatgatgatttcatattattatctaatccatgtctccaactttgcttactattagatattttgccaaagattctcctgttatcttttggttgaatgaagctcattctgtaataaaccctgtttggtaatactttactatgttctaatatgctgacggattaaatatgaaaggacatttaagatttttggatattcatatccaaaagaattttgtaaaagaattcaattatcacttaataagtatttttattaccactactaaagtgatattgaatgttttttctttttttgtatgtgatttcattttcagccattcttttgggaattactctagctcttcagaattaattggrtaacttttatgaaatgtcttaatcatttggcctactctttcctgaaattaagaaaacaggcaggagataacattattaatttgtttgtaaacaaataacattttttgtcatattggacatatatttaattgtcttctatttcttcttgggtcaattttaatgatgggatgttttccttgataataattcatgccatacgtttctttcaaataattacgataaagttgtacttactgttccatcatgcttgtgaaaatttttcttaattgtggtgtacacatgtttttgatacttttatttatgcatttcattttccaaaaccagacatgcccaaggcttgtttttgttttatatcttttcaaagaactgttttttcccttcaattaaccctattgatttatgaattctaaaatacagattttaatgcattttaactcaagctttaatggcttcatattttgtttattgagttgaaggcttgattcattattttaatttagtaattaagtagagtttaaagatgaacacgtttctgtaagcaaagttttaaaaacaatttacatgtagtgcttttgttatcattattttctaaatagtctatacttttagtttttatttcctctttgctctaggaacagtgtatgagagtttttgctcatttgctatttttacttccaagtggtttgagattttgtctttgtttaaaatgttattcatcttaattttattgtgttttaatctggtaatttgttaggtattacttatgttgtatataaattttggagttggaggcacatgatgtattatcaatttttgtaattaacctatgggtcttcagtgtctataggacacaaatttatataaaatatatattaattgtactatttatattatatttaatagagttgtaaaatgttatcctttcagtcttctctatcaaaactcacatgttgatggtccatgattcataagtaacttacagatgtggttatgttcaaccacagttttaaaatacttcagccagaattcaaaattagtagagtctacatagaaattcaaacttacaatttcatgtgaaaattgctggagtctgtttcaagcaacttgttgaatttgagagacagtgcccccttggaaagttcatgagatcttcaattcactttagctctcacaattcaagcacattgtgtgcataggtactatacccaactttacttttataccttaacagcctgatctctattaggtatttgaatttattatccttcatttcttctcttggtttattagtctaactgatcagcacggcagattacataagatagccacaaagttcttcctattctggtattcctgcccctttgcaatgtactgttcagctcttccaacaattggtgcagtctatttccctatcctttaactttgggattagccaggaacttgctttgatcaatgggagaaaagcaatgtgatacaaacagagcattggagggctggcacaatggcttgccatctatcttgctgtgccaggaaccctggatcacyatgtgaatgagtcctaatttgctcgctgaagagtgaggagccatgcagaagataacagaagtgctgctactgagtcacaacagcaacttggcaatgaaatattatgcttcctgctgagctaataccctgctcttttctgcagtttgtacccttccaaattaggacaattaatggattttgtcagggtcacgtgaaaaacagaaatttcttaggagtgtgcttttttgaaatctgccaattcctggttcatggagggtacccttacttaatttagagtactgttgtaaaatttcctctaattttctatttatttgtcatatcatatgagatctaaaaaatggaaggtaaaggtagatgcttatgttttcttcaacatcttaagtaaatagatatttcaaaaattttaaaaatttctttaatggaatcattttaaaatatcttccaagctcagtagaaaataaatatttcgacagggcttacacatgataaatcagtgaatattattttcaagtacttataatgttattcatttcccaagttttaggtattaaaaatgtgggaaaaggaattttctaacttggattcccaatgaaatgcagtaatttaaattatgttagtgtatttagctgaacatggaagttgggccaatataaaaacaaaacataaaagtgaaacttttatataccacagaatggctaataagtttaccatttacaaaacatagggaagcaaaactaagatgaaaaataaataagtttaaacactgaactgtaaaaactatgtatgaatatattctagtttttaaagggtcaaattayataaaatcagcctattttcttcctgcaggtaaaagaaatgcccaaaatatcactggcttaaaaatcaacatgaaagaagttccctggctgactatcccaggtttatcacgcttccagagctaagaaccaaacttattttacttattttctcttgttgctctgtgctcctcagtacatagcttccaaytcatgtctttagagggctgcttgaacacaagtcatcctattaacattccagccagaagaaaggaggaagataagaataagaataaaaatccttcctttaagaacatttctcagaggcatcacatgatatttctgcttaaatatcattggctacaatttagtcacatgaccacactagctaaggagagaaactgggaaattcatattgtgggaagtctgtatctggctattatgattcaggagctgtattactaagaaaggagagaacagatatttataaacaatgaacagtcatcgctacatttcctcatatgtaaacactgttttgagattgaaaaagttcttttagactcttttctatttttacatatacataggtatgtacattttttccataaaccttatcataatgtaatgtaatcttagagaaatacatgtttatccctacccaatctttctaaatactgcacagaattttgagcaataattatttttgtcacttttgtatttttaacacattgatagcacatgaatagatgctcaataagtgtttattgattatgaaggtactctaatttacatattttcgctttgaaggacttttttgaatgtttcctttttcttacctattataattaatagatgtttgatcttgcaatttgagtatattcatttgaaaagtgtttcttgggttttgccacactgatgtttctcaaaattagtatgtttcattatttcaatagatttttttctctgacagcacaatagtgacaaaaacatcatgattagtttagtttatgtgtgataagccttattgctacactgtttctcagaaaccacgtgctattccttctcctagctccctctttagcaggcctccaagtctactcacatgctgatctccttttaaagtccttataggaacaatttagttttcactagtctctgaaccagcttttatcttccagcctgatttgttttcactagtctctgaaccagcttttatcttccagcctgattatatatactgaaaaatacctagttttccttttctaatgtattttcacctgagtttgtgacattgcctccctagagtttacagttatccttcatttctctgtttttctgtatctctcctatgggacttatcccataatatctgttttatattctcaatttcaatataaacttcttgatataggtattttatcttcgtagtcttctgtctccctaaatattttcacattgctttgcccacagtcattttccaaaaatgttctccaagaaagatstctctctctctctctcaacttacttgctctgcttgtkctttgcaatttggtagtaataagtgcttttatataaccttcaattccagcattcaaggaatagattcttggctatatactgcctgaaaaaaaaaagtctctcccattttgtcattgacttaaaggttttttttccatatgaagctcttagccaggcactctgaccttggtagcttggattctaatattttcagcccacatgtgtgggataaacctccatttatgccagctgtgctgcaaccctgctcatgatgtatcaccactttcctttcgctgaggccaaatctaagactcagacaaggtaaatagcttgcctgagattataggtgaacaaattgtggagttggccatgtcccctataatatgcttgataaatttgattaactttttgccttatggtttctgtataatctcttccttctaattacttccccagtatttattcattgctctatttttttcagcacatatgtcctttttaattcttactcttatttttctgagttctgatttatacctaagcaatactcatactagggaagtaggagaaagagatttcacagagatggtggtaagtgtatatgtatataattgaacatataaggcattatagggaattatgtaaattagagttgaaggaaaactattggagggttatagggagagtgtaatacgatctgacattttaaaacaatcactttggctgctctgttaaaaatagattttttaacagaaataggaaaaagagcagtagcttggtgagcagttaaagggccattgaaatagtcctaaagagagaaaaatagtggctttcgagtggtgagaagtgatcgtatttatatttatggtatatttcagatttacagccagacaaatttgctgatgcattgtatataaggcgtgacagagagaagagaattcaaggacaactcaaaggttttgcactgagtaacttgaaaattggagttgccatacactacaacagacaaggatgggggaaaggggtgaaatcagaaattcagttttgaacacttaatgtttgaggtacccattagaaatggaaaatgctgaaggcattgtgaggaataaaagcctgtagttcaggtgagaggtctgggttaaagaaacaattggggaagtggtctacttatagatgataattgaatccataagatgggatgagtccaccaaaagttgaagtatagatagtaaagcaagtggtggatatgtgttgatctcttctctctctctctctgtctctgtctctgtcgttctgtctctctcttctctatagagctgcttagctcttgaagaacaagaactctgtgttctatactttatgtattctccaaaattccacctacacattaggccccaataaatgcttattgaatgctaagtgggggaaaaagttaccagttataaattacagtagcattagaagaggcttaacaatatatattgtttctataattcccaagaggtaatgctatatctttgaagaaacagaccatcagaaagagttttccagtcatgtagagacttcttcaattttctaagaggccatctgaaggctgcttatgggcaaagaatacaggagcaatcgctgactgaaatgcccaaactgcaaatacacatttcartcaaatgcaaatcaaggataaaagaactagaattgagtgaatttttatcttcattatagtaaaattttcaatcattgtagaattcacttaatgtagctattatatagatgttttaggagctctggaggggaggggaatgtaagctctttgttaataagaagataactagctcccagaaacagtttgtctctatgagaagtaaatcaattctggctgttctcctagtgattctgtgcagtatcaaatgaaatataaaatgagtaggagagacactcagatgtcctcacactgctagagggagcctctgaagccaaactgcagtcatctcctacctggacacagctgagccttgttaggtctccggatttttttttgttcttagttaagaaaacctttacttattttaaagcctgccattacaaaattaccaaattacaaaaagaaaactcaggatcattgagacttagaacaactgaaatctgaagtayccaaatggcaggcaagagtaagtccgcagttatctttcaaggtatggctcgtggctctgcttccaaatattcattctgaatatttgtatgtcaagttaaaaaaaatcctttaaatgaggttggaacattgattgctagagtgagtgaatatttaaaggttccatttgtggttttaatgttgtactaaaggatgtttccatttctctttaatattaaaattaaccttttcatttagtaaagtattcaccattgcaaaaaaagagaaagaggaaatatattatatattgcatcaactacctttctaggctataataaatttttattattctcttttacttgtagcatatttctctatgtttataatttccagactaacgtagactagaactggcatgttaaataaaaatgaccaagcaatctaaacacaatacctcacaattatgcccatagaacatagagaatttcatatccgaaatgtctttaaaagttatttatagtatcctcacccaaatctgtaacctcttatatgcttggatgttatcttactcattaattttatctccaaaccatgatcagggatagatgaaattctaggtaacaaatggaatttcaatagccaaccgtggatttcaggatttatctatccttaagttgtcagattttctcatcacagcttcagctggataagctgtaacccaccaaatctttttatttgtaatattttactgaagttttgtttgtccttgtctataagttctccttaaatctaagagccattcctggatggtatcattccctttggcaaatgttcactctctgttctttagttttgattcaagacttattattcaccacttatctgcgcttgccatctattaggccaagtacttaatgattcaagttctttatctgattgaattgctccttgctgtttgcaatgtctgccaattaaatatcacctgcaaatttagaaaattgctcctacagccattcactaagtcatttgcatctacataatttatttcctttcacagatctctcrttatccttttccttcattagtgttaaaatccttccttatcaacaacaaatatttttggccatgttttcctcttgtacttatatacaaacaggttgtatgatctcccatatctatattttagtttcatcctatatgcatatccagtggattttgaacacttaccattcagacgtgcaaacatgtattcttatgaccacatgtattttttttaacttcytgcctgtgtacagctgacatactctgggaaactcaatctgtctattattacttgtttaatctcatgtaagaatgaaagtcttagccactgtccaatttaaagtctctataagggcttcccttctttttacgtattttactctggtcccctttgcaaagctatctcctcatttcacaaggcctgcaagcatttatcactgggcagtcactggcaggtgtgttgtagcagggaggttcttcttcggtgggcaaagttttcttggcccatacatatattttcaaggctggtttgcagtaatgaaaatatgtaagactcttttgtgtgatcatggaacatttttgatggctttcaggcacccagctgagaacccttcttcattcacaagcgttgctcctcataacaggaccttctcctgatcccagtgggtggtgggctctccctgcacaaggaggccatttcctctggtctttgtccttgccagctcttcctccttctctagactgtgggaatcttaggtgttcttgccaccctaagtttgactacctaggaaatggtgggtcagaatggtgggaattgtgcctccctgcagcatgttctgctggcatagagagataggctcgactttatgggaagaatgcctgatccttcccaactgcccctggcatgcccctctccagtgtgggtggaaaaggggacaactcatcacattctcaggttctctgaactctcttcccaaagttaaccctctcctccctctagtttttaaattatttcccctcgcagcaaaaataattaacacctgttctccttacccatgctcaggtggaacaatttaggaccttaaataatcattctgtgcatgatcttcctattaatccaacattcccaatgaagtttttataatggaagtgatggaaatacctatgtttcctaaacttttagaaattctcaacattattcacttgggttccagatgctcactgactaattgttcctagacaattccatgagaatgttcctcaggtaccacaaaatcaaaatgcctatagccaaattstgtgtccctgttgcccttttccaatctgcttttccttctgcatcccctatttttgttgtggagtgtccatctgctcattttcctctgctaaatttctcaccaagtctcaacccttccttcttttctcctccaagttatcaatttctattattatgccatagaatgtggaagtcagtgtggcgattcctcagggatctagaactagaaataccatttgacccagccatcacattactgggtatatacccaaaggattgtaaatcatgctgctataaagacacatgcacacatatgtttatagctgcactcttcacaatagcaaagacttggaaccaacccaaatgtccaacaaygatagactggattaagaaaatgtggcacatatacaccatggaatactatgcagccataaaaaatgatgaattcatgtcctttgtagggacatgaatgaaagtggaaaccatcattctcagcaaactatcacaaggacaaaaaaccaaacaccgcatattctcactcataggtgggaattgaacaatgagaacacatggacacgggaaggggaacatcacactccggggactattgtggggtgggggatggggggagggatagcattaggagatatacctaatgctaaatgacaagttaatgggtgcagcacaccaacatggcacatgtatacatatgtaacaaacttgcacattgtgcacatgtaccctaaaacttaaagtataataataataaaataaaataaagaatattaactttcctcagactcattctttttgttagtctcctgttactgttgttttaatgtagacattccattattcctccctagattgttgaaaaagccatttgtttttttctcttcctcactccaatgcattctcaggcctacctcagctatctttcttaaacgtaagttaaatcacatttttctcttttgtaaaactcttttataatttgtactggctaaatgataaagtgcaaactatttatcaaggcaaacatgcttttataattatccctattgttgcctcttatactcctactcatctgaagacctagcttaaatttctcctcttctgtgaaatcttttcaactccccaggcagaagctgccattcggcccctgggttgccatggcaccctgtatgtattaccctatggcatttttcacactgtgttttaattatttatctacacatttgtttttcgtgtgcacttagagatctttgaaggccgaggaaaagtatcttccactcctttgtatctatgatgccaggcacagtgcccagaatacaacatgcattcaaaaacatgtgcagataaatggatgaatttagggcattctgctgtgtgcttggcatacaaagtaaacataaccttagtcttctgatttccaaaacagggactatgcaaaaagaaggtctctctctccctccatctctctcgttctctcttcctgagattgtatatatgcccatttatagatatagatgtagatatatatagatagatgtgtaacattacacaaaggtaatttgaaaagaagtggaataggtgttctcagaggacgagattactaagagatgggagtagtttgaaagccttatgggacaaagtgcaagtttagctagggttgagaaatgaagtgagtacaggcagtctaggcagattaaagctgaatgtcatctaaatggagtgtgattaaatgcaagagggaagtgagatatagactgtacagtatattgcagtcctttctaaaagttttaattttttatggaaagaagacacaggtgtttgagaaagaagtgtgaatttcgagaagtttagaaatgcaaatcttttacatctcaccccaaatctttctctatgtaatcttatgttttgtcttctactcatactctgtctgaactcctatctgaaccttcttcaaatatgcaggtttaaaaaaaaacagctctgaactgtttgagtattgtttttctcactgacatgtaactgggtttatttaaatgctttgcagacaaaactgtttttctctggaaactggtaaaggagttaagcacttggatgctggagccaaacttcctgaatttgaataattaattctctacaacttggctatgtgactatgggcaagttacttcacctctctctgtttcatcatctacaacattgagataatagtagtacttatcattgtgagtactgagaggtaataaatacatagtatgtgagactgtgtcaggaataagtaagctctatatcagtgctagtatagttgttatttggtcagtttcaagctatgcttttaaattccttgtgggttttgtgttaattgcagtgttgtcaaatctattattgatgacaagtatgtcatcaaattctggtgatgttctactttattatgaaatacaacatataaaataattccaagcatatataacacatttacattattttgtaaaataaaatatatatcaatcatatttcataaacttaactttctaaaaaatgattaactgcccttctccattgcaatatatttgctttcggatttatactgcctactagtttctccttttgaaactctaagttcatatcttttatatctatccagtggggtcttagtattttcttgttgatttttacttcatgtagcagtgaagcggtgacacaaacaagtcaccattacacttttacaaatattttctagcattttgtttgtagtttaatttagttcattatgattttgtattactgtcgatttaaatttttgtgtacatgtaactattgatagtttcctgtaacttattctattgtttttaagcccctgaaggatatcttttgtttttcctgtttggtatctacttccccttcctctgataacagcatcctacttttccttgggattcactactccccgaggcttgctctaggtgttttgcgtgtagctacccctactctcagtgctccacctgggcaagtggtgtaggcctggcattgagaacactgcctcctcttgaacacaatacttcatagtcagagccagtgaatgttaaagctgaggctctgtattggaactgcaggtaaaagagaatctatgtttatgttgggatagataagaggatgaaatctaagcctaagagctactaaaagtcactttactgccaagagaggagagcctgcctgagaactggggcaacacacacacaaaaaaatcacagctgagagatggagcaagcgataccaaagcctgatgaaaggagcctggatctcatccctgaataggccagttttgtgagaattaaattatcttttcacttcaattggattgtcatttgcaaccaaagacacctaattaatttagcttagaatacatgagcaggttattttcaagatagagaataccttttttaagaaatggggaaggagcaaagaatttgaaagagactgaaaataaaagagaagtagggataaagaaaggtagaggggcaatttaaacttcatctatatgcagactggcctcaaatgcatgtgtccattccatatccttacccgaactccagactcatatatcagattacttatttcattttccatttggatagctccaaagaggtatatccatagttgttaagagaatggaatcaaacaatttaagctaatatcctggttcttccagttattggctatgtgaccttgagcaaggtatttaaattctctaagccttgatgtcttaaatctacataatgggcatattaactatctatttcatcaaattagtaagagcatgtaaggagtcaatacctgtaaagctttagaatagcatctgggtattattactgatttctaaaatagtagttttgattccgcattctgcaactcctggccaaatatttccttcattcatttcttctgtgccaataaatggtaccattctcaattaacttgaagtaaagtgagagtagctgaatataacaagctgtttaattaatggacaaaatatttaaaataataggaacaaaagctcaaagtgtagtctttcaacaaagataaaaacattttatataaagtccaaatttagtaggctatagtaggttaattgattttattaaagagcaatgagatcccattgaatggttattaattaggggagtgttattacctaatgtatgccatgtggccaccattcattcttttatgtacaaatattttctagatattgaggcttcagtagtaaaccaaatatatgaaatctcagaccaacttcagcttacattttaccagaggaagacaaatgaacaagtcagtacataataaaataattgtaagtgttataaaaaacaataaaacagaataagagagataggtagtacaaaggatggaagttgttcttttgaagagggtggcaatggcagtcctctctaataagctttaagcaaatgctgaaaaaaaaatgaggtggacagagaaatatcattttaggcagataggagagacagaaattgaaaaggccaagttcaatgagtataaggaagtacaaggggtaccataagcttggagcatggtgacagagggagagataaagagatcacaaagggaattgattgggcagattatgtagacaattttaaggacagtttttactctgagtgggatggaaacccatcaaaagtcttctagcaggaaaatgactggatcactctggctgctgtgttaaaatatattgaaggcagtcaagagtggaaagggagagtaattggacctctacggctacaatccagagaagagataattgtggctaggaacaagatagtgagtggagctggggaaaatggaaataaaggctgtttttttttgtttttgtttttgttttctgctgctgtggctgaaaagacaaaattaaaaagggatgagtttagaagagattgttggctttggtcttttttaaattttttttatatatttttattatactttaagttctagggtacatgtgcacaatgtgcaggtttgttacatatgtatacatgtgccatgttggtgtgctgcaaccattaactcgacatttacattaggtatatctccttagggacatggatgaagctggaaaccattattctcggctttggtctttctctcacttccccacagcaaatcctatcagactaccttccaaatatgtgttggatctgttacatttttaaaacacagaacctgaggaagttttaccaatctatccgagtcaacaaatacaacaagatctatttgtttttcctgcaacacattcttgaattcattttcttggttcatcttcacaatagcttcattccactgatgtggacattgtgactcagagaggattcaaaactcttttaggctcacatgggtattaaatgtgtcaacagtatccataactaatgcctttgatgtcactaaagatgagagaatcatggaaggattttgaggttgaatatcaagaacacaagggacttacgctagattctcacagcttttgcagtaaaccatagagtttaacaactgaacatgacgagggtgtaaaaaatgaagggactagaaattgaggcttgaaaagtgtggaaaatgtttggaatggtcatgtgggatttaaataaaaggtcaatacctaacgaattaaaggacactggaaaatcaatgaaagttctattgacattagctactagggtattgaaatgaactccatcagccaagtgtcatgactagctacatcaataacccagtgtgcgggatcctagacaataggagtggggatgagcacaggaggcatagaaaaagagcaagagcttgagcatggcttgggcaaaaaatatacttgttttgagctgacatggcgtgggaattctcttccatcattttcactatttattaggggccatggaattttgcctttcttagatactcaaggaacctgttttttgttatttattaatgagactctattcatgctatctccattcttgttttgttttgttttatgttgtcaattacatgtgctttctgaggtctcatcacctccaccagacaaacctcacaatagcatcttcttctccttctctgaaaactttgagacctggctaaatgtttctcttcacacaaaaactgaccaacctcctaatatatttcagaatcaatgtagatattccttacaacaatcattttgggtcatgattcagatagatattattttctaaagcagttttaggttttcagaaaaattgagcagaaagtgtgaataatttaccctattattactatgttgcattggtgaggtacatttgttacagttaatgaaccttacaatcattattggagacggatctcactctgtcatccaggctagagtgcggtggtgctatcacagctcactgcagcctcaaactcttgagctaaagggatcctcccacctcagcctcctcaacagctcggactagagccatgcaccaccatgtctagctaattttttttaatgtt

SEQ ID NO: 94135 - DNA, 522949 bp, Homo sapiens
  misc_feature (1)...(522949): n = A,T,C or G
ccacttgactaacaatgctgctctggtaatggtaccagaggctctacattgccctctttatgaactggatattgcttagacaagccaccctgctgaccacagctaccttccccaaacatatgactatcttgacttctgcaacactactctttacttgatctcctcccatttcttcaaccctacagtagttagccaagggaccatggcgggggtctctgagacctttcaggggatccaccaggaaaactattttcatagttatcaggaagacatctgcattctctcatgagtatacaggggaaattactagacactaagtgatatgtgatatagcaacaaattgtagatagcaacaaatataagcacccagttgtcttctattaagccaaacatgaaagagacttgcactagtgtcaaactatcaatctgctgatttagggggaggaaaaatggttattcttcataaaagtgttatttaacataatggatttagtcactttaaaataggtgtttttaaaagctttttttttctaatatgataaatgcgtcccacataaatgaaagctttttggggtcctcagtaatatttaagaacgtaaaaggcctaagaccagttaagttgaagaaccacattcttaaactttgtcttcttggctcttcttcagccaactacttcaattttgatgttccctagaatagcatccgtagccacgaattttctcaccttaaactaggatttctcaatcttggcatgaccaaacttttgggccagctaattctttgttaatgggggttgtcccctgtgcatccctggcctcagatgcctagcaccccctttccaagttgtggcaaccaaaaacgtcttcagatattgtcaaataaaatcaccccaggatgagaactactaacctaaatagtattcctagataattcatctaatatctaggttttaatttgacttatgatgataattccacttatcaagtacctattctgcaccagggactatcctaagtacttgatgtgtattaactcaccacagtggtgccgactacagcccccattaacaaagaattagctggcccaaaaggttggtcatgccaagattgagaaatcctagtttaaggtgagaaaattagtggctacggatgctattctagggaacatcagaattgaaggagttggctgaagaagagccaagaagacaaaatttaagaatgtggttcttggccaggcgcggtggctcatgcctgtaatcccagcactttgggaggccgaggtgggcggatcaccttaggtcaggagttcaagatcagcctggccaatatggtgaaaccccgcctctactaaaaatacagaaattagccaggcgtagtggcaggcacctgtaatcccagctactcgggaggctgaggcagaagaattgcttgaacctgggaggtggaggttgcagtgagccaagatcgcaccattgccctccagcctgggcaacaagggcaagatttcaactgaaaaaaaaaaaaaaaaaaaaaaaaaaaaaaaaaaaagaatgtggttcttaaacttattggtctcaggacccttttacactgtgtgagatggatcaattatgactctcattttataaagaaactgcagaacagagagtgatgtgacttgcgtggggtcacacagagttggtggtgctgactactgcagtgctcatcactcctctgagcttcagagccctgtgattaactacctctgctgggcatcccaggggaaatttacacccaagataccctaaatatgaactaaaaaaccctctctccacaagaccagctagttctgtattacctgagtcagttaatggtgcaagtttaaattcaccctctctgtgctttagcttaaccagaaacctggatgccattctagactctgcttggattctcttcttccttagtcctcaatccaatcattccagttccaacaattttcccttctaatgatttatcaaatacaacattcttctctatcttccactattcctgtccttactagcgtcctaatctctactctgcactgttgtaatcaactcccatttgatgtccttggcccctcaaaatcatcttctacactgctgccagagtgatctatcagaaaatgcaaatctggtcatgtcaggttagtggctgcctgtgagctaagggtaaagtccagggtcctcagcacggcccccaggccctcaaatcagtggccctctccaacctcagtgccttcctgtcaccgcccccccaaccccatcatacttacctccctggcagtgctgtgctgtttgcctgcctgaccacaccaagctgcttcatgcctttgatccaacatcaccccttgggaggccttctagattccacaccttgtacatccttctgtcacagcacttaacccagtctgtgacaactatctctgtacctgtgtcccacataggcctgtaaagccattgataacaggtgcctagcttagttcaaaaatctcatctttctctctccagggcttggtatagcaggggtccccaacccatcagtactggtccgtggcctgttaggaaccgggccacacagcagttgagcggtgggtgagtgcgcattatggcctgagctccatctcctgtcagatcagcggcggcattagattctcataggtgtacctattgtgaactgtgcatgtgagtgatctaggttgcatgctccttatgagaatctaatgcctgatgatctgaggtggaagagtttcatcccgaaaccatcccctcccttgacccggtccatggaaaaactgtcttccatgaaattggttcctggtgccaagaaggttggggatagctgtgatatagcactgggcaaagcatgcttcagagatgttttgtagaagcactgaggtaaaagaatgacacacagcaatgagacctgtttggctggtgggagggatgggagtggaagctgtgggatgaagagagttgggaaaacttttgttcagagaaggtgacaattgagctcaatcttgaaggaagagggggcactctagacaggagtgataaagggcctgctggatagaacagtacttgtaaaggcctggaggcccaacaggacgtggcacatttaggaaactgcaactgatgatgacagaggacaggatgcacatgtgggacttaggctgagactggaggagcagacagggctcctgctatcaaaacgtggcctatattataggtcttgcaagagagttccaaagtatttatttcactactctaattacttaaggcacaattcgcaggtcattaaaaaacgtttactagtctgcttttgattgcttattcagcactacctgtgttagttttgataggtaacttaagctccctgtgcctcagttgccttacagggtaatacaaatagtacctacctcacaagattattgtcaaaacaaatgtgttaatagacatgaagaacataagatagcagtggcacacagaattgatagtggatgttgtgttgctattgatttgccatcagtgacaaacagctgcagagattagagaggagggaagggacttttcctgaaattcacaagacacagccttaatgtaaaaggacatatttttataacaagtaagtttatctagggaggtaatagcaggaatgtcggtttttaggtctatgatctcaggtaacagtataaaatgattatcagactcctttggataatatatttatatttggatagtaaatttagcttaaaagtatatgcttaaggtataatttgatcaattattttctgaatgcatatgatcttacagttgcccatactgaaacccattttcaattttctgcctttcaggtagagtcttgaatgattttcctaaagtttgaatgattttcctgttgagtttcgtgaatgattttcctgttcagttggcaattactcatttgaaaacgcttgggcctcatttgctcataaatcatttccaaagagaatttcagaaatggaagggtccttagagattgtctagtccaacagtctatttcataaacaagaaaactgaaatacagagattgagagacttgtccaagttagtcttcgagggctccaccttgactttcttacatgctctcacataaaccctctccctgccactttccttagtgtgtgaactgcctgctgattccaagtccttgtgtatcctgagtaagctttaatgacaaactattttactccagactatggtgaaatcaaatggtttctatttatttaacttgcatatttcatgtgtttcctcaacagacttggttaagtacttggtgctaggtgtttggttaattcttgctaaaattccaccagtatgcttattattacactctttattctccaaagtcaaagtcattaagtaaaatcattctctcccgtgaaatttaaccacttaactgggtggatacaacctcagtggtatgacccagatgctgttttcaaatttgcagcatgagtatattttccaggcgggtttctaaaaatttgagagtcattgcttaagaggcttagcgttcctgtcctctgacagaggttgtactgggcagacccatctcagggcctgccagctcacacacgtgctggaggggggcctccctaaccaggtgtgttccaagggtaggctctgctcttatgacatccaatccacagtctggccagtcacctaagtgaggcttgaggtaaagagatgagttgatccaaccagattctttctcatgggaatatggctcaaactcagagagagacaggtagttagtaaaaacaaaacaaaacaaaaaacaaatctaaaaaaaaatgcagagagagaatccataagaaaatgatgggtcagaaccagcaacactgtgaaagcagaggctctgaattagaaaaaacatacaaagagtaacaataaaagactcataggcaaataggggagtggggaggcgtgagaaaaagtgaatgtgttatattaaagatgtgagtttaggccctcaatatcctgctgtcaaggtccagtaagcgggatctctgtctggtgagccaggagaaactgaggtttcagctccaaagcttgtgagaccctttttccttttccgctacgcatttccaccataccctaaatagaatggattcttgcaaccaaaagaactcattacgacacctaggaaattttagggaggtgctagagtgtgccttcagctttgtcgcagtgtactactcactggccacttccactctcaactcttccagtgctcaagggaagttttacatatgcaacacactggccttaacttcacaaatgactgatttccatcccttttttctcttctgcagaaacataacactaatcatgctcctagaataactaccaagatagcctttagggggaaaacgtcacaagacatgaacgtctcccctggtagaaagaaaggctcctccccgaggtctcagaggccacacctgtaggcaggagcacgcttttcgatggcggagcccggtccttgcctcgcagccgccggcaaaccacggtggctcccagtccccggggatattccgggtcagcccgcacccccggtccccggcccctggccccccgcccccggcccccggtgcccgctgggtcacctgtaattgtaggcgctgaaacgcttgctctctctcagcatcgcccggtacagagctaacacttgtgcgcgactggaggctgccattttggaaagaaaaaaaaataaacgggtcctcttcgccgaggtcccaagtacgacccaacccacgaaactccagcctgtgcggaaaccacgaacgaaataaaatgctgcggctcggctttgccagcgggccgggcctaagcctaagcgggcagccctgcggatcgcggacggcgccaggcgtcccgcgccgcttcgggggcgggcgcaggcagggctcggggcagctaagggggcggtgctgggagggagatgcctccgccccgccccgatcccgcccccgcccggaggctcggracccagcagccgctccacgcggcgggagggcggggaaataagaggactggccgcccgtgcatccagccaagctsctggcggacggatatcggaggcccaggcattcgagggacgtgcagttgcatcacggagagcctttgggaaccgtctggggtcttggcggagacatttgtgtttcgggggcagcgccccttcctacctccaggaggccgcgttgcccgggttaccgaaggccgccgcaccgacgccccgcccctgaccgccgatgcccctcccacgccggctgcggtcgccctcggcgctgcctgagagagcttgcgggatttcaagggtgacttgactccgcccgatcctggtcggcagggtggggtttcttggcattcctcaggccgggggatgcgacgtctgggtgtggaggtgrtgagctaggggttctgtggcactccggctctgctcagggcgacctgcgtaggggcctctggggcaggcccgctttctgtcaaaatggcagcgcccagcgtgcgcgggtatctctgaagttggggtttaagattcttgcccgtgagagcgaacgagcctgccgtrcttctgattttgaaacacctgggtctgggcttcccgggcgagcggtgggtgagtgccggcctcattgcagcctggggtacgacgtgggcggttggtgttgtagggggtttacattggccgtggattttttcctctttccggwtgtgtttttgcttttgagtgaagagttcccgtggttttgtaacctaataaatgcataaaatgcagcttgggttgtagactttggagaataattagagacctttagggctttaggctttctccaagaagcggagcaagttttcaaccatggctttcttcagaagactkcagcttttttgaatcatcttattaaagtggtggataaagttgcttgttctgatctttgagcatggsactggacgcrggrakcttcagccagtcctagttactgtgtttgcaaagcacttttcttgtttttggaatcttgctttatgtaatcaaccttaggaagaaccacacctttctgcactcaagcacagcgagaagtacgttatgcgtgaaaacaaaacaactttgcattaaaatccatctttctccgaaccacttggtcacggttgtgttctcatctgctttagtgtatttggttttgaaacgatatacctgctgtatgtctaaacaactttatattttcaggaacttttctktttccttttcttttttttgagatggagtctcgctctgtcgcccaggctggagtgcagtggcgggatctcgggctcactgcaacctatgcctcccaggttcaagccattctcctgcctcagcctcctgagtggctgggattacaggcgcgcgctacctcgcccagctaatttttgtatttttagtagagacagggtttcaccrtgttggtcaggctggtctcgaactcctgacctcaggcaatccgcccgcctcggcctcccaaaatgctgggattacaggtgtgagtcatcacgcccagcctctattttcaggaactttaaaggcagaaaaaacacttctctgaccttaccattctttagtgtacttgcaacctggtgtccttgcatccagatattcttactaatcctgatgcaatgacattttttaaaaggcactgaagagaaaatacttttattaagatatctttaagtctcctccctgatttcttgaaaatctcatgtctgttattgtttattattattttttaaacaggatagcaaaacttctattacttyctggttggtcaggtcattgagcaaatctagcctctgctttattgaaaggacttttttgagttttccctttgctatttcttaaaggatccaagaccaaggcaattgcacattgttatagagtaagattcagagctgatttctcttgatacactattgtgtgccagtgatatgaaatgatatgcggcacctcaaagctacaacattaatgcaagttactgatagagaatgctatcagagtgaaaaggaaaaacttgaagattattttggcttttttaaaaatagcaaagattacattattttattatattttgcttttgagagtaaagttggaataattactatatacaattgtttctacctaattatcaaggaatttaatcattaacgtacataattaatgtatctaaatkactcaactttgttgtaatcaaataaaacttttccaaataaatatgtatagtttaaatagtttgggtagcttagtcctctgttagtacgagcaatggttgcagttaggaaagtgataggcttcccagttaattctgagccaagtcttcataaaaataccttattattttatttaaaatggtttaccaatgtgttggacatcattgcctggagaggctaaaagaaaataatcattccgtagctacatctcacttttgcacatcttcattgcggagatgacttaaaaaaaataactcgatttgagattgtaagtagawttgggccagaagctgaagaatggaccttacacatacgtcctttaatagtcattctattctgggttgaaatttttcttagagagtatctgtaaaacaggaggtaccatttaggcatcaaaacgtaaaaatttctttagtattcatttatcaaaagttatcgactacctgtagttctttatggaagatcatgtgttaccttctattaaaattagggttgttaatgaccacttaatgctttgtgaagagaaatttctctaatcataataaacagtgtaacaacaatttactgtccttaagyttaaatatcaaaatgatgtataaagtaaaatttgtatagtagtagtaacttacgatattatttagaaattgttcagctgggcatggtggctcacacctgtaatcccagcactttgggaggytgaggcaggtggattgcttgagcccaggagtttgagaccagcctgggcaacatggcaaaaccccatctatacaaaaaatacatcatagcgaaacctcacctctacacaaaaaatacaaaaattaactgggtgtggtggcatgtgcctgtagtcccagctacttgggaggctgaggtgggaggattgcttgagccctggaggttgaggctgcattgagccatgatcacattactgctctgtagcctgggcaacagagtgagaccctgtctaccaaaaagaaaaaacaacaacaacaacaaaaagaaattattctattctacaccacacatgaatccaagtattatacattgatccttcattttaatagaacacgaaggggaagggggaagaccttagatatcwactcattcatttgtacagatgaacaaactgaagactttttcctcattcgttcattccttcagcatttattgaacacttcctaagtactataggttatggtttttcttttcttttttctttttttttttttttgagacagagtttcactcttgtttctcaggctggagtgcaatggtgcaatctcgtccggctaattttttgtatttttagtagagatggagtttcaccatgttgtccaggcttttcttgaactcctgacctcaggtgatccagctgccttggcctcccaaagtgtggggattacaggcgtgagccaccgcgcccggcccataagtaccatatattatataagatgatatagtcacagtgatgagagcttccccacccctaagaaacttgtaggtgactagataagcgaaacaataatttattttatagagacagggtctctgtttactaagctggagtgcagtagtgctatcatatctcgttgtaacttcaaactcccgtgctgaagtgattttcctgcctcagcctcctgagtagctaggcctataggctcatgccaccatgcctggcagatttttaagtgtttttttttttttttgtagagatgagatttcactatgatgtccagggtggtctcaaactcctcagtgcctctcctgtcttggcttcccaaagagctcagattatagctgtgagtcgtggcacttggccaataatttctttttgacagttgctgcgatatgagtaatattagtaaacgctaaaggaatagggaagaggaatattgaaccaggagtttcacctatgggaaggctttccatcgtagaaggtgtttccagaatgagaagtaaaagccagatgaggaatgtggttaaagattgcagtgtatatccaagcatggaggaagaagggtgcttgatctatttagagaactcttaagtgttttagaatggtaggaggtgggaagggagggaccactgaagtgtttagccctgtactagctttattttagtgatgttttctctctgtctggaataaatcatttcttcccttatgcattggctgagttatataagtagaacttaacagctgagctgttgaaatggagattatttattcaggtactgataaccttttgtttcaaatcatgactttgaatcctatattccagaggcactgaaatgttatttatttacctgtgcattcaagagatagctggcagcctagcaattyaagttactgttgttgtggtaacttgagggcratatataaatcaaacactgatcctgttttccagaagtttatactttaaatgcatttgtatatgattaaaatwaggtattaggttggtgaaagtagctgcagttttgaccgttacttttaagggtgaaaacagcaataacttttctaccatcctgtacaaagggctgctgaagcgttgtggggtctcagtgcaaggagaggtcacttcatccctgatgcttgggccacacctcagaccaacagcagtgctaaggcccaggcttcagataattttgtttaattttttttwaaaattctctccatgattgggtagagccagggctgagaaacattgacctgaaggaattagggggcttcatggaggaggtagtgtttgtgttgggcttgagaggatttaagtttctcctgggccttgaaaggaattgaaggatttaaatgtttgaatgtggtggtaagatggctactgtaggtggaagatgactcaccctttaccttgaaaggatgaaggagaaaccctgattgaggtctaagaaaaaacaatcatgacctgcggaaggctttggccagagctgtagagtgcatgagggtgagaacggggagatcccgtgaaaaggtaatacrtcggctttcatatgttttaggcaygagatgagctgaatcctgatatgatttgagttagtcttcccatgacctgatggaagagctgttatctccatttaagaaaagtgaagctgcccaggtgtggtggctcacatctgtaatcccagcactgtgggaggctgaggcaggaggatcacttgagcttgggagtttgaggccagcytgggtaacatagcgagaccccatctcaataaaatagaataaaaaaaagaaaaaaaaatgaagctgagagtttatttagccagggtcacacagctggaaagtagctagtgtggaccttggcctgagatgtgatctgtctagctatgatacaacactgcttcacagataaagtaccagcttcaggaattggaaggttattgatttttcttggataacatgggtacatttcagtcatatttgaattttaatttagttggattctcacttatttgtaaagctaaccggtttgtattggaaatattataaatattctgggaatctcaaatgttgattttatactagctttttagttatttaagataaatttacattttattctattaacatctctttgaaaagacgtagtgcttttttaggttgtctatttatgtgtgtatgtgagacatttcctcttgggggattctctgagactcacatttctgtagaagcttttttcagatatacttatgaaaatctgttctctgttttgagaaatcttgaaagctatgatatgttgcaactagacactctagcttcattgattggaggctaagggttcccgtatttgtgggcagtaacaacaaaattgacaatttattttgtgtaaagtatttcaaatgtcagttatttctagaggttttttttcttaaaaaaaaaaaaaaactcattaattcttttcattgtaaaggaaagaaaccatcttttcatgctacaaaccccgaccaccatgagaattcttttacagtgtgatttgttgtaatctgttatagatcactttcattctttctttcttgctgcatatgagggaccagtattttaggaataatgttttcatattgtctggatattttaggatgatttgttaatcaaactagctacagcttattgtaatgatagctattatttatttagagtttgttttctctcttctaggagctttgccatgaaaagaacagtccaggccaggcgtggtggctcacacctgtaatcccagcactttgggaggcccaggcaggtgaatcacgaggtcaggagatggagaccatcctggctaacacagtgaaaacccgtctctactaaaaaaatacaaaaaaaattagcyggatgtggtggtgggtgcttgtagtcccagctactcgagaggctgaggcaggagaatggcatgaarttgggaggtggagcttgtagtgagctgagatcgcaccactgcactccagcttgggagacacagcgagactgtctcaaaaaaaaaaaaaaaaaaatcgccacactgtcttccacaatggttgaactagtttacactcccaccaacagtgtaaaagtattcctgtttctccacatcctctccagcaccttttgtttcctgactttttaatgatcgccattctaactggtgtgagatggtatctcattgtggttttgatttgcatttctctgatggccagtgatgatgagcattttttcatgtgttttttggctgcataaatgtcttcttttgagaagtatctgttcatatccttcgcccactttttgatggggttgtttgatttttttcttgtaaatttgtttaggttctttgtagattctggatattagccctttgtcagatggatagattgcaaaaattttctcccattctgtaggttgcctgttcactctgatggtagtttcttttgctgtgcagaagctctttagtttaattagatcccatttgtcaattttggcttttgttgccattgcttttggtgttttagccatgaagtccttgcccatgcctatgtcctgaatggtattgcctaggttttcttctagggtttttatggttttaggtctaacatttaagtctttaatccatctcacattaatttttgtataaggtgtaaggaagggatccagtttcagcttctacatatggctagccagttttcccagcaccatttattaaatagggaatcctttccccatttcttatttttgtcaggtttgttaaagatcagatggttgtagatgtgtggtattatttctgagggctctgttctgttccgttgatctatatctctgttttggtaacagtaccatgctgttttggttattgtagcctggtagtatagtttgaagtcaggtagcgtgatgcctctagctttgttctttttgcttaggattgacttggcaatgcgggctcttttttgggtcatatgaactttaaagtagttttttccaattctgtgaagaaagtcattggtagcttgatggggatggcactgaatctataaattaccttgggcagtatggccattttcacgatattgattcttcctatccatgagcatggaatgttcttccatttgtttgtgtcctcttttatttcattgagcagtggtttgtagttctccttgaagaggtccttcacatcccttgtaagttggattcctaggtattagaactagaaataccatttcacccggcaatctcattactgggtatatacccaaaggattataaattatgctctgtaaagacacatgcacacatgtgtttattgcagcactgttcacaatagcaaagacttggaaccaacctaaatgtccatcaatgatagactggattaagaaaatgtggcacatatacaccatggaatactatgcagccataaaaacggatgagttcatgccctttgtagggacatggatgaagctggaaaccatcattctgagcaaactatcgcaaggacagaaaaccaaacaccgcatgttctcactcataggtgggaattgaacaacgagaacacttggacacaggatggggaacatcgcacaccggggcctgtggtggggttgggggaggggggaggkatagcattaggagatatacctaatgccagcatggcacatgtgtacatatgtaacaaacctgcaccttgtgcacatgtaccctagaacttaaagtataataaaaaaaaaaatgaaaataaccaaaaaaaaaaaaagagaaaagaagagtcctttcattgctgtttagcagtatctcattttagtaatttttctagtgacatatttgaagttctgattgacttcttcgaatgagtgtattagccgccatctcttgtttgttcaggtcagtaggttgtttacagaaaacatttagaatttgcagtgttgagtctgtttacaaaaaacagcctacattttgctaatcactggaaaaatactaggtcagtgtcttaagatgtgcaatactgagatctgtgatgttaactgatctctcagaggatgggtcgatacatatcgttgatagtatactgtagactgttattaacaatagaagatatacagagaattcatgatttctttggtattatagtgaattacatgatttaatattttataacgttttaatgtaaacatttattttctgagcacaattgaagcacttcagcctggcaaacttgtaatctgtatgtgtaattgtgagtttgagttaactaacaatatttaagagttataaaagcctggcttctgtgaaatggattacagtaatattggcagagagtaaaacagttagtttcagttaatgaagatgagttttttgggagaattatctttttttaaatcaattcctggaattctgcagtgcaaagggaaagtaaaatgaagcagtcatgaaatagaaaaagcttagcaggcagcatactttctttcctgtttcttgacgttctgagataagcacattgttatttatttcaagtcttggagcactttgagacaagcacatgtgcctgggcattcataacattaagccctgttaggaatcccacttacacccttggcttctgcgtactgtgagagctgggctggatgataattacagtcagctttcatttgtagagcccaggtcttcaaataatttccaagtaaactatcccagattaatacgtttcaggacataagtgtggttcgctagarctgtcaagctgtctggatgcccttctgttaactttgtagaagagattccacgtgtgtcaagttacagtgtttgctgaaatttttctgttgtcttgaaagctatttgaaaatgaaatgttcattatagtactggtggtcaggtatgttccttagatatatatgaattaatgtcaccacactatagacagtaatttttatatcaccttctctccaaaaacctgcagcacttttaggatgaagtctaattccttaacacagcctatgagaccctgacgactatggcgcttacccacttctccmgtcccatgtcatacctttttatttttcgcttgctgcttttcattctttagtactcacctctttcccctctaccctggggacctttgcaaatgctgatccagctgcctggwgtgcccttccttcccttgctaattattcttctgatctcagtttaagagatgcttactcaaagctaccttctctaacttgagtacatcttcctctgttaagctcccttagtatggtgaattgctcttcagcttagagtgactgccattgcaagtaactgaagtcaaattgttttaaacaaacctagtggctttattgtctcctgtgtcttgagggttcagaagccagatgggctttagggttgattggtttgagtgatgttgccaaagattcaattttgtgcttttctctactttgtcttctctaacgtaaattttatcgtctggccagagtcctctctctcggttatgggaaaccatcaacagtttgggggygcttgtttccaaaaccttagaggagtgagagagcttctggaccaagagtgctcagcagtcctctccgttcatgtcactggccctccttgtgtcatgtcctcatccatttctgaaccaataactgtgaccagggagaagataggattcttttggtcttgaaccagttgcctagctcctagagataaaggggaattattttttgtaaaaggaacaaagttcactagagcaatcttgccagagttatatttttttatttgattaatttttttgtgatattaggctgtgtataagaacagagactatgtctgtttttttttttttttttttttgaggcggagtctcgctctgtcacccaggctggagtgcagtggcacgatcttggctcactgcaacctccgcctccggggttcaagcgattcttctacctcagcctcccgagtagctgggactacagtcgcccgccaccacgcccggctaatttttatatttttagtagagatggggtttcactatattggccaggctggtcttgaactcctgaccttgtaatgtgcccacctcggcctcccaagtctgtttttgattactattgtttcttcaacattttacatctagctttgcatatagtaaatgatcgataaatattaatagtgtaatgactcaatcacgtaagctccaaatacagtaaggaccccctgccgccaccacccttacccatggttttgctttcttagttacccagagtcaactatgttctgaaaatatgtaatggagaattccagaaataatgcatgttttaaatgggtgtgttctgagttttgtgttgaaacctgcccagggcatgaatcctccctttgtccagtgtctccatgctgcatacacgctacctgcccattagtcacttcgttgccttctcagttaccacaagatcacgattttcgttatggatagatgacaagaagaaacagggtgagtgcagtgggatgaggtactttgagagagagaagagaccatattctttctctttttcataacttttattacggtaggtatattgttataattgttctactttttattagtttttcttgttgaattaatgatgggtttttcttttttctttccaaaaaataataataaccactatcttatgcggaaatgatatcacgaacagttgcattatcaartcaaggaggaaatgcaatcagagaacaggcagaaaaactatgattataatggtttgtatttttcttgtctcagattcttttatttatttatttttattgatacataatagatgtacatatttttggggtacatgtgatactttaatacattcatataatttataaagatcaaattagtgtaattgtgatatctatcaccttaaatatttgtctttatgctagaaacattcaaattgttttcttctagctattttgaaatatgcgatagattattrtaatctatagtctcccggtgatccatcagacactaagtcttatctcttctatcaagctgtatttttacttgctagtcaatgtctctgcatccctcctgccctgtacccttcttggcctctggtcaccaccagtctattctctctttccatgagattcacttttttagctccgacatacgagtaagaacatatggtatttgtctttctgtgcttggcttatttcacttaacataatgtccagttccattcatgttgctgcaaatggcagaacttcattcttttctatagctgaataatgctctgttgtctttttatgccacattttctttgtcctttcatcccttgatgtacacttaacattgattccatattttggcttttgtgaatagtgctgcaataaacatgggagtgctgattacaatgcacatatctttttgataatactgatttcttttcttttggatatattcccagcagtggaattgctggacatatggtagttctatttttagttttttgaggaacctccacacagttttcctrtgtggctatactaacttatatttccaccaacagtttacaggggttcccctttctccacatctgtgccggcatcttttattcyctttttgataaaagccattttaactggggttagatgatatctcattgtggttttgatttgcatttctctgatgattagtgatgttgagcatttttcatgtatctactggccatttgtatgtcttcatttcagaaatgtctattgagatctttggcccaatttttaatcagattgtgtttttttttattgagttgtttgtgctcattatatattctggttattaatcccttgccaggtggatggtttgcaaatactttttcctattctgtgggagattctggrttgtgttttcactttgttgattgtttcctttgcttacagaagcgtttttgcttgatgtaatctaatttttctctttttgctttggtggcctgtacttttgaggtcttcacaaaaaatctttgcccagaccaatatcctgggttgtttccccaatgtattcttgtagtagtttcatagtttcaggtcttagatttaaatctttaatctacttttatttgatttttgtatatggtgagagataggaacttagcatcatttattgaagagtgttttttttccccattgtatgttctcaacacctttgtggaaaataaattgactgtaaatgtattgatttatatctggttctctattttattattagttattgttgttaaatctcttactctacctaatttataaattaaactttatcatagatattcacgtacaggaaaaaacatagtaaacagtacttagggtttcgtacgctccacagtttcaggcatcaactgcaggtcttggaacctccgtagacaaagaggagctactgtaacttacctgtaaaaattattgagtgactttggcagatagtattagttggctacccatcagccatatcaaccgtacttcttcccggccattagaaccctgattttgtttgggtggccatgtgcctagttcctggaaatgaattgtaatgcggtcttaggcttcatagtgattgcattccctctttaccagatacttgtttgtcatagccaggcatagccacaagacacagatctggttaatgagacaacaggaagttgtctggaaggtttctaggaaagattttgttttctattaaaagataagtatttgcacaagagggcttacttgtgtcatcttctcccctgcttggaatgcaagtaatactaaagcttgaagctcagcagacacacatgaaggaaaggccaagagaatatgagattccagcctaaacattggcttttctgagccatgaaatgaaccctggaactggatgcgtctagacttcgtgttttgttaacaactaatgtctttctgttttcagccacgattatttagtctttctgttttatgcagctcaccatgtcttttttttttgagacagggtcttgctctgtcaccccagctggagtgcagtggcacagtcatggctcactgcagcctccaacttccgggctcaagcaatccttctgcatcagcctcccaagtagctgggactacaggtgcatgccacctcacccagctaattaaaacaaatttgtttttggtagaaatggggttttgctctgttgcccaggctagttttaaacttctggcttcaagcagtcctcctgcctcggcctcccaaagtgttgggattacaggtgtgagcctggcccwacatatttcaatatagtgccaaaaataaaatagaacttccccgcttcagccttgccaaaagtctttatttggaatttattatatttgtcaatttaagttatttgtttttgctggttgcgaakcactgggatattttctttctttttcttcttaaacagatgcatttgttacatgtacacaaggccaagcttttttgcactgaaggacattggtatatgagggtccttctcttgaataatcaatattttcttatactcttcactccagtcatgactactcagcttaaatgttacttcttcagggaatgttcccaacctcagtttaaattacacccttctgattttatcattatttcttatgacatcttgttctttaccttaactttttataatttaaaattgtacaaagtagatctacataatagaaggttcctggtttaatgttgagttctcccaccagaatgtgaattctgtgagggctgggaccatgtctattttgttcatcactagaggcatagtgcctactaagtgctcagtaaatctttgttaaatgaggaaatgaaggaatataagcctgaaatttttagatttctgcatctttcatcctcctgccctgtcaccaccaagaatattaggtaacatgaagtgttcagccacagcacagattctgttgcatttgtttggattatattgctccctactggccaggatttaggtttagattttaggcttttagactttaattttgtttgcctcaatagaaaatataatgggagtagcatagtcacttagcatagtatctgagtaaacatcctgtcagttccttcagaagagtgatacatattttgcatacttttgcgttacgatatattctcccagaattttatattatcttaagctttgctggcactatttttatatattgaagttaagagcccctagtagtgaatgtttttattttctgcttttggatagcactagaagcatggaaatgactatcattttagctctgttactagtcacaatcatttaaaattgcatttggaaaccctattttctttctgaaaaagtaggctcaatgggggagttgtaagaattattgacacaagttattgacttagaatggaggtactttaaaataaattttttagtttcagcatgctgtaattctagattgttggtattagttttaccgtgtctgggaagatttattgtgcatttttgaaatgagtgtaaatgctgtatatatgtgatagtaagggagaaaacttgactaagattttgtcgatttggtctcatttcacagctgtatcataggttttttcamatcattttaggtaaattacttaacatttagataatcacataatttatttcctacatcaggacacttgagatcagtgaaagtgggtgctattaaataattatactggcatgacaggcataaacatgaactgtcttggggatactgagacatatggtcactctatttgataacaataatctgtgatgactatgttaatctgcatacccttgtgaattgcaggaactaagaattggaggctcatcaaagagctttactttccctttattctttacggaatggctgcatcctcaacaccttctgcccagaggtgtgattcttcaattgtgtggatcactctgggtccccaaactgatgtggttccctgggcagtaggagactgggactgtgggttgttctctgcttcagggatgaatctctttgtgcaggattagctggctgtactaagccgggcatccaggaggagggcatgttgggctgtccagacactcccaaggacttggctgaccccaaagatttctctctgcctgtctcttcccatctctataaatcaggcagcacaggaggaacaaacacatgttattgttttaccttgaagtgaaatccacctattcctcctcagtgcaggctcagtatctcctgagccagcctcagtgcattgtggtgtaaagagaaataattttttctccctgtggtgtttaagcctaattcaaatagaagctgctctgtgattaacttacctttctgtcattcattgatcaaatggtgactgaagaagaagctgaatgaaggcacagatagcgagtgcagcgtcatgtcacacaaagcttttgcatttgtcagcaggggctggttcacagttttgttttttttttttcttttcttttcccagattaattgttacttgtcacatgtagatatttgacttcttgaaagacttaaaccaaaacattaaataaagtagcagcttagaatggcaaaatggttggttttttaaacaaactaaattgacccaagagattttagaatgactatatttttcagttacatttttgaggaaaagaaaatggatatcaattacaaatgggtggttgcagatacatttttttaatagttccaataatacacattttttttatttaccagaaaagtacaagttcagctgcaaagaaaatgcagtaaaacttggtaaagttaaggaatgccaccttctgaatactcgatacatttgtttgtaaagagacgatatatcgtatcatctctgtagggcataaagggtgctggcaatttcaaaactaaaatctgtttctgtgttatagcatattatcagcagtaccagatttacagtgaatacatttaagatttgaaagatattttggggacttttggttctttattaaatctttatatatcatgattgataatatgcaagaacattggctttttttccttgctcagcattattcaaaaatgttttgcaataaaatcctaacaccatgttgtccattttcactgcccccgacccctcattttaaggaatatcactgtacccagtccattttgggtatcctgacttcataaatgagggaagtgttagcagagtggatacttaggagtttgatgtcttatatcctgctccgtttggactagaaccttaatcttttcaatattttctccttaaagtatacttcatctgtcattaatctaaattatcatctcacataaagcagctgactgttgacgttttcagttatcacagtgtgatcctgaaatggggaaggactgaacagagccctgaaagatgagagttcggctctggctgtaccctagcttgtgtgatctgtgagtaaatgaccttttcctcctttactttcttcagtctaaagcagaactgaaataacckattctctcctcacccctagggacattgcaaagattcagaacatattctcattagtgcgctttggttttctgcaataaggagggtgtgtagacagagcttggtattgttgccacgagtgctggggtctaataggaacgctggtttttggttggttgtttttttaacttgcatggtgttttaatagcagaagattatggtttcttcaaaatatggtaaaacgaagggatttttacacaaagttttttactaaaaatgacgatgttaatggcgtactttatttgaaagaagccttatttttattagtaaaatacttgatgtatgttttaatgtgtgtagatttaaaatacattctttaacattattctccataactattcaacctcactaggttttcctgtttagttagcaatggtcttttctttattaggctaaaaaagaaacccatcaaaccctgacatgagtcacatgatttccacatttgactctgaattaattgggtatgagatgcagccttccccctctccaccccgtgtgatacacttcagctcttcccagcaagagaggttctgttttctctctctgaaagaaatgcagagagaaaggaaatgcctagatggtttggcttccactaagtagagaggaggatagagtcttcaggcatcctcaggaggccttgagtgcacaacaagacaggtggcttcagcgcttgcttgtggccctactgtccatactgttcagaggtcttggtgatgtgtcttgcagatgctttgtgtaggtctttgaaagagaacttgaactgaggatggtgtgctgtgatgaacacagccagggatgtgagattagaaaatcttgaggccgggcacagtggctgatgcctgtaaccccagcattttgggaggcctaggcgggcggatcatgaggtcaggagatcgagaacaccctggctaacacggtgaaaccccgtctctactaaaaatacaaaaaattagccgggcatggtggcatgagcttgtagtctcagctactcgggaggctgaggcaggagaatcacttgaacccgggaggcggaggttgcagtgagccgattgcaccactgcactccagcctaggtgacagagcaagactccctctcaaaaaaaaaaaaaaaaaagaaaaagaaaaaaagaaagcaatcttgagttgaaaatgcagtgagaagattgaaagataacagaatgacaagtgtatataaatggagttgagtgagttgctgagtgtattcgtttggctagtttctctctataaataaatatagaaaaaataaaaaatataaatgtgtgtgtgtgtgtgtrtatatatatatattttatatatatataaaataaggaagacgagatctgtagttggcaacctggagacccaggagagcacatggcataagtttcagttcagtaccgaagacctgagaaccaggagagtggatggtgtaagttctagtccaggtccaagttcaaaggcaggagaaggccagtgtcccagcttgaaagacaggcaaagagagaattctttcttactcagccatttttctattcaggacctcagtgaattggatgaggaccaccacattggagagggcaatccgttatacttaagtctgctgattcaagtgttaatctcatccagaaacatgctcatagacacaccacataatgtttaaccaaatatctgggcaccccaaggcccagtcatgttgacgtaagactaaccgttacactaggcaaaggcattgaaaacacctagtttycccttagtcctgtcttttgaaggctaggggtgtttttggtcctctatctatgagctgtctgtggagcagtgacagtgctgtggctgcatggcagccagctacatttcctggatactgctgcttgaagtctatgtgcattttttgcccttggcataaataatgatagcatgcccttaaatggaaactgttcaacctatgatgaaaatatcttgattactcatatgaatagtggcatggaagaacacagctagttaaaattcacagtaattcagaaactcatttaagcctattctcttctaagaagtaacaaaattaattgctctttctgtacatgcccactcagaagttggtgcttcaagagatgcgaaatgacaggcaggtgatttagagggagaaggagaactgccttggataatatatggactgttgtctaacttcgccattggaatagatttgggtgtcagttaaatgctttgcttggtgtttcaagtttaatgagacagctgtagaataaactaaaatcattttctagaacatactaagcctttcccatctgactaccttgatacttcagtttctttatctggaaactgtctttttgaatggcttatctttttaatcttgatttaaagtttacttcctcagataggccttccccagccattctttttttttttaatcaaaaaataacgtctcctgtcctatttttaggtttctaatgattcctacttgagttgttaggccttcgcagcctcagaaagtatgtaggtttacagtaaattatacactgtgtataattcatttttcaatatattgtaggtatattttaaggtttagttaagaagtatgtaggggtagaagatcttatgtttttagtgacattttatgatttactattggcattgtattttccttccrtttttaatttttgatttatattattttaattgtattctgtcagattggctggagctatcctggactttagtttgagggatgacactttggggagtaaagattgggtttactttgtactcgagtcttccacaatttcctttgtagggctaaccgttgtcagcaagtatttatgcaactgttgtcttatgactacatagcatgtattggtcatagagtctaaaagcttcttaaacaaagcatgggatttaagaaagaagaattagcagattaarccttaataatatataaatactttacaagtgaaggtaagacttaaaaagatttaatagcataaactttaataattcatgtattagaggcatcaggtttaaaataaactgctgttctttcacttattttgtcttatttccgtctttaaattagaaatgaaaagaacctgtagttgttttgtttttactgtgtcaaaaaaatgcttaaaagtcatgtttcatggtggatttttaaaattgtggtaaaatatatataacatgaaatttaccattttagccatttttaagtgtgcagttcagtggcattaagtacatgcacatgcttgaggaaaacaccaccatcatccatttttcagaacttcatcatcccacactgaaactctgtactccttaaacagcagctccccattctcccaccycccctgcccccggtaaccactattctgtgaatttgatgatattttaaaattgttgtccacagtgattgtccgaaccaatatatagtaatgatatctctctgtgtgtctacagggatcacctcctttaacgtgactgtatcctaactaaatgcataattgccttgtattgggaaatggtagacacttctcgaggacctgaaaccattcaatttagtcagtgctcctagccatcactaaccttatgtgttcacccggagtcagatcatttctctcatttaagaaaacaataattctagaaaatgacttttaagtgacaggtggtaaaatggactgtcttgagtatgtgcttgatactccaaactttaccagtctgcactgagaaggcaaaaagaatcagtaactgttatgtaatatttttaatacttcctagcttgtcagtataatgccattgtgaatgctgtgcaaccatgcaaaataagtacattgaaatgtagggattcagatggctttttagtcatttaatgagcaataggaatttttggaatttcaaggaaagtgttaccttgccagaggacttgctctgtattgctagggagtctcactgctcaggagactgaggaacagagcagggcatgcagcctatcattgccgtggctgcttagaaggaagcagcagcaagcaggcatgagaggcagcctatttcaggggttgcaaaagaaacacatggtccatggcgcttaggggagggagcattcacatcccaggcggacaccaggggaagcgcctgaggttggtggtggtttcagtaggtgctgaaggccacgagccattttrgccggtgcatatggggaagggagacaatcatgacatgggcattcctgataaaggaggccaccggagttgagggttagtggtagggaaaaaaagagcagctgttcgagttttgatcagctggagtgtgcgatttagtccctggaagagaaaggggcttgggcccgtgtggagcactttgataggctaagtggaaccctgattttgtgaaacttaataaactggtgctttagaaaggtgggtccaggaatggygcctagcgtcaatcagagaagataagttatttaaaagggaaagtggttaaaggctgttttaattctccaggaggaagatgctgagggtctctacattatgtccattgtgatgagggtggaaaggagggccaaatggcagagatattgtccagacagaggctggctgaacagcagggataaaggagagagtggccataaagcctagtggcttgcaatgcatatagtataacattcaagggccaggcacggtggcttacacctgtaatcccagcagtttgggaggctgaggcaggtggatcatttgaggtcaggagttcaagaccagactggctgacatggtgaaaccctgtctcgactaaaaattcaaaaaaaatgcaggatatggtggcccacacctgtaatcccagcattttgggaggctgagacaggcagatcacctaaggtcagaagtttgagaccagcctgaccaatatgaagaaaccccatctctactaaaaatacaaaaattagctgggcatgttggcatgcgcctgtaatcccagctactcaggaggctgagataggagaatcacttgaacctgggaggtggatgttgcagtgagctgagattgtgccatttcactccagcctgtgcaacaaaagtgaaactcctgtctcaaaaaaaaaaaaaaaaaaaaacaaattagccaggcgtcttggtgggcacctgtagtcctggctactcgggaggctgaggcaggagaattgcttgaacccaggaggtggaagctgcagtaagctgagattgcgccactgcactccagcctgggcaacagagcgagactttgtttcaaaaaaaaaaaaaaaaaaatcagaaggcataaatacatacaggatgaaaaatcagcttctctcctgtctctgtccttcagctcttacctggtcttaracattttcttatatatgcatgtatatgcataaactacatttatatcgcatttctaaaaggtgtcaggtaccattcacactattcttgtttttatcctttaacagtatatctcacagataccctgtatcaaatgtatcaatacatgtagaggtgccttattcttaatttacttagccagtccccaatcaataaaaatttgtttcctgtcttcagcttttacaaattgtttagtgaatataatatcctcattcaggcatcattttgcacacatacaaacaggtatatatgtaggtttaaattattgcttgccgaaataaaggatatatgcatttaaaatgttgatagatattgtcaaattatcttctacaaaggtttttaccagcaatgcctctttcttagacccttactgatagtgttatcaaacaatttgatctttcccaaactgcacattaaaaatactatctaattgtcatttcaatttgcatttctctcatgaatgctattgagcaccttgttacagctttcagaggcatttgtaattcatttcgggggatcgttctgtcattagctcattctcattttgctattcagaggttggacttatatggagtgctggtgatggtttctcataaatcactattctggagttttggtggatatattaaggcaacagtcttcctattttattaaaagtttatttgtcttaagagggaattttaactttggtccaatgtctggggagctgatggtatgctgtttctctttcgatcgtaggacaagttagagaaatagatttcctatcttgaattatggggtgtgtgcctgcaatccaccacctgctctggctgtcgtgcagtgttcttccatggcttctgggttctgtttgttaacattttatttgagatttctgcatatagatcataaatagtgcttatgttttatatgttatttatcactggaactacttttcagagatcaccagtcgccttctggtgattacattaacactccctcaccttgtttactgtcttccatccccttcaactcatctgtggcatttcacaccctgactagtgttctcatttcaccttcttgaaatgttctccctcctcttctgtgatgtgaagagctgagctctgtggtccttggtgggtcttcctcctctcagcgcttctgtcttctccccagagcctccctccgtggcctttcgactccggtgatcactggcatgggcctctctcaagcattgcttaacatgttcatctgcatggcctgccatcacctggaactcaatgtgtctgaaacaaactcagtcgtcacccccaccccaagtcagcttctcactcaacctctaacgttttgttaaggatcctggctccagcatgtgtggagtgccttccatgtgcctggctctaagaagccaggtagcaaggagaaaaagtgacagcaaagggggcaggcaacaaatacagatttcaagagacttgaagcgagaaagaaaaggccacaggttggagagggagaggctgacaggagcctgatctgtctgaggtgcagaagcagtcagggtgagaagcatcggatgcagtgacggaagaggccaaagggagcagtgtccaggaggcgaccgaggggagcaataagctggaggaggagtccagagggagaaggggaggaaggcaggatctagagagactgatgggggaacaccagctgccggaggatgaggcctgtgctgagaagagtggggtttggttcttgaggagaatagacattttaagtcctctgaacatttttcttaatgtgtattatacctttgtgagcaaaatgctgttctcagctacttttgagagactcgtaaagcgtgtaggaggacacggaggaccatgggggactcatctttgcacatggtgggtgctcgcagttattccttgaatgtaaggctgcatcagcaagtgcattctctcttcaggcaagactgcttttcaaatctctccattagcagttccatatcagcagctttagggcaggtagagaaggcgttcatatctcttgaaatgtcaatcaaaccatttaggtcaagtttcagtgtctgtctcagtgatgttatctctgtgggtagtaaggggccatgaagcccagctagcagtcaccctcagcactcctgagaggcctcgcggcattccctggaattcctcagtcttgggtgctgcttctttgcacggggcttcttctctccagttgtttgtcccaattgttaagaaagttcatacctgtggagaatatggttcttcactttgctctgtccttcccacccacggtctcatacacctgcctagaacacttcctctgtttgcatcataacatttcacatgtgatagctgttcccttcttatgtctctttctccaggataaaggtaacctttttcgctcatcttctaaatacttgatttccagacactttaattcataggcttgcatttagtacactctaaattgaacattggattgattgttgtcagtggggtcaacactgaccccttgttcctagatagaattataatctgactgtccatgtttccttatagtatcctgtggtgcttatcataagggcactaagtttttacttttttttggagacagagtctcactttgtcacccaggctggagtgcaggggtgtgatcttggctcacctcagccttgaccttctgggctcaagtgatcctcctgcctcagcctcccaagtagctgggactacagttgcatgtcaccatgcccggctaatttttgtgttatttgtagagagggggtttctacatgttgcccagactgttaactcctgggctgaagtgatttgcctgcctcggtctcccagactgctaggatcataggtgtgagccactgtgcctgaccaatctgtacttctattcagaatataaagtgtgttttactacccatgctctatcactctgtatgtagaaataaattacgtatatgtgtatgagtgtgtgtgtattatatacataattatattcaatgcgatttataaaatacatgtatgatatgggtaccaaatacattaataccatataattatgtatatagaacatgcataatgtatactttattattatgtatgtaacacatatgttggcatgtgtgtatgtgtgtgagagagaacagtttctatatgttaaataatttccatgttaattttggtgccactgcagaatctttctgagagtgagaaactcctcccggggcatgttcgcctctgaacccgtagtgcagaaagcctgacctcatcagacctaatacaggaagactcgctgcacttgtggccctgggcctggccgcctgtggagcacagagcatggccattgccccgtggcttggctctgttgagggctgcctgttagctccagctttactggtagcctggttagctctttaggtaaagagccagacaagttcaatttggttttggtgttgattctttccaaagcaaagcaaatttcccgggtgtgatatagtgttcagatttgattttgcatgttgagcccgaggcattcctttgcctgacttggcttctcagctctgtttgtggggaactgggctgtagacatttgctgtggaccttgtgtcagaggtggcagtggtgctagtggggaagagagaagagaaatggtggagtggtccgtgttatcatcctgttctagtgctcagaactgctcacggaggtgtcctcagcccatcccacagcctgttccttcccggccgcactgtttcctctttttatcctgattctctttttggcactgagagtggccatttttccattgcctgtttcctcttgctctcccgtgtccctgaaattagcctgcccctggcctggtgcgagcccaatgaggggacattcgggctgctgttccttcatgctttctcccacctcatagcccttccccgtcccacagaaagaatcttagagagttggcctactttctgtcgatgctgctcccttggaggacctcgtagaatgccacaaattctgtatcagaaatagctctgtttatttgaatggttggatgtcaccctcttccagaaaaacactgttagtacacacggggaattccttaagatgcggagctcttcttcaaattactccagccccatgtggctccagttgtttttttcaagagatgactcatctttgtggccacacttgggaaatttaaagctgttcactctactgaagacagaggctggggatgaggaaaacagtcacagaggcctctgattattattaaggtagtgcaggtatctgtcatgttctcctgtaatattttctcttttcctctcccttctgtcatcttccttcctcccagctgccttgttcccagagccctcctcatatttatccagggagtgtcactgcatccaacatgtttgttcccatgttgctcgttggcaacgtcacagccaggactgggtgacaaagatctcctctgggtcttgctttcccactgtgctgagtccagtgatcatctttcatgttttgtccaaccatctgccctgagatcttgctgtctacttcttttgatgtttgtagtcaatagcttgaagtgacttcttcttcttcttcttttttaacctcagtaaattattacaaagcaaataccctgaccatcctagtcaaaaaagaacattacataagcattgagcctctcccaaacaccaatccctcctgctttccaagagggaatcactatcagaacacttgggatcatcacttctttctggagcacctcgtttgatacctcattgtgaagtccaggttgttcttctcacttgtgcactgtacgaatcaccaaatatactttctaatgctactgagtttgatgagaactgttctagaacacagccgtgatctgtggttttgaatatatgtggttggattctcccattcattcaacaagtatatgtacgtgctgggcactgttgtaggtgctggcagtatatggaggtgcggactggggacaaaatccctgctctcatgcagcttccattcttctcatggagctcaagaaaatgctcttaaaagacagagaattagaaaaaatacctctccactggctttttaagacataggtgagaggaaacagctattgttcagtctttgccatcacttcattgattctgattttaagcaacccagtttttgagtctggtttctccatcatgaaaatgttgcaaattttagggctgttgtaaacatatatagctgtagatcaagtcatttattctaggttgaatttctaagatattcarctctcaacattagaatcattaagaatattactcctacatttactacactttcttcacaatcagcatgcccttagagtgggagaattttgatgattgattttagcattgataactgaaatattttttaaaatggaagaaaatgttaataaaatattttgatgacacacttaacatgtaacatgaatcaaattccagatttaagccaaaactcaagggattacatttgagttttaatgcttaraagtttgagtactctatgctttctaccagtgctccaaagactggaaataatagaattgcttgtttatttgccaaatcaggcactggttttgttactggaggaaggtgtccaggttcttggcgttttgaacaaagaattagacaaaacgcacaaacaaagcaatgaaagaaaaccacagattttgaaagtacatgccacagaatggaaaggggcatgagcaagtggctcaagagcccagttacagaattttctggggtttaaataccctctagagggttcccactggttacttggtgtacactctgtgtaaatgaagtagtggtccacgaccagtctgattggttgcggaaagggactaatgagaggctgaagtgaagttacaaagttacactcctatgcaaatgaagacttggcctgtgaccagtctgattggttgcaggaggggactaatcagaggctgaagtgaagttacaaggttatactccagtgcaaatgaagacttggcctgtgaccagtctgatttgttgcaggaggggaccaatcagagatactttcaatttttcatctgccacatggagaagagcagggaggagtagcctctggttcttttgttacttgggcatggaaagttggggttttccttttgatttagttgtaggaagtcagtgtgaattggccttaggttccctgcctccaaaccctattctcctgcctcagtttgaattcttgcaccagagaaaatccaaaacagaaggaattccactcttttgtgttcatggttcttttcaaaagctagttagagagtgtaaaattttcaatatttatattaaataatggtgttttaaagtgtaaaatagttttggacagaaataagaaatagcttgctgtgtattacatttcctgaaactacaggaaagttgatttttggtatattttgatatccatacccttcaacaaaagtcttaagtcaatgacattttacccccatttatctgttttgtaccgactactatggcaagtgactgtgtgtgtgagggaaacagtaatgcttgacaactcatgcttcctgatacagaggtttctctaggtaggtagttcactttttgtacaaagctggcaggttctgtggacagaaaccatggtatctcacagactgcatttaagttacctctgagattgcaaactccatggcagaaaagatcacagcaatttgggtatctgttttaaattgacaacttaaaatgcacaatatgtttatttctaaattttcaaagttagaaaacaagacagcctatattaaataatataggaatttttaaagcagaatgtgctaaatgtagaaagtagctcagtttttctacttgaaggacaaaaattctaggttgacatactcctattttgatgacctgtgattggttgatgagctcaaccttagttggtagtatttcccttttatccccctgggggtggctttaaataattctagaatggcagcactgtgttaatctttggtttgtttgttttgagacaggttctcactctgtcccctaagctggagtgcagtggcacaatcatgggtcactgtagcctccacctccttccagccttccacctcccacctcagcttctccagtaactgggatcacaggcacacaccaccatgcccagctactttttaacttttttgtagagacagggtttcactatgttgccctgtctggtcttgaactcctagactcaagtgatcctcccacctcagcctcccagagtgctgggattacaggtgtgagccaccatgcctagcctgtgctaatcttagaaggaaaatttctttccaaatgtcttcttgaagcatatagtgtatataagaatctacctgtatttttgtcattttcatacacttcagaaatagttgtagaaactttatggtgcgatgtgcatttaccatgaagaacaggctttgttagcatttacctaataagttcctagtcattttgattaattcagtcttgttgacatgatctcatataagatctaaccacaagaagctggtgcttaacctcgatcctctcatttatcattgggattttagtaggatgctgattttgaataagttgaacaccttctaaacttttttccaaaatccagtgctgctaaaaacagttctctgaaggtgaggtcctggagagttaggcgggaggtgggtgaagaggctttagaggccgatggtgatcccaacttcctaaactatccaatttgggggaaagaatcttctttgatttttacaatttttaagaaaatgaagtctgagatctttcttacaaaaaataattatttagtctttctggtactgataattagtgagagatttatcaatcctttttacccttagaattaaatattgaatagctgagtgtgttggcatatgcctatagtctcagctactagagaggctaagacgggagtccaggagtttgaggctaaagtgagctgtgattgagccactgcaagccagtatggacaacagcaagacccatctcttaaaaaaaaaaagaaaaagaattaaatattgaatatatttaatgaagaatcaggtttctttatgagtattcatttgttaattttacaaagatgtgcaaactgttgtatatacaaagtctaataagatatactattttattactccaaagagtgcatagtctgtaggggagactaataagtcaacaattacaataaaaattgataatatgggtgatcattgttagataggtagacagatacatgctgtgaggtcagaaaggagggttggttacctaacccagacagatcgagtcagagaaggttttctcggagtgggggttgtcagaatgaacaggaggtaagcaggtgaaggggctgggagacctttccttggctgagggagctatgtttgtatgacacatgtgtctgtatggctgatgtttccagggaggtagttgatgacaagacatgagattggtcaggtattcaggaaataaattatgaaggcaaaagactttagatttttctgaagagttttaagcagaaaagtgacctttaagacttctgttttagatcattttgacagcagcctggagagcaggccagaggcatgtgtgtgaattggtggcagagaactacgtttgtgttgtacttctggtaatctcagtgagagatgatgaagtcttgaactgtcagcaatagacaaaatggagagatggacaaatgccagagtgatatgggatttggaagtaatcaggcctggcccctgactggatatgaggaattgaagagaaggaagactaaaggatacctcccagttttctggattgggtactcaggtggtggttgataccattcacccaggtagtaaatgcagaaggtggtattagatttggttgtgttgagtttgaggtacctgagggacacccaagtggagaagtcctgcatagacaggtgcacctgtagcctggagcttttaagggagactggtgttggaaatacaaatatttaagagaccttggtgtataattggcaattcaagcctattatatttgtaggtagatgagaccaaaaaaggatatgtagtagagggaggagagggccaaagatggaactctggggttattcagtgatagggatgatggaagatccttaaagaagatgagtaggagcgttcatggaggtgggaaggccagaagagaggccacaaaaactgagggaaggcacagttctgaagagggtgcaaccaatgtgcaaccaatggcggccaatgccgcacagaattcaagtaagaaaagcactgacaagtggctactggattgagtaaataggagggtattggtgacactgttggaaatagctccagtgcagtggtagagcagaatccagaattcactgggttgagaggtgagaggtgaatggatgaggaattgcgaacaagaagtgtttagtgtttatggctcagtgccttcttgggaaagaaggatacaaggccgtgaaagagggggttgtagctatgaagggaggtttgtcaagagaggggatgctttttgttttagtaggagaaattatgtgctgaaatgagtgagccatgaggctttggcctaggcaagaaagcttctgcttgcatccacataggatgtgagcaggaaagatggatgctgatgcaattaaggttgcatgcatgctaggaggggaggaggtggggatggagggattattacttgaccattctgtatatctacattataaaagatggcatttaaaaccacaacactgggccatgtgatttttgtggtgaagagactagcttcactacaagaaatttggatgatttataaatctctaaaccccaatgggagaaaagttattatttaataatatcatagatattcacttttatttaaagagtcttgttagaaaacaaattagaaactccatgtacgattttttttgttgtcgttgttcatcartgagaaggtttgtttaaattatatccctgtcattggcattttggaacttgaggacaacagaactgttacaacaggaattttagagccaattttgaccacagtgaagtggctgtgaaggctgaaggccaagagcatgattgattgggtgattagaattctttttaaagcaaattagaggtggcaggtctgccacaggtgagaagtactgcaaagaaatgaatctcattatyagataaaacttcttagatcatcaaaaaagaagtttaatgtttaaacttaaacacacacacacatacacacacagcacgaatgacctgcatgtgaattcctgtttgtgattattatacaacctagcatctagcctgatgttctgtatagttataaataataaagaggtatgttttatagttaattcaggaacaggtgccctaattgtgaaatacatttatcagttcagtttagccacttattgtatttggggtcttcttgatgatttaatttgtgactaggcatttgagtttcggatccttggtgtaaaaggaggtggaggggaaggaaggaagccaggaccagtgtttagaaagggaaaagaggagtagaggacaaagaatggagaatgatgtgtatgtggtggtgtgtaggggaaactctctaactgcgtttttcctctactcttcacactacaacaatcatcaacacagaagaaggcttctgtggccaaatgtgtgggttttttccccatacaccaagtggcaggcaccggttggatgtcctctaattcagttctgacactctctacccagagatagtgtcagatcccacaggttgagggcccagtccccatgactgtccccctcgctccctgacagtcacaagtcctggcctcttgaacttctgactgatgacttcctctttgggtgtggttaattttctggagaggctcacgggactcaggggaaaacttatgattactggttttttataaaggatattgcaaaggatacagacggagagacgtgcagggcaaggtataggggaaggggtgtggagcttccatgccctccctgggtgttccaccctccagggaccttcgtgtgttcagctatcaggaagctccctgaaccctttccccttgggtttttacggaagcttcatgacatcagcattccttcccccaaagtatagggtgggactctctcatggaagggtcttaagacccactatcagaaagctgagggaacatacagtcaaaggagggcaggaggtcagaggcctgcccctgaggcctaaaacacccaacatggcctaacacacccacaataagggctgtgggagttatgagccaggaactgtgggcaaaaaccaatatacctcttaacaccacagatcgggggtgtgtctcagtcttggagagtggcacgaggcagcagtctgtggagagctaggatttctcaggaactaatacacgctacacaccaagctatgtgccgtcatatacgttatatcctcacaataacctagcaaggtgagcagtgaaattatttgaagtttcaaaggaagaaatgaaaggaggtgaaaacatatttttaaaagatcttttaaaagtaaagaaaaatagtgatgatgatttgtgttagagttagaaattatttcaattgtagctcatggtgttattctaattttttttttgagtcttaggtgtttgagtcaaaagggctaaaattggctttgaagctggtaatctgatgctagctgaactctccttttgtgtgtgcttggaaatttaataataaaacgttttaaaaaggatcaagcaaataaataaaatagtcttggtaatgataaaaatgagagaatatttatgaatagcaaggggactttcttctctcttctgtcagatttataggataaccatagtctttgaaactatttttgagccaaaattattaacaagccattttggaaataaagacagtagaatcggttgtttttaatgggttgtcttagctttatataaggtgaagactcagttcagaaataggtggcttcttcatcttcatcctgttgcagtgggagttttctctaaatgaaggcgtgtttatttatgctggaaagaagcccagggctagaaatgttttgtcgcagaaggtatatagctccaagggggagaatcagagtctaggcagtgagcatcttttcacgtaaaacactgtggcagggaccgtggggagctacaaaggtgggaaggtaagatagcagtgataccatggagggcttactgtgtgccaggcgcatgctaaacacttcccgtatgtttaatcctcactgcaactctaggaggtaggtactattctttctcattttttaatttttatttttaattgcggtgaaatgtacaaacataaaaattatcattttggccttttttttttttttttttttttttttttttgagacgaagtctagctctgtcgcctgggctggagtgcagtggtgggatctcagctcactgcaagctccgcctcccgggttcacaccattctcctgcctcagcctcctgagtagctgggactgcaggtgcccatcaccacgcccagctaattttttgtatttttagtagagatggggtttcactgtgttagccaggatggtctcgatctcctgacctcgtgatccgcccgccttggcctcccaaagtgctgggattacaggcgtgcgccactgtgcctggcctattttggccatttttaagcatacagttcgctagcattaagtacatttatggtctcatgtaaccatcaccactacccatctctagaactttatcatcttcccagattgaaacttcgtacccagtaaacacgaactccccatcccctctcccccaagcctctggcaaccaccattctactttctgtctctgaatttaaccactctaggaacttcgtatgagtggaatcatacagtatttgtccttttcatctgatttatttcagtgagcataacattttcatggttcatccatgtcgtatcatgtgccagaatttccttcctttttaaggccgagtagtattacattgtctggatagagcacactgtgtttctccattcattcatcagaggacacttgggttgcttctacctttcggctattatgaataagactgctgtgatcatgagtgtacagatatcttttcaagatcctgcttttagttcttctgggtacagacccaaacgtggaattgcttgatcatatgataattctatgtttaatttttcaggaacctccatactgttttccacagtggctgtaccattttacattcccaccagcagagcacaggggttccaatttcttcacataggagataggtaattatttgtccttcactgttacaacagcggaggaagggtagcacagagaggttaggtgagctcacatagctaacatgtgcagacctgaatctgaatttgactccagaagcttacctcctgtgacatacaggtaaggtgaggcacagagagtccaaggggcatgactgagggcccctgcctcatagcatcagtgattcagagcctgccttcagagttcatgttatgaaggattcgtagagttcgctctttttaaataaaaattctctttaaaaaaactaattttggcctggcgcagtggctcacgcctgtaatcccagcactttggggggccaaggcgggtggatcacttaaggtcaggagttcgaaaccagcctggccaacatggtgaaacctcatctctactaaaaataagaaaattagccggctgtggtggtgggcacttgtaatcccagctactcgggaggctgaggtaggagaattgattgaacccaggaggcggaggttgcagtgagccaagatcgtgccattgcactccagcccgggcaacaagggtgaaactctgtctcacaagcaaaaaaataaaaaaaaacccaaaagaacagcaacagcaacaacaacaacaacgaaactaagctttgcatattttatgactttttcctgcctttccaaatttatgctttcaaatgttcttgttatttaaaacatcgtctttaaaaagtctgtagtatctttgatttcccttttatttaagatttttgggtaaaattttgcctttaaataatttaaagcaaatatgcgttggttcctgtggagtttttaaaaacatctccactctacccattcccatcagaagtttacttttaaataaaaccaagcaacagtatctaaagctggatttaggttaggggaagcccggagggcatcgatggtaaacactgaggactttgaacatttagatacagtgaatgttgcagctttatcaacagaggagcaacagctaagaaacttacacatttctctgtattacttttgtgaagaggatatgcattttccctcagagtcacagtggggctgcatggccttgtgaaaatagtgctgcccctggatgatgctggtctgctgggcctgtgtgtcacttcatgtcactgtctgtctccactgcttcttgtwttgttgtcagggagatgccccttgaaaatacagacttagtggcttcctggaccctgcctcatcggggttgcattttatggctgggaagcctggttgtacatggtcctcagccccactcctgrggttgggggtgggtggcttgtacagtgcaccatcttagctggtggttttagacaaacacttgctttagacaaatgcttcttgtcccagcatatcaagggcccatgatcttgcaaagaggaactctgattyggaaggtatctttagactaatctctaattcggtggttcccagctatggcagtacactgcagtccacctggggagcttagaaaaacaatgatgctagagtctcatgtccagagattccagtgtaacacatttgatgtgggccttggtcagtgggatttttaaaaagcttctgaggtgattctaatgtgccatcaagatgtgggaccactactgtaatttctttttaataccttgttctttgggctttaaataagatttttactgtcaaaaaatacaaaaataccaggaggtggaggttgcagtgagccgagatcgtgccaccgcactgcagcctgggcaacagagcaaaactccatctcaaaaaaaaaaaaaaaaaaaaagatacaaaaatgtcttgtcttttcttagggtgtccttattagctgagattgctgaaatttattcctcacatatgaagggaatttcttctattttgttaatttgtggtggaagatcatttttatgtctttatagagtatgtttttatattgaaatgatatagtgtgggttgctaaaatatagatctagtttattctgcagagccttgcgttttggaagataaagagcaactgtttgcttgcctagatttcagtacaagctttagctcactttgggttttgatggcagtttcattttataaactgaagactatactatgtagacatctgtgctgatatttctgatagttcctgaaggtttctcatttagactgtcatctcctctggcgaacatagttataatgcttcctacactcctgtgtatttaaacacttacccttattattaaattagaaaatctaggtgtatctttgaaccatacagtcaatctgagggttttttggtttcaaggaatgctttgtctgagccccttctgggcccctgggatttgtttaaaattacagagctgtatcggtgtaatcttttcttctataacagcaatggctgtcttggactgtggctttaagcttattcggttgaaagttcatcaaagtttggagatgacacttggggttcaggggaaacaagtattctcttggccttgcttttgtttaaaagatgagtttagatgtgccatgttggtttgctgcactcatcaactcgtcatttacattgtgtatgtctcctaatgctatccctcccccagccccccaccctccaagaagccctgttgtgtgatgttccccaccctgtatccaagtgatctcattgttcatttcccacctatgagtgagaacatgcggtgtttggttttctgtccttgtgatagtttgctgagaatgatggtttccagctaaaggacatgaactcatcctttttgctagttttccagtttacagattataggacttctcagtctcgatagtcacataagccaatttccataataaattcctttatctattaaaaaaagattagatataaaattttaaatatttgccttttttatttatatatgagagctctgtcagtagttggagcagaaagtttagatgtcaaatttaaaaatgttttcattttttgttttttatttacctatgattttatttatctatgaggactctgtgagtagttagagaaaggatgtaggatccctggtagatttcctgctgtgtatctcttagagccctcactgagggcagaaaatgattggattactctggtggttgaggacaagaacttcttacctgctccaaaaccttttttgatataggtagaacagagacatatgtgtctctgtgtgtacmtgtaagtatatataacataagcatgtccaaatgttatgtctgtttatagtcatacacagctgctgattcagagtgacatagtggaaattcttcctgacctttgacttggaagggacatctgatggtgatccttattttgttttttttcaaagagaagcacatttgggtttgatatggcattcacatttagataatttcatgacggttgtggggactgggaatgtagctctcttctcacttttatgcagatttttccccttagttaattactgagktgacaggtgtctgtgtggagatggtgggtggggcaggggacactgttggatgagagagacagattgcttagataacagtcatgggcatctggtcatttcctttttctttctttctttctttttttttgagacagggtcttgctctgttgcctaggctggagtgcagtgatgccatcatagcttagtgcagccttcatctcccaggctcaagctacccttctgcctcagcctcccaagttgctgggactatagtcatgtgctacttatacctggctaattttttttatttaaaaaawttttttttgtagagatggggtcttgccatgttgtaaacatggggtcttgctgtgttttgtagagatggggtcttgccatgttgcccaggctggtctcaatctgcctgccttggcttcccaaagtgttgggattacaggcgtgagtcaccatgcccagccacatctggttatttctgaagtcctagaaaatgaaggctgtgcttactgggggtgggagggagtgtttggggggctcttggatcaattggtatgatttttttctwgtctgtagtcttttatttttcttctctataattattattctctggttgttgacctccagggtctggttagttacctatgtcactaagaaaaaggtcaagggttatagaaatgaggcacttacttttctgatgccttaacttagtttgcaacatcctgggagtttgaaataagatggtagcaaagtttgggcatagtggcatgcacctgtagtcccagctgcttgggagcctgaggcaggaggatcctttgagcctaggagtttgaggctgcagtgagctgtgatcgtgccactgtactgtagcctgggtgatagaatgagaccctgtctctaaaagaacaaagaagatggcagcaaagtaacggcaagttctctttcaaagcctagcccactgttttgcagaaggtgttctgccagccccattcttatctccaacccacctaccccatctcctggatcaaagccaaaatcatttctaagggaagcaattgtgaaatcattcccttctatcaagagcagtttgcattgtctccatgcagaaagtgtgcagtttaatatattagggtgggttgcggagtggcaactaatatcaaacaatttttttttaaactaacattctagttttattgaaaatgagtccagcctgctgggtgacagagtaagatgctatctcacacacacatacacacacacacacacacacacacacacacacacacacacacacaaagaaaatggggctaaattggtggaccccacacaagtaagggttatgtcagatgattttggtgaaccatccttcatgttgggaattcactcaataaaacagattaagaagacttggtccctaccctcttaagaacttacaaggagctccttatgttgttggtcatttatcttcttagccatgcacttttccagttaccagtcatgcccacctaccctctttgtcacttacagactccaggtgacagtcttcccacatattggaacacttctacttcagaactttcctctagagctctgctcccctaagtttggtcctaggaacagcagaatctcaggcgccatccaaacctgtgttgttgtgttgtttaacaagacctctaggtgacttctgtctgcaaaacatgttaagattcagattttatttcagtagggcttggtggggactgagattctaacaggcttccaggcagtgcccatgtcggtctgtgcaccacgtggtagatagcaaggctttgctgtccagagagattacatctcccttgtgtcagagagtcgcaaagctgcttgggttatcggatgacatgggatgacataggctaatcaagtacctctggccttggggagttgaagttaaaaaaaaatgtgcctggttattatgtgctagcacagttctcagagctttacttgcacactgaatcctctcctcaatcttaggaggtggacactattactatcttttacagatggggagatgaggcacagggaagttaagtagcttgagcaaagtcacatgaactaatgagtgaaagagcagggctgtgaaccaggcagtgtggcttcggtaccaaggtatgaaattactgtgcacttcctgactgtgtggggggctataactgttggcagggagagtcggctcacggtgcagaaatgagagtgttttggtttgggcagtggagtggttccagaaggcacgctgagttcaggactgagatcagcataaggagggctgagcaacagagagcgggactgtgtggttcatgttcgatggacagggttagtggaggaagaagacacacagggtgccagctgctgaggaacgagagtaaatatagcaaacttttattaagcattcataagtgtcagatactggggtttacatttgttgtttcatttgacccttataatgatcctgtggtgcaggtacaaatcttttagagaaggaaaccgaagttcaagagagtaattctcccaagatcatacagggagaagagtagcttaacttgaattttaagtcagtgccgtctgatttcacaacctgtatgtgaagcttctttgccctgctgcttccctggcagggactcagtggggaagtgaaggtatagaggagagaaaagaacttgagcattgacactagggtataaagaggtgcctggacatagagatgaagggcaagaatgcaagagcagcacctgggactgactggttgaagctggactggagatctctgagattttcctgagtgggactggtgcctggactggcacagggctgaagctgcacgtggggctaaatggccccaaggtgaagtcggttgccatctgctggttgaggcttgttagggctgagcgcacacctttacctcctgtgtcttcatccttgtgtcagctcgggagagccgctcctgccctccctctgagcctgccctccccacgactctgtttcttagacaaatgtgtttgcggccacgctggctgctccccaagccccctgcttctctgaaagtgaaaagttgcttctgcttgccttcctccatctttgtgattattgcatttcttgccacagacatttctcattgctcccaatgtgaaaatctgggcttgtgactttaaccaaatgattgtacagccccatgtgacctcaaataaattttttaaatggataactaagctgacagtatgtgaagtgcgcccggggaattctctgcctcgggatgctcgtaatgaagggaattgactggggttagcagatggacactgctcattttttggcaatcattgaccaagtacgcaacacctccaggtggctctccgtggactgctctgtgtggctcagcccatgatgcctgtgcgtccgtagaatgctaatggtccctcttcctccctgagtaacatagcaggctgcatggtctggtgtggctctgtatccttgagatcaaagcatgcatatcatttttaaataaaagattatcttttaattatagaggcatcatagcagtattacaaaaagcttagaaataaagaagggaaagcacccacatttaccaccctaaaacatggtaatcagtttttaaacaattgttcagtggcttttcatagttgtatcagttgttttgtatgtgcgtttccccttatcactgtataatccccatagttaccatttgaatggctgtatcatattctgttgtgatgccacatcattaattatttaactctgttgttgacatgtgcgttacttccaactttttacagttactaataacagttaaaggtatacatttgtacatgtagctattttcatattttgaattagtctcttatgatagagtctcagacatggcattactgggtcaaagagtatgaacatttttatggcttctaaaacgtattggcagattgctttccagaagagtggaggcaattcacaatgccaccacaaaggcattcgtttcccagatggccaacttggttagggatgcagcctctcacagtacatgagaagctgtgtttatgtttgtgtttgtgtttgtgtgtgtaaaaaacttgttggcgcgtttgtgtattgatttaagcccagggacaccatgcattgcctttgttaataggaatgtactaggtgtctaaggataacataatggtcatccattagtatttaaaatagatgtgtgcttgatatggattaaagcaagggtataggtgtttcctctttccctagaattcggacttttaaaaagattggcaaaggtgagttgacaagagtgttcagccagtgtgactaggttcttagtggctcccttctttttgggaatacctagtgatttggaggcgaaggtggaagtcaaaggagcttggtaggagcagtagtgggagggcactggaagtagctgggcatgcgctcagaagagtgcctattgtggactgcacaaagcacctcacctcacctggtgaggacagtcttttgggtgctgaatggagtgcttgtgtggagaaggattttgaggtcacacctaggctcagtgggaaagatactgtgattaattagcaatttgttctagatctttgtcattgcagttttcttcaatttgttatccagttggattataaacattacatgccttcatgtaggaactgtaccttttaaaattacaattttctacccatttcctaaaatgtctagcacattgtattgtatatgatgtacgtgtatggtagttttgtgtctgctgattgaatgaatgagggaaaatactactttatcctcatagtcccaggcattttatcaaagccttgtgttgaagtagtgggatcccacagtttgcctgcccacatgtgaaacctccagcagacctcacagggataaaggaaaggaaatttcaactgagaaacttagggaaagtaatgccagcagagacctttgactcatttatataaccacccaaaacattgaatgagacctccttgttttatagaggaatcaattcagacaaagaagagcaaatagcttccccacgatcacacagatggtgggtgactggggaccccaagttgggtcctgattcctggtccagtgtcctttcctctacaccttgttgggagaacttggcgtacttgttttgcttgcccctctcccactatagcccctacaagtgtgtatttggagttttctttgctgtctgaccatgcttgtcctcccatgtaactggattaggaatgagtttagagattgtggccttgaggcagtagtcagatgggggtatgaagatttatactgagtgccaagagacagtgccggatcaaaattcaattctattcaaacttacagctttgccttatctccagtttggaatataacctttttttcattttaaagggagaacatataatggtagatgtggtacatgatttgagtgtgtatttgatacaattgtgatcctaataaaactgccattctgatccatatgcctagggtagaggtttaaggttgttaagggagcatgaactttgagcttcttgatttatcttgtgtgactgaaatctaaacstcagtattgcatcaactccggggttgtttttcctcctttctttccagaacccctcacycccaatctgatgagcacatttggttgtgtagttgagattctgaagctaaatgcattaatagtgagggaagtattcacagtgaatgtcgaatgaaatgactgaggagacaaagcaggaaagagaattaacagtctactggttcttttaacagccatgtgatggctgccctgggaattgaatgatttgtagatgactggatcctgctcattccatggtggcttgaggccccttgaaattgatgtgaacctcgtaagctgtcagcagttacagctactgggtaatcaggtttggaatttatgrgtatttacatttcagagggcctttactatgtttctggaattttggattagaaatgcttgtccttgatataacagtattttatgcacgctgctggagtgtttaagccccttcacattcccagtgtgtcccagtatgtaagccactttctttctgggagagcaaaaagatgatatacttaatcctacttttggattagtggacaggatgatttttctctgcttctctactaaactagctccatactgtcttctgtacagtaacaagtcacatggtaaaaagaagttagaagagtcttactgacctgctgttgataaatattttcctacagcatgctgaggtgggcacattttgactttgcttggttttgaaaggattaacattttttaactgataaatacgaatttgttctgaaaaactaaaaaaaaaatggagaaattgagagaaaacttatctaagacccctccaacagaatgcaaaccacttaggacrtttaatttttctttcattcttttttaatgcataatttttatgtagttgtaatctgtttatgaaaatctggtattttaaaaattattacatatgtttttctttgttattatatatttttcctacagaagcttcattttccattgaggggcatttgttaaaatctttacttgctctttccacatgttrtccaatggctcagtcctttacttatcagtggggtgtgagtgggtaatggcactgtccatcagtaattatgactgatgagttggctgtctcttcactcagtggaggccaggcctcttctttcatttgagagtcattgatctgaatggctcatatatttttccaattataaattatcctctagtgggctttttgtgcattagttctttgggatattttttcagagtagaattgctgtccataaaagggacattttcataaggtctatgaggcattttgatattttacacacacgcgtgcacacacacatgcacaatttccgtcgtatcatattgtatatactgttttctgcaagttgccactagtaatctcaaatgtacaaaactaaccatatactacacgtaacattgggtagtattgctgttttaagttcgttaacttgataggcagaaaatagcatcaagttttaaatttcttgacttagtagtgagcgtgagcacttcagcacacattgattagctacttgatttcctgttttatgaactaattcatcttggccttgaagttgtagtggttagaaaggagtggcacctgccagcatctcggtggggcacacggggctaggacacaagctgccgtgcagcctcaggggtcagcctcaaggctcatgacctgagttggcggaaaagcacttacttacactgcccacattgctttaggaggtcaggatctctcaacactaaagtaaatgcttgtttttgaccttactactgcttcaatttgaattggcaactatttgcaatttatatggggattttttaaggacagtagggaaggtgtgagatttttatgtttatcaaataaaatgggccacggatgtgagaattttttcactttttaaaaatggcttgctacaaaattcttcttcctctctttttttttgagagaatgccacatgcaaaggcctcaaggcaaaaaagggagtgatgtgtcccgggaagaacaatgaagccagggtgcctggatgtttacaaggaagacctaggtgaagtcacagaagcaggaaggagcccagtgatgcagacattagtaggtcggggcaaatgctgtggcaaatcaccaaagggtttgagttgcaggcatgtgattcacagaagcatcaccctggaaaggcaagagaggaagcagcaactcccgatggatgcctcctggggaagccaaggcaagaggtgatggtaccctgcatgcttgtgcttcctaaaccatctctggtaaagggccataagtttttatttctaatctgctgtacactgatactgttatagaatataagaaacacggattaccggaagaatgaccatgagcttgaatgtgacagcaatgtcaaattgctacaaaagtttctgtgtacttactctcgccctgtgtccttaccttatcatgcgctggtatcaggtggaccccactttgatagccttggctgacaatgcagctccaacgtctaacaatgtgttgcatattttctgtggatcaagccgtggtatatggctatcaactgtattagttcatttgggctgctctaacaaaatatcataaactgggtgatttataaacaatggaaatttatttctcatagacctcaaggctggggagtccaagatcaaaggacatatttgatgtctggtagggctttctggttcatagatggcaccatctccctgtatcattatagaagaggcaagggatctctctcaggcctttgtaataagggcactaattctattcataagggctttgcccccgtgatctaaccacctcccactggccccatctccaagtactatcaccttggaggttagaatttcaatatatgaattttgggggcccacaaacattgagtttatagcaactatttataccagacaatgtgctgtgtacaagataaacagtgggatatgaaataaaggttgtctctgcctttcagattttatagtcaggttgaattgagagagaagtagatgaatatgaggcatatattgcagatagactctctaggacttagtaatggattggatgtgggagattcaaggagaaggaggactcaaggttaagaggcagggatggggtactctttacagaggggagagagacactttctttagamttggcaggattgtgtgagaktcttgttagtsttgaacttttatcttttagagacatgatattctaatttcataaaagcaaaatgattaacatcctgatgcagatttgaaatgaatttccctgatgacatggtgcctccaggaagaaatctgggtggctaaggataaaggtgggggagtttggaatttcgtactgtgcctatatacctagtcaataaaatgtgttttgaaataggatcttatgacagccaaaataataaaatacctgtggataaatctgaaataagaaatgtggaagatatgtatgatgaaractttaaaacacaaagagatttgctagaagagttaaatggaaaaaggaacaggttagaaaggaagacaatattgaaagatatcaattcttataaattaatccaataatcaatgaaatcctaattcaaagggcaacagagttttgttgctcttgttgtgcagaggaatttggtacagtgttacaaaattcatctggaaaaatcaaattgtgagaataacttggaaaatactccaaaagataagtaatgaggggcaacttgacttactggatgttagatacattatgaagctataataatttaaacattagaactgaataatttaagatcttgctacagaaaaagaaaaaggcacacagatgaatggaacaaaataattgttcaaaaataaacctgaaatggacctgaaattagattatgataatgatggttttcaaatcactagggaaagtaggttttcaaatcactagggaaagtagattttccaataattttaaatgtttaaggaaacaagagtaaacaaaatgcaatatctttatttcattctttatacccaagaaaattccagatagataaaagatttaaacataaaagcataaagtataatttctataagaaaacatgagtagatttattaataattttggagtggtgaaggcctttctaagcaaggcaaaaacctcaaaggtcataaactaataattgttagatttccttatataaaatttaggtttaaggaaaaaaaaaacctacaaaggcagtcaaaagatcagccacaaactggcaattatttgtaatacatatgaccaagaaagagttgccagtaacaatcttaattaaaaaaaactcatagaaataagtaatgaaaaagctccatcagtctaatacatttttgtgtgtgtgtgcgtgtgaattggtagtttaagaaaaaaaatacaaatgctaaaaacaaatgaaaatgtgcagcttcactgataattaatgggaaggtatgttagtgagacatcatttttgacccgtttggcaaacaatcaaacaaaaagtaatctaagcactcatgaaggtttgggcaaacagaaactccctaccaaaacgtaaggtccataggcagaggccctttttaacaaaaaatctatttcactgctatatcctgaaaatagagaaatgtaaggggtcagtgaacatgtggtgagtgaatgaatgcatgaaaatattgtccttggtagagtaagttgagcaatctcacttgagtggagtgcagtttagcaatatcaaaataaaattcctgtgcccctttctccagcaatcccaccattaaaaagttactcttcttctgtgcttccaaaggtttgctaaaatacgtgggcaaggatgcttatttcagcactggttgtcacagcagaaacctgggaacagtcagaacacatcaatgaggcactggttaaataaatcatggtgcatccaggtgatgatatggtttgtagttgttgcgagtgaagaggatttgtatgtgctgtcagagagggaattccagtgcattttgttattaagtaaaaagcaagatgtagtacatgaccctgtttgtgttaagaatcaaaaggagtatgttttactgatagattaaatagatgctgcaggggttccctcaaccccttcaaaagggatcacaggaaacttttaggaaaggtcgcaaaagccactgagttggagatacagaagggggtcctatttcagtcacgtgtgtgtgtgtgtacatttggcatgttttattattctcattatttttaactcaacagttatctgagtatgatgttacagaacttttccctctttttacttctgtgtattaaaacatgcatacacctgcacgaccctaataaatgttccttagaaaaaaatttccataaaatgttctttatttgttgactgtggtattggcctcagatcaaattatttatcctgttttctttagatatatgaagccgtcttaagattgagagtttctcagtttttgacctgggtgtcttatttagctaagactaggaccatgtgctcttttttttggcatggagggtaagtgagaacgtaatggtttgtacttgttgggaagaagcagctcatgtttggatctagctgtcaaaaatgagagataaaaagccactcacagattcctttgttccacaactgtaatgtatttctgattctcattgataataatatattaattgtggcctcaagtgaatttgcccattgtaggtttgtctgggggagtgtaagttagtttaaataactttccgtgcatcgtagaatcttcggtgtgttgaagggttttatgtaatacaaacattcatccacaaaccatatttagacacataaagctccttgatttctaatgaactttttacatgtgtagaatgtctgaaacttacaaataatctaggaacaagcaaataacttgggaccatcttctgaaagtgattcagattatgaattaagctgcagtccttttgaatgtgtctttaactcaaaagggtggcagtttaattcatagcattcatttatcctcagaaattgaagtataaaaattttaataagaatttattttaggctttgcttactattaatctataagtctcatagcttatgtctgtgtagtattttttgtgtttcagaaggccttttttatacactttcacttaaacttcataacaaccttgagaagtagactgaattttctttattatctgaggacttattgtttgatatttgaggacaatattgccagcttagagaatacgttaacagtggtcctgaagattagactaagatagcagaaaaaaggaaatatcaaaacttcaaagatttaactcatctctagccactgggaatgtgcttatggaggagggttttgaaaagtaggggttattcccagtgtgtgttagaaagtgcagggctctctcttcttgccttctgttctgggctcttgttccctaaagaaatgcctctcagattttcaagaccacagtgctaagtatcaattataaggagtccaaccgggactcaaataagaatttgagtgcccagtatgtgcaagcactgtagcaagtgctggaggcacagtgttgaatagcaaagrcacagcccttttttttaggcttacatctggggcttcctgttggtgacttgtggtgacggtggacacgttcctgcccccaaagaatctgggggatactgtcaggtcaatgggcagtcccaataccttgtgttcagtgatataataggggatgtatgaattgctggagagcacatagctatggcatcaaatacaaatttgaggactctggggtgggagagggagaaggagagggagagagagaaaaagtgtgtggtggtactgcagaacaacctaatcagcaaagtacaaccaaccaacaccccctaacacagacttcagtgttgtttacacatatagtggttcattgaaagattaacagataatggcttattaaaggatcatctgaatttgttgttacaaaatcacctgccccttttcatcaggctgggatgtgctaccacattctctatgcagatctcaggttgtctgtctgctgagggctgtccatactcagactaccatcagctggttctagtttcccagtgacttctgatttactgctggctttatagtttactcttagctcctctgtcgtacttaatgcataaaggctcattgacgcagggccgttccttatcattttagctgattcccggctgtattccctaattacatatcacagctttcacaacacagatctgcatttattgccatctaatagatcttttcctgattggtaacttcatatggatttctccagtaggcagtttttattagggaatttttttagaactctactgtaaattgagttgagctattttgggaaggagatttgcataagacttaacaggggagaagtgtttggagggagggaacagcctaggtggagccttagatgtaagaaagcataagaaagtattgaaaacagggaaatgatttttatatgtggtggagaagtggtcataggtgagcctagctagagaggtaagtcattggtttagtgcttcctaaactttgctgcacaatggagtcacctgggaatttagagaaaattaaatttaaaataaaataaaataaaataaaataaaataaataacctcccaatccctggctcctccctaccttctgtgccccagacattgtgacctaattggtatgtagtgtgctggggcattgggaattagaaaagtttctcagattacaacgtatagcaacatttgggcacctctgagccagtttattaagggtcttacgaattatactaaagcatttggattttattcagagagggatttatggcatcgaggaaccactgaaagtctttaaccagcagttctgtaaattagaaagatcattcagattgctttggtgaaaatggatcgaggagtctaagactggaggcagtgaaaccagttgagggtccctgaaggttaaggtgggctgatggaggagggagtggcagtagagttggaaagaggcagatggatacctgggatattgaagaggtgggttcagcagaaccgtttatggatggtgtgggtgtgatggatgggacaggtgtgtgggggtggaggagagggatgagttgagcttaggtgggtgggagcagggagaaagggatgatcctgggagattgtttccttgtttctgcaggggtcattctaccagacctgctgaaccaaggtgaccaagttacactagtttctcctttcaggaggtagctgagaaaatccgtcagttgtttgctgagcacttaccttttaggataaactgcctatggtctgttttcttccaggcagaggtgatgtcttgttcctcctcagtttgagtgggtgtttttttctctaatgattaatcatcttatagctcatttgcatgagacatctgtgaycttgattaaggggaattctcctcacacttgtgacccatgcaggtcctcgtcgatatggggttaccactggctcagtggcctccagagaacttcagatctcttgtgcaaagaatgagagatagttggggaaatacagatttcattactctttcatgtaattgaattggaaatgtatctcacttttatctgaaaagtttttggagaaatgtgaggcaaattttatgtagcaatcgatgttctttgagaaagaagtataacctctgtaacaaaagttcagttgtgttctctctttaggaaaatccagtatacaaaaatctgaatttacaaagcacgcacattctgggtagaggtaattagtggttgatgattttggtaatgaattcttggctttgtgaaaagatgtcctttgagaatcttttgtaaagtaagttttctatgttctttaagtgacttggattttaggaataaatttttggaataagtaacagcctatctgggtattataatgtatataatctactatgtactgttatgmgaatcttggccaaggattaggaagggttaagacccgtttgccccacataatgctaaaatgtcagagaaagggagtcttcttcctttatgtctacactgtctagcctttccccattaacgtggctttggtataaagttttcccatctccttccttgcatgcagcgcctaaagaactccacagtgaaatccaaaccctgtgtgtgacattttggtctgttgacataaatgtaattctaaagtcataaactgtaatgaaattcaccacagatttacctaggtaagcaagtaagttttgaagccaaaaatcacaggagtaaatgggaaattcatttgatggtgagaaaaaggagcaaggagaaatgatcaaatcacaacctaaaaaccaaacaaaatccatctacaatctgaaaaacagcaagtttttcccaaaacaccaaaatctactcttgccaacatattattttgaaaataatgtttgttttatttctaaagcgtatattgatttctctttctttctttctttctttctttctttctttctttctttctttyttcctttctttctttcttttttttggggagaagaaggaatagaggacagcagaatacctaacgcatttgtgatgcgctgcttataaatgcatgttcagaggcaaatgaccatgataaactaccatctaggaaactgctttatttaaatgaagtcatttccctcctgctgccttacasggcatcaacaaatgagttgtgcgtgaggaagggagaagcacgtagtgctgatgctcactgtgtcatcttgcaggggcttcgttatggagaggtatgccgatgctgatccagacagcctaactggcagcctgaactgactaatggagccatctgcatgttggctgacatctggttttagaagttatttataaagaaaggatcgttgtaatcaaaacagccagagaggttttaaatgtcaaatgtactkggaaagattcacttagggtgactggcactgtaggaaggattagcagtttctctaaatgcttgtatgtggggagtgcatttctcctgtgtgtaaatagtactttaagacagcatgttataacaaggtatttgaaacaaacatatgttttggaagttgtgaacattgtaaatgtggaggactataaaactacccgaatgacacattaataagccaaaatattaatgagacaacatgtaaagagcttgaatgtctgtactcctgtacagtaagggaaaaggctgagcaaagtgaaaatcaatgactcttcctagacccatggaagaactgaggtgacagggtaaactgctgccctgagaagtggagagaggatacctggaatgacaggtgaccggaagcagaagtccaagagcagaatcccaccccaatccctatactagtgggaacagataagctgtaattgacgaattgctgggggcccagcatgcactggctttgagagttaaagactgtggggcccagagccgccacactttcatgaattttacttccaggagtctcaccagtgtctcacaaaaatcctacttgtttctggcagagggagggggaaagtaaccattttgaaatatatccacaacaggcttttctctttaacaaaagcctgctctcaaastatttaccaaagcccagcagacttagcttttatcagaatctaactgacccaagggatgggaaatgcccagctcttgccccttctagccttcctgtctccattaagggggaaaagtaaagctgagacccccttgtgaagggcacagccggtacagcccagtacctaatcacactcacctcctgtcacactcacctcctctcacactcgcctccacatcagttaggctcttgcatggtaacaggattacagtgaaaagtaatgcaagggttaaaggagaccaaacaagaatactgcaggaaattttagcctccggcatctacagttacagcaaacagtaaaaacagctaactcctacccagataaacataaaacctcacaccaaaagcctgtttacctcagttctttcacataataggttctgtctagtattcgacaaaaaatcacaaggcatgctaaaaggcagaaagcacagtctgaagagacagggcagcccacaggcccagactcaggcagtggtttttgaattatcagagcagtaatttaaagtcactaatattaatatgctaggggtgctaatggaaaaaggggaagcacacaagtgcttctgcagctcagactctgagttcttggctttcctgtaaacataaattaataccaggccaggctgcgtgtggtgrttcatgcctgtaatcccagcactttgggaggccggggcaagaggattgtctgagcccaggagcttgagaccagcctgggcaacatggcaaaaccccatctctacaaaaatacaaaaattagctgggcatggtgatgcgggcctgaagttgcagctactcggagggcggaggcgggagaatctcttgagcccaggaggttgaggcatcggtgagccatgattataccactgtactccagactgtgcaataaagcaaagaccctatctcaaaaaaaaaaaaggaaaaattaataccagccaaacaaatttttctcagacaaggtttagtaggcttgtggcttgaggagcagtcacaagggagcagcatccaggaaacgggtccctgtgctctttctctggagggcttcactcttgtaattttcaggaagttgaggcggggaaaggagcaacatataggcaggtagaggtggggaacttttcacaccggtgcagttcatgagccacgtgtctcattagcctgttaaatctccacccttgggtctgattttkagtattataacaagataggttgggcgcggtggctcactcctgtaatcccagcactttgggaggccaaggcgggaggatcacgaggtcaggagttagagaccagcctggccaatatggtgaaaccccatctctactaaaaatacaaaaattagcctggtgtggtggccggcacctgtagttccagctacttggttggctgaggcaagagaatcgcttgaacccgggaggtggagcttgcagtgagccaagattgcaccactgcactccagcctgggcgacagagtgagactccgtctcaagaaaaagcaaacaagcaaaaaaaaaccaaaaaaaaaaaaaaaaaaaaccctacaagataatgaggaaaatcttggtggaaggtcagtgctggagtccatcttgtctttagctggctggatctggtcaggtttttatcaggagtgccagagtctcactatgttaccagctgagggtagttgtccagattcttggcatcttaaaagagttggacaaaaagcacaaacaaagcaaggcagcaaaagcagagatttattttaaacgaaagtacgctgcacagagtgggagtactaagccaagtggcttaggctcggttacagaattttcttgggtttaaatactctctagagctttccccttggctcactctatgcaaatgaagtagtgccccatgaccagtctgattggttgtgggaggggaagagtaggtccgcaaccagtctgattggttgcaggaggggaccaatcagaggtactttcatttccaacagccagtcagcaactgccatgcagaaaagggcgtggttgaaaaggaagtagcccctgatatccagtcagcctgcatcggccttaggttccctgcttcccgaccctattctcctgtctcagcttcagcaacctgggaagaagtaactcaaggagatgaatagttaggttcttccttatggttgggaattctgcttggtcagctatgttaggaggggttgtgagagtagatagctatccagacatgagcaggtggagaggccccctgtgccctcccaggaatgtcaggtgaccatcaggtgatagtcaggaagttgttatactgtctctctaaaataataactggtcactaccrgtgccagggaaaggcagtctcccaatagatagaggacacctgagctgttgaggagcagcttcctgatgggatctcaggagttgggcaagtgggctccagcatccacgctaagaggtaaaatgatggagtttaactggtatatagccttcctctaggaacactcgactggtaagggaaaaatgcctcaaatgagcacttgcacaacgtcagtaaacacactatgcatgtggcccctcccaagtgccggcaggccactgcgtttgcagacagcccactccaaggaaaaattaagggaggagaaatgccaactttggaccatgccaatgtataaaaccccaagtcaagggtgagacagtgctgatggatctctcgagttgcctacttgaccctcttccaagtgtcctttacttccttctgttcctgctctgaaacttaataaactctcactcctgctctaaaagttgccttggtctctcactctgccttatgccccttggtggaattctttcttctgaggaggaaagaatcgagttgctggagatctctatgggttagttgctggtaacgggaagctttytgttacctgacttggatcagcttaaagggagacaagaaggtaggggtgggaaattcytaagcaggaaagcattcaagatgtggccagactgcttctaacaacctatacttagatgtgggaacaaagaaatgactgaaagttgggatttataattagaagggaagcagagtgtaaaagtttggaagatttgcactctgccctctgcccatgtgggaaagaaacaaaaarcaagtgctttccagaagatgttctttagaacacacaatgcttgggataatgccacttgataaatagatcccaaggtcaagttggtgcaggaaatgcaaatgtccatcgtgactctaaaaaggagaagagtccatgggtttccagaaggtttgggcaacttttcacttgagcgtctggagaaactgtgcataccttgggaaacacctttgcagtgttccagtggcatggatgctccctggctcgtctaacagatggatctccctaacgatctgctgctctccagagagatcaacacaagctagaagcagctggagggaggggctgcagaagtattaatgatgggaggccaaaaacagagtaagaggagctgtccagttgactgagrttcacctctgctgactgcccattcagttgttctgtgctggggaccaaacccttcagctctccaagtgccagctttctgctgtggctgaaaagcacctgcttctttctttcctcctttgcattctttggaccacttaaggtggtactgtgactggcatgaattttaacatcaacatttattttcatagctggaatattggtgggagaaagtaggaattcttgatagggagagaagttagaaaataattgatgtattttggtacctcaagccttgagaaaatgatgctttctaagactttagttttcagtgtcaaagggagtttgttagttcatttaagctgctgtaatggcagcagcataacatgagtggcttttgaacaacagaaatttgtttctcacagttccagaggctgagaagtccaacaccaaagcaccaggagattaggtgtctggtgagggctcatttctcatagatggcactttctacctgtgccctcacgtggtggttgtgggggccaaggtaactccctgggtcctctgttataagagcattaatctcattcatgagggctctgccatttagaccacagcaggaagctggctgaattttgcaagagaaagttacataagattcatctctcaacyatattggaaatgtcagggttaccaatgagggcaggtcatttagaaaggatctgaccttctcttagacatcgaagcaataaaaaaagttatagatttctccaattccataaaggctttgttcttgggtcacttgtacaaagtgatcattgccccagttactctcctgatgtcactatgtaccttccaggtgttaatttcagtaagtatttgacttgtgtttttcatgatgcttagacttctaaaatcctatgggtaaaaagatctttacacatgatggcagatggtgcattgggcttgatgtgttcttgcactgtttgtagacgtagcctttaaggtagatctagaaggatgggtggggcttctgcatgaagaggggaggaaacagtgtgagcagaggatggagtgtcgcctgtgggatgtgttgggggaaacctgcctgtgtttatttatctttccctcttgtcataatttgagtgtggcctctgtgccttgtaggagacaaggttaggactgtgcaggggtgaagaggtaagagtgttcagacagggatatttgcactaagctttgttgtatctacttcatccccattcggtaggtgtcttctatgtttaattcatatcctagcgtcatttttcatccatatagaaatgtaccatataaagtgcttaaaagattgtctctacaatcaaatctggttaaatgtgggaacctccagatgctaccttttccttcttcatccactaaatctgccttatatattgattgcttttaggaagtcaagtagccgtttcccggaatctttagtaaagattaactagatacttgatcacctgctttcatatgggtgttatgacacacacagagtagagctattcacaatttatggtgtggtgggacataagttatgtcttacattattttcaaccagctcttggtgctaaaaccttttgtagatgaggctggtttgaagcaagaattgaagggaaggttcatttattcaccacatgctactggtacctgttatattttaggtatcgctagagaatgaacaataatggtgaccaaaaacaaacacgtgtttacaatgtgatgaggcaggcaagctttcatcaaatagtcacataaatataaatttaacatgggaagcaacctaaatgtccaatagggaaatgataaaataaactgtcattttgttttgacttaatattaggtagccactgaaattgtttccaagaattgtaaaatgattttaataacactggatagttaaaaaagttagattataaaagtacagagtatatctctcttttataaaaacaaattcatgtttgccaacgtatagaaaagttggttatgaaccacaatgaagagtgtttgtccctggtgatatgatgaggaagcactgagcatgttctcattgagtagtttttttttaaccagaatgaaggcagattgtttccattggctgaatttacaattaaatgcattggatgcwttaagtgagggactgaagctttagcatgtattctttttctttttttggtttgtttccttttggttataatagggtgggaagtaaggtgagggtcctggagggctcatcttcttgagtgggacccttggtgttctggtgacagccgtcacacagagggacagtggggcttgcagagacgtgacctttgggcgctaattcccttttattgcctgcctaagcaggattcactttcctctgtatggtgtttattttggttttgattttgtctgctgttttgagacacaaaaacttgtgttcagagggaaagcttcagaaatgcttcccgtgattattagagtttgataagtgagtattcctggacatctgattaccctctttgttattgatcaatgcktggattcttctgattagtttcatcatttcacagcgatagctcccatcttcagtccttaccaaaaacaattgttttatttgaaagctttcttttggaagcaactaatgcattattacttttatcaatttaataacaattaaatctgtgttttcaggttttaatcatttttttattaagcatccatacattttgaggggaaaattaattattttggaagtactcatcatatactcatagaaatagatattggatattatagggcatataatttattttttaaaagatgcaaagattctagatttttctctgatctgtaaaattttccctctcaaaaaagtttttctttgtttatgctccataatttatttattttaaagaccgactgggtcatttaaagtgagagagctttgttggacggaggataatagtgcataaacctgtcttttatgacaccttggacttaaccttctttgtacaatagagacactgagggttggccttaggaagcctgggttgtttttgtattatgactcgagagatgctgaaaaaacctcctactgctttccttgtacctcagattatacaattagagacttaggcttttaagtcttgacttttgattatgagtttctgttaaaatatgacaattaggatgtaaaggagctgccatccagaatcttaccaagatttctaccaccaactgagaggacagaatagaatgacccagtggcggaaggactcattcctgctgggcctgagggaagagctggagggaagctggcttcctcaaggactttccagagctgatcctggttctgtagttgacagagcaggagtattaccatcttggacaagcactgtcattttaaaattcaccttgatcagaaaccgcctaaatccaaagggtatcaccctaatggctaaggtcagcatgaccataaaccacaaataacatcttcaaccagaaacgttccaaactcctccctgaccagagacaattatagccccaagataacctccctccagccgggaagatgccagcccccaagataacttcccctcctcccagagacattccaaccctgtcctaaaacttctccctcacatggaaacatgccaagcttgtgataaagccccctcaccctaaaaccagtatgtactcttagtctgtaagagaaagcgctcctgactgaaatcagccagaagcccctctcaggttttatctaaagtaaaccggtctttaactgtcaagctgccattcgtgtttctttcctcttattttaactcttacagtagtgacaaactctattgtgtggggctgtaaaattatttagaagagagagaatcatgcatatgcatttcacctgcttgaaactggttgggaatttacttctgggatttttttgtttgttttgctgtatcaattaatttataatctatttcacctttctctttccttacttgccaattactggtctttttagggattgtggtattattgtgggaaagagactatttgctttttttttttttttttttttttaaccaaracgttggttacaattccatcctactattctgggaaaatgtggatccccccacctttcaaccatcatccctttattttctcacttattggtctgcttcttgcaagtttttggaaaatgtcagtgaagaaacagttgagcccttttgtgaggtaaatttccatttaccaatgtatgaacagtacacatactctaagcataaatatacaataaactgtgtttgaaaaaactcagctgtttactaccacaacttgatgaaatgaacaatggactgaagcctttccgggcttggctggcagcccctgagtctcagtccccttctaggaagaagtgccccaaggtcactgtgtacttcacactgtgcagggagagagagtcacatggctgtccaccaagaacagatcccatccctcctctgtctcatccctgcctcctgagagcatcatgttgagagacatgccatccctgccgcaggaaagagtttttagcaagctctggcaaacacatctggttccttgtacttctatgtacctcatggtggcagattttgagaaatttcaccatttatcaaaaaaggctttcagtgtttaaaaccttcctttttggttttgttcggtctttttagttaggagggaatggctgaacattgcttggctactccacagatgcacggcagagcagctccttctggatccctcacccccttgtaagctgggagctctggtgggtgcttctcaaatctactttcttttcctgagtcaaaggatagaggaactgctgacatcctgtgagccagagcacctgaaggaaatccatttccagcttgcatagcataggtaaggaaattgccaaagcaatgcatcactaattttgctccctggtgctaagtgcacctagcgggcatgctaagtactgccccctcctgccatccagtggcggcagggactggcatggttcccagtgctttgctgcctgggctgcctgtctgtgcaggggctggtttcagctgtgtgcagcctccaagcttcaagcacaaagaatcacttagttgctgaagagcagaagccacaaacacttctggtagtatatcgtagggcccagtaatcttcctacagctgaagcagcaggctcctaaacaagtctcaggtagaattacttgcatccattatcaagctagccatgaaaaaatggtgtacttgtttatgaacatgcttcaatttatcctttttgatgaaaattttaaatgatttttttctattattaagtttcataaggaagcatgaaagagaaattaccaaatatttgcaatatatatgatggataaattgataagaaaacaacatggtagtagtaaaatgtcaaggataggctgttaacaaaaagtaagtaccaaagttgaataaaaaaattttaagcatcactaatattataaataaatatgaaagcatacatttttaagcatcagattggcagagatggaaaatctcacaatataccatgtcaggaaggaactgggaaaagtaccttctcatatattgttaatgggggcatttatagggacaatgtttatgacaatgtttggcaatgtgtgatgacagtttagaatatgcacactcaatttctgacgtaagaatttcttcttaactcatcctaagataaatggacaaaccccaaaggagactggcccaatatggctgaatgcagcgttatttatttcctgtgctgtcagtggagagcctgctttgcctcctgttccctctgatgtgcaactcactggatttagggcttattcatagccccagagcaagctcaaggtacctggctagtgactgaaaggacatttcttctgttctgagtagaacagtcacagattctagtgcaggggccctgacacttggtgaggaacatccactttgtctttccctgaagcaaatcattaacgtccagcacacagcagttgtgtcagctctgcagacagaggctggcccatgtggctgctgtccccagggcttggtgtgcctgctccgagayccacctacaggtawttagccagggcaggtctggtctcccgccctgactggcaccagccaggattagagactgagtggcctggggctccctcctgtgtcaccttcgttaaagcttcgagttccaggagcagcagccttctccttccacccccttcaggaacaccactggagcctggtggccatctgggtgacctgatgccctcagagcagcagggtttgctccgtcatcatgaatggcatctccatgtgccagtgtcatcagatggtcatcacagtgggttgtggggagcatgaggtagttgtgctgtggatttttttttctagaggcaatatttggaattagaaacctatttacatacacttagcattaatttacatataatcctcaaataacttcaaatactcttctattcaactaattagtgcagctaaccagtgttgtagcccacctcagcattaaggacattaaacgtgtgaatcactgaatagatttctaaaaccataatcatggtaatggtaaatcagcttaggtcgctcaccaatggagctggcaatagctgctccttaggcgtgattccttatgctggagtgatagctcaatttacaaattccagggaaattgtaccttcataacttttggctgaatcagccttccccctaacaaaaaaggaaggaaaagaaattaacatttattatctttcattttataggcctgtgctaatgctaacagttattattctactttaattctgctattcaatacaaaatctacattgtttgtcaaattggtttatgaagagttgaaacatctaggaaaggctatactrtagattttggagattatgtgaagcttgcctgatatggttgggctgtgtccccacccaaatctcatccctaattgtagcccataatccccacgtgtcatgggagggacctggtgggaggtaattgaataatgagggcaggtttttccgtgccgttcttgtgatggtgaatatgtctcatgaaatctgatggttttataaaaggaaagttcccctgcacacactctcttgcctgccaccatgtaagatatacctttgctcctcctttgccttctgccatgatcgtgaggcctccccagacatgtgaaactgtgatgccattaaacctctttttctttataaattacccaatctcgggtatgtctttattagcactgtgagaacagactaatacattgccgttagggtttacagtgtaccactggagctgagtttatctttccttccttttctccttgcttaccctttatcctggagtgagtagtctaccacctgcctcacttgagaatagatagtacaggaaaggggacagcttaaccctctctgccactgaccctgtgttgacttccacttgatgggttccactggacgttgatattgtcctgcacattattgaaatgacatgctgactactggtgtgtacagatgactttcaataccctttggggaaattttaccccttcataggttttttggagagtaggaagaccggttgtcaaacagtaaaagagtacctgcaattcatgtcattctttgcattcaccttaaaatactgatcttaatagatttttgataactaaatgtataccttttgtttttgttgcttttaagtcatttattcatttagartctacatgttagctttggtttatttttaaggaattaggaaaatattttaattttagcaagagaatgctcagtctccctccttgtttacccttacccccaaagcactattgcccctgttggttgagaatgttggtctagggaataattttatattctttataattttacggttatgctctcccatgagttttaagcatgagtgatacaaagttagggggttttgtttgtttttttgtttttaacactaagaccttgaaataggctcctcattagcagtgtcatgtcatgaaagatgaacagcttgagattcagaagacgcaggttctggctgagctctgtgcccctgagctcccatatgatgggggccaatctctgcctctgtttcctaagctgatccctctggtccatcatgtctccgacatccactaaggctacatcttttcattggtgttactgtatggtttgaaggaggactgatggcagcgtatttatggtatctcggtgactcctaccttaaccctgttgacttttaagatttcaaggcaaattgagttaggaatctcttcctagcaagaaggccttgtaagtaagaggtccttaaaaataaaagaaaaaaacctaacatgtagactttttctctgcagccccatgtcctggaaccttctgcttttaacctgttaataatggagttatttcgtattgcagtttgcccagttttgtgccaaagagctcgtttttcatactccttccccagacatgaccttgtaaatctttgccggaggtaaaggattagcgtggctgagcagttcgagggagtgaagtgtcttatctctataactttccaaagtggtcctcttctgtgtggtgggtaggttctgtggtattagagtgctgtgtttcagtgatagtgtagcctgctcgatctctaaagtctctgcttagtgttgtttctatatwaaaaaaaaaaaagaaactgtggctaccaaccaacttataaacaagttgattggaggcaatccttatttactgtgaggtaagccatgtaataaaatattttaaagctaatgtagcatatcaatttataaaacaagccatgtgctttatcttattcagtttctcccaatgtcagagtgatggttcacaattgtgaatggtgattgagatctggaatgaattcaccagtatttttcaattgtctttttgttgccgtggcatggttgatgtgctttcaacctgtttttttgttttgttttgtttttaataaaacttgtgacaacaaatgtatgagtttttaaattttttttatgtcaaccaatcatccaagtctctgggcaccaactgagtgttctacaattcagttcagacactgtctggggttagcccagaccccacaggctaaaaactgtctcaagattacccgcagtagaatctccagttaaatcccatgttatcacctgcagttttgaccaaccagctataaattgggggtccccttggtcacttgctagaaggtttcccagaactcaggaaagcatcgtacttactattaacagtttattataaaggatacaacccaggaggagatacacagggtgaagtgctctgggtgtgatgcctccatgctgtctcctggcacactgctctcccagcactttgatgtgttcaccagccaagatgttttctcaactctgtggttcaggagttttgatcgagctttaattacatcgacatgatagattacatcattggctattggtcattgccttaattaatctccagctcctttcccctttctgttcatgaggccctcagttcttgctgtgatatttctggagacccttgtccatcctgaagctgtctcatgggtcaccaagagtggcctcatgagaacaaaatatactcctagcttcctagaaattctacgggatttaggagttctcaatcaggaacaggggacaaacatcaaattttagaacacaggctgctcctattatccctatcaatcaagataccacagaaattttaggagccccttgatgggaacctgggacagtcagcaaatatatatatatagatattattatatcagagtgtagtatagtgttgtcttctaagtcttatccatcctcacttttttcttttgtgatttccctttctttgaacatctctgagacctacttcgccatgtaggtgtagcgtatgctgcttctgtgctggtgacatcatttggctcagtgttatgtatcccaagaggaagctgtgtttcttatgctggctccacgggtaccccaggaacattgaggatactgtgtggggtgttgcctcctacatggtatgatataggctaggagaataactgtagcgcatcttcatggagttttaacctcactcagctttggaggaaattaaaatgaatgcaggaatattatggagtagcaaatgattcacaaacaggtggcatcagtgaaattttatgttcattaacagatacctttggattatgcatgtttccccagagatatattcgttcactcttctctaatggggtagttaaagttgaggagtcagaatatgtatgtatttgagtatgtagtttgtaaattctacaggagtaaatattactgtagtagacattaattcaataatttttggctgggtggggtgggtcacgcctgtaatcctagcactttgggaggccaaggcaggacgattgcttgaactcaggagttctagtgcagcctgggcaacatggtaaaaccccatctccaaaaaaatccccaaaattagccaggtgcggtggtatggtctgtagtccgagctacttgcggggctgaagccggagaattgtttgagcccaggaggtcaagggtgcagtgagctgagattgcacctctgcattccagcctgggtgacagagtgaaactccgtttaaaaaaaaaaaaaaaaaaagattgatggtcttattctmcatatttttttgagtctatttctatgatattttcagtattttacttagatgggctttaacagatttaattttctcttttattttgcttggctgtcttaatcatggcctttttcattttaatgttacctcattcaaagagtttttgcctgactaatgagttgtagttttaaagtgctatgtgtttagatcttcataatgagagattaacyggagccgtggatcacatctctgggagcattcacatgtcccatgtccagcctgccaagttataccccttgggattccctggccacagggagggatttgaatcacagtgttctggtggctgggattttctcctatctgatcacataagttaacttacctggtgtcttgttcacatttgtctctagttcccctggtgctattattgccaatagtgcaataacaaaggtttgatatgaagatggacatgtgtaagggagagctggggattagccagcccagtttcacctcagctggtattgttactgggtcagagtggggttgagtctgaaaggcagagcgaggtcaacactgacagaatgggactaaaaacaatgtgtgggaaataattcagcattatcaaagtgaatttcagagagcatcagytgctgcttggggcctggggtcacacctctatagtcgctggtcttggagagagggttttacccctgaacctactgccctactctgaacctattgcccgacattgctgagatcatttatgatttccaagagaacttgagtgaggatatgtgcatggtttagtgaattggctcccatttcctgagccctaatatgccatggcacagctgctctagtagtcacggtaaatatgttatttcattgagttttcacagaaagtcaatgaaatagatattcctgatcccctttagtttcagacaggaaactaaatccctgagaggtcacatgatttgcccaagyctcaggttaaatttgggaagtaccagcgctgagattcagacccagkactgtgtaactttagagacatgctctcatcttgctccagtgatagacactgagcacccagtgtgcagcaagcagtgggttgtatgctggaaatataaagaagaatgaagccacgcactttgcaggggcatagcacatcatcttcagcggaatgctaaggaggttccaaaatgacttaattgaaagcactgcataaatgcatgacattaggctggcaatagtttcctgccaatatatgaagtgctaagaatcaatagaaagaagtatatggttataaaaaagaaatgagcagagccatagaaaggctaatggaaagcatggaatgttaagaagctggcagatttatttatgtgagtttggaagatgttactctagcagtttttggctgattttggtgattgatattatacctaaagtagctgagttactccgattaacatcacttgttttatttaaaatcacgctaactcagagaaccttactgttaatacacctgaaggtatacacctatttatgttggatgtaagatgttacagagtcagaggaaacaaataaaacaagggcaatgttatgtggtttcaacaccagtcatctgtatattgcacatgatattgtgcccagggggttagtgatgatatgtgcaggacacatagggcaaacgctttcatgggagggtcattagaatcaagacaaggatgaaccgcattaaaagggtaatggctcagtattaaggagtagagaagagtggatactgaacattggtttttattgagcaaaatgagttattcttagttgacccagctcttaggtttatagaccaaatcaagaatgttatactaatattgattttcttatatgatcttttgaatttaatccataatattttgtcttggcattggtaacctctaaagtgtaccattctgctttctgaatcgccttgacatttttcatcaccaaatacttttttactgttttaatggagttatggcagtgaaattagaaaactaaaagattttgggaacagtcaataattaagcaatactgtttattttggtcttacttgaaatagatggacagggaggagaaagagacttgtgtctcttatggccctctagcttcatacctatcccatttcatctgagtagccttgatgaccattttgcagataaggacatcgtgattttttaagaggttgaatgaatttgctagtcaagatgcagtcagaatttgagcccaggaytgtttctttcaaaactcctttattttgctggagtgtgctgcttcttccagtttgaaatgactgaactgtaatgaccagctagattataaaacatgaagtgggaaagttgtggttattttctgacttacttattttgagcaatgctatcatattaagtagatattttagatagtatggacatgtctgaggaacctcctaccttgccggacaytgaggatttattcaccttgagcagaggcaggcaggtgtctttctgaattggtggtggctgagtataattgagtttcctacactttaaaaactgtactccggccactgttttgattctcttgtttgactggcctgtttgtattttgggcagtcgctagccaggtgttagacctataatttaccatgtaattctctattgacttgagctctgccgttgtgcactttgtacatcatctaccatctactgcatcatccctgtttgcttcaggctctcccagtgtgactcatcattaaatatccagttggaacctcaacctcttccaggaatgcctcctctggcatcctctacatgtgctgttcttcctcctaaacctccaagggacttgatgcctgtcctcttgttaatcatatgctcttttggaaatgtatttatgtttccctatgaatatggtggccctctggcttcatacatttaaaatgtttgtggtcagggatgatgatgatttaaacaacagtattttggaaagtaggactttttttaaaagtcctctcgcattatcacttagtgtacagcaactattgtagtaaaactacttggcagtgtagcggtaaaatagtttaatcacagtggtacaaagggtgcagggagtatggcactcgtacattgttgatgggagtcctaactggcgcactccctcttaggagatccatttggccctatctgttaaaatgtaaaacgcacaaaccatttgactrgcaattcagctttcagaaatttattctaaaaatgcttgcttctgtatgaaaagacataagtatttcctttatagagttactgattttagcaaaatattggaaacaaatgttcatcagtaaggaaacagctaagtaaacatgggcttttgtatgatggaatacttggcaccattgaaaagaatgaggtagatcgctatgcactactgtactgctgtggaaggtcatgagtattaattcttaccagacaagaagaggtgcacagcagtttgctaatgtttgtttgaaaatcaagtgtggtggaagatgggcatgtatacttatacatacaagatgatgatgtaaattgtgaaatatgtaatagttttggggatttagtttaaaaattatgattttattctcctctgtaatatttccccatttgtctttaacataaaataattataaatcacttaatatcaggaaaacaatccaaaaatattatctctccaggaataaaaatattattctgtcaaaatgtgtagtcttggcatatcagccatgtttatcttggggcagtgtagaacaactgcttcccagctccatgtgtaggcaagccctgttttgagaagcaaagctttctatcyataaattaaggttgggatctgatattttgatggtttctatgatggtttgatggtttcttttaagttgatgaaactgaatttggcttcyaaggtgtgtcaccatctcttgacatttgacctgtgaaagcattagttccctgacagcgtatgactgtactctagaaaggtgttgtctgaatttttacttcccaatcagtattctcacttcaggattttcattgctttaagtgactcttgtatttacaaagcccatatccrtttcaattctgctcccatctgattctttgtgatctgtttagcagcccaggcctgaaagaggaacaaacagagagggaaatgagaataagaaatgaattaagtgccagggagggacccagagttaactgtacaggcgctttatattgatgtttcttcttcagtattgaaagcttactatattgatggactctttttcatcttggtatcttgcacttacatattgatgttatttgtttttttaccaatattgaaatgtagaattgattagttagacttatcattcagatagaaactgtttcaagctctttttttgggaacaaatattcttaggtgaatattaacatgttattgagcaattagcaattagttgtaatgtaaatcagttttctgtaatactttatcactgctgtttggtgaaatcaagttttattggatgattcagtgtgtaagagtgtcataaatgagtttttcactattactggagatttaagtttttggagaaattgtgygaccagtaatcaaaaggtataaaacatttagccaattggaaagtgaaaaattattaacatttgatatgtaaacataggcctcattttaatttagtcatattgtcaagtagcaggacgatatgtgtagtagatagtgatacctgtgcttttaattccgttctttttgtacgtctgagttggatattttgctttgtatagaggggaagagagaggaatagattttattgttaagcctgtgctgaatctgaggtgcctccccacttgcccactgtctttctagtgcagactcagaggagcagtggacctgtttcttcagcacagagctctcttaagacttaataggaaaatttgcagaggtataaatctagtggaaccattaattctcagctggattttttcctattgtgttttatttttatttttcagatactaaaagtatctgacaaataaactgaaaggtaagattggcttttggtaaaaacagaaaggagaaaaaaaaaaccttagttctaaatatatcacttcagggttataaaataagacagcctttttttctggaagaacagagacatggcagtctgatggattttaaaagtctcggtgactttattttatacccatataaactagaagctatgagtcttttcaaagtgtttctaaaaccaaagacttttctttacatatgtggatctcataaacctatggtcagataacctattttcaaaagtccagattttttaaaatttatttttaatttttaattttaaaaattatgggtacatagtaggtgtttatatttatggggtacatgagatgttttgatacaggcatgcaatgtgaaataagcacagcatggagaatggggtatgcatcccctcaatcatttatccttgagttacaaacaatccaattacaccctttattttaaaatgtacaattgttactgactrtattcaccctattgtgctatcaaatagtaggtcttattcattcttcctattttttcakattagtttttgaaagaaaatatatgcgtgtgtttcctcatgcactgcagatatttcccacaatttctttttcacccttgcaagtttttgatgtttgtaaacatcagaagttttaaattttcatgtggtcaaatgtatgtatctttcatttggttttgtttacttcttttaaatttcttttgtaaaacagtcattcctcacacaaaatcagttaaagaattaccagtattttttatttgtttttctttttaaacaggtaacaaaactctgtayattctattttggcacatgacaggaagtaaatatcacttcttttttttttttacccaaatagtttttcaacactattttgtatgtaatttattccttctacattggtttatgagattatatatgtatgtgtgtgtgtatgtgtaaatatatatgtaatatgwatatatatatatatggagagtgagaaagaattaaaatatcagagtttgtttgctgtgtcaagtcttgtgttagttttcattattgtggctctcattgtcctttttaagaaaaattcctggctcctgtcaattgtttaatctttcaaacgaacttgggaatcattttcacaagtcgttccccttattttcctctttcttctgcagaccttttcactgtgaattccaggaaaataatttgggtagagcggcattttatactattcaatcttcacatagaaggaatatctcctttttaaattccaattttctttygtggtttcttataaagtcttgtgacttgtttcacataggcccctttatrtatttgttattgtaaaggatgtttttcattattcgctatttactgttggtaattgctgggatttaagctgttgatttctcaaaattgtaagttaattcccttcaccaagcttttatttgttctaatagttcatgagttcattcacttgagcattcaggatataccattgtgttgtggccaaaaacagtatgttggtttcttccttctagtggtcacattccattactgcctgtctaatgttcttacgttggctaaaatcctataaattttagaaatgattggctgtaaagtgcctatttgctgttaggagtgattttgtaactcatccagagaccacaaattactgtgaagaaaggcttctgggaaagcatcaagtttaggtggtaatgccatcttttcatatttttggtagaacaattagacttttagggaaaatctattaaaatagtagatttgaaaacttaaagcagattttaaaatagataattgtatatttttgtcctttttctgtttctggatggaaacttggtgatattgagaaagagaaacatagaatgaaaaaataatgagttcactgattcaaaagtaaaacccaacttttatggatgttgttttaatagacctatagattatatagaataaaatagtttggattttttycactagattcaggtagagttatctttttaaaaaattattcatgtgaatttcctactaactaacttgctctcacgatgtgctgtttttcatttcctgaattgtgtattgtgcttttgtttttactaaagctgaaaacatctatctgtttgctctctgggtgtgttttcgtctccctttctgtactgtttcttggatgcaggtgtgtcgtctttcttttctcctcagcagtcttttgcaaagcctttcaaatgccccacagtcctgagcagagttcatatggaacgtggccttgtccaggttgccttgaccgcagtgactttcctcatgctctttcctctgctctaaaatgctctcccttttccccacccacccaacccacctgcacagaagtttacctctttgatagaactctctgattatctcaggtatgagttcttggatttgcagggcacttcatggcattctctatggcatttagtagtctgtagctttcattctgtgtatgtgagacrtgtttacagtttggcacagttttcatggctatatcacattctccgtgaatctgcagtgcttagcatcacccttgtttgttgaacgagtgagtgcagggctgctgtactttggtgctcagtgccttggaacatgcagttttcttgcgattttcctgtacagtccccagatttactagccttccctcaatatactgttattttcaagaatatattaacgactgtcaagatatgtacaggtatatgctttttgtttttatgggtgtcatatgtggctattggtgaaaacgagttgaaactaaagtttatatttttatatggctttttcatttcaaacattaaaaaacattamaaatacaccaaaaggatcagaaaaaatgcaagatgataaaaatacaactgtggccaaagccaggactttgtgtccagtggcatggctatactactctgtcagtattttatgtcctctaatgaaaaatattgtaccctagtgccaatgtgtaatgttttagacactgtcatgtaactgggaaagtgttatctcagtaacaaacaattttacctagtaaatattcctaattggctcaaagataactatatttaaaatcatgtttaataatatcagtgataatgtcaaaaatgaaatcagggcaagttagcaaattttttgtttatcgtgcataccaaaaattaattcacaaaccaggagacttctttttttttttttgagacggagtctcaccttgtcagccaggttggagtgcagtggtagaaacacagctcactgcagccttgacctcctgggctcaagtgatcctctttcctcagctggcagtagctgggaccacaggtgcatgctaccttgcctggctactttttatatatttatattttttgtagagatggtgtctcgctatgttgcccaagctggtctcaaactcctgagctcaagcaatccacccaccttgacctgccacagtggtgggattacaggcatgagccatagcacctggccaaaccaggagtcttcaaacagatagtggtaagaagcttggctcacagcaacttataaagcataaatgaagaagtacattaatctctgttgctgttattataatcttacattcctttcagggcaagcagagctgtaaaagcttatttgcttgtagatggttggttcacttttatcatgctgacaaggacagagagcttaagtttcgtttatggccagagccagcattttagagaagtcaggatagctgaagtttctcttatgtggctatgggtggttggcctaaggatatgcccacactgtggcctccgtttgatttttctttaacaataacgatattaatagcaaccaaatactsactgagttcttattaggtgcctttcacatctacttatcacagtgacccagaattgatgttgagtctgctttgctatgcatttgctatgcaatgatgaggccatactttgtgataaggtagcaactagtcacctgtgagatgtttttccacatggctttgcctctgtccaataccccacatgtccaggaagcaggctttgttacatgacttggagcatcagcatgtgttcagaaggatgcgtgcgtataccctagaaatagctcaagtttattgattatttattaggtcaagtagaaaattctaactaaagtctactcttggtgaaaggttaatcctactgtgttttcattcctaaggtctcagaatacttttgtaagaataatcaccttttttctctgatcttcatgtaaatacacgagcccgtaaagtttgaagtgattttccttaaaaatcaatcagaattttctggttttttaaaaaatcatttttagcctacgttttcctaatattaggaatgttagagcatcaacagtgccataggtgatacagaataaatgcaaagatggaagtaggtctcaggaaatggctatattaaggtttccgcttctttcagtaggaactctgggagctcccttttgtttccagtcaaggctaagccatcttctgcccttctgcctgggtgctgctatgsttgtaaatgaattggctgttgcggggaggaggaaccatctgcctgggggcttgacagggaatagaagacacaaaatggatgaggaggccgggcgcggtggctcacgcctgtaatcccagcactttgggaggcygaggcgggcggatcacaaggtcagaagtttgagaccagcctgaccaacatgatgaaaccccgtctctgctaaaaatacaaaaaaattagccaggcatggtgacgtgcgcctgtaatcccagctactcaggaggctgaggcaggagaatcgcttgaaccagggaggcggaggttgcagtgagccgagatcgtgctgctgcattccagcctgggcgacagagtttcatatgcacacgttgtttcactttcatttgcctgctctgtggccatggggagatatatatatatatatatatatatatatatatatatattttttttttttttttttttttttttccctgtgagagcagttgttttgagaaaactgtgagaaacttttcctgggagacagtgggtggggtttgacagctcccccctccctcatcagtgtcccagctgctcttgacctgcctacactgcaaaacatcaacaggcccctaatcgtctatgtatttgcgatactgttgtatggttctgattttccactcttatttctgtttccctacttgggactctttgtttttattttttatcatgactttatttatttattattttattttatctattttttttgagacagagtctcgctctgttgcccaggctggagtgcagtggcgtgatcttggctcactacaacctccatctctcaggttcragcgattctcctgcctcagcctccggagtagctaggaataaaggttcccaccaycacacccggctaatttttgtatttttagtagagatggggttccaccatattggccaggctggtcttgaactcctgacctcaggcgatccacccatcttggcctcccaaagtgctaggattacaggtgggagccactgcatctggctaatttttatcataactttatattctgctgcaagctgcttttaattattcaagttaagaggaaggtaaaaaaaataatttccagttcttacctgagctgaaaaaaatgagataggtaatataagccagttcaaattacaktggaagtaagaaaactcagtttctttgtaaggatctgagtagcccaagtagaatcacatgatcatattggaaagcatcttaaagatcataaagattatttggtcatcttgtagaagagggaactgagacctagaaagcaagttaaagtttataatgctagctatttatgagttctccacaacttgacagtgtgactttcatgcaatcagcactttcaaatattaaaagatagatatcctcaaactaccttttctaggcctaattgggacttccatgcatcagctgatgaacaaacattctaatacttcattacagtcaagcacaataatcaacagttgcactttgctaagcagtgtttatttgcacaactatttgaagactgtggtgcatttatttatattagtttctaaaaatgaacagaaatggtaaaatgttctaagtgctgatactaacagccagacaactgagacaatgatggacacagttaagtgactcatggtcaactagaccagttatagaatataaggtgatctgcctgtaatcccagcactttgggaggctgaggtgggtggatcacctgaggtcgggagttcgagaccagcctgaccaacatggaaaaaccctgtctctactaaaaatacaaaattagccaggcttgatggtgcatgcctgtaatcccagctattcgggaggctgaggcgggagaattgcttgaacctgggaggcggaggttgcagtgagccgagatcacgccattgccctccagcctgggcaacaagagcgagactctgtctaagaaaaaaaaaaaaaagaaaaagaatataagctgatctactcagtgcacaaaggggtgaaaattaaacatatcccaaattccaagactacattgtccaagtgataggagggagtgagagagaattgagaaaagatcagtaaaatatgaaatgaaaattattatcagaatatcctgggaactcaaatactgggaaagagttcatgggtccattcgctaggtatacagcttactacaggcccgtcatygacagaaggcagctrgtgccttmcaagaaaacagacaaaacctcattaaaatctacatcactcatttctgccctaatctgtatgaaatgaccattgatatctccttacagttaataatggtagtaataatttattttaccgattagagatggtactactgctgacaaaactgtwgtttattactgtagacaaaactgtacatttcatttatttatctatttatttatttagagatggaatttcgctctcgttgcccaggctggagtgcagtggcgcgatcttggctcactgcaaccttcaccgccctggttccagtgattctcctgtctcagccttcctagtagctgggattacaggtgcacgccaccacgcccagctaatttttgtatttttagtagagatagtgtttcatcatattggtcaggctggtctggaactcctgacctcaggtgatccacccgcctcrgcctctgaaagtgctgggattacaggcgtgaaccaccgygcctggcctacatttcagttattcttgatgtgttttaaaagtgtgcattccataacagttggatataaaaatatacattttataactagaaattgtacacatttttagttctttggaacatgtaaacccagtgttgaacttctgtacattaartttttatcacctttaacaggaatgtgtcgtgactgaaagtggaggatgagctggtatgacatgggttctgtctagggattctcctgtgggagggagaggacctttgtcttggtagctgtctactgtactaatattcatgcctctctgcccaagtctgtagtgtcagttttaccacttgagaatttcagaaatgaagtttacctccccagtccctttaaaagataaaaacaaattagctcaaattctaaccacagccrtaagtggtccttgtgcatggcaatggctaagaatgggcactgcctgcttctgaggtgtcctctgtctttgctgtgagcggcgtgacagctgtgccttccgtgcttctcttcggaggcttgtttctgggtatgtgttcaccgcaatggatgcttagattttggttcaccgaacgacacagaagtcactgcattcgatgtggtgacctcagagcaagtggcctccaggtccagtttatctaagtcagaagctgtgattcaggaaagccactgcagctgtttcctgtagagaggttggccgaggcaaggacctcatcacctgtgggcgtatctgcttgctaataccattgctgcagaggaataggttcctggagacggaggcacacaggcccagagaggaagtgacagggatttgtaacagatcacactgacctgaaggaaggccctgacgtagatatgtccccttttcacattcagagtcgttgctgctgcttctctttatgtcttggataatccaccttggcctcttgagtatactgtacctccctaacctgctgggctgaaaggccaagtgcaggcaactgagtctatactgaccttgagtggtttagggaggaggcagtgtgttatggaagcatctccttgaagcctttgtgtgtatgaaaggacacattgcaccaactgataaaatctgctccactaaccagaggcagtgaagtgagagtgagcttgcttggcttggataactgacatttatccgtcagccaaattcagtggaaaaaagtatggcaattggagttagatctggatttctgatgcttgccagtcccgyttcttcactatgtaaccacagtgcctcgttttctctttctttcttttctcttttttttttttttgaaatagagtttttctctgttacccagactggagtgcagtggtgtggtttcaagctcactgcagcctccacctcctgggttcaaacaattctcctgcctcaacctcccgggtagctggtaatacaggtgcgtaacaccacacctgactaatttttttatatttttagtagagatggggttttaccatgttggccagggtggtctcgaactcctgacctcaggtgatctgcccacattggcctcccaaagtgctgggattacaggcatgagccaccacgcctggccaatgtgttgcctttctataatgtaatattgatctttaattatgatgatgactagatgagacaatgtatgtgaagtgcctggttggcgactaaagaaataatagtataataaaaaaaaaacgccattataattatttttattatgcgtctgttcttccaccagatgttttgctggaggtgttagtaagaagrtaatcagcttttagagatgttcctctttgatctgctacagaggtgaaaaatcttaaaggcaagctgctatttttgattttgaaaaatctcagaaagacccaggactgcagagattgtgaaactggtagttaagcagaatatgtttggcaggagtgtcacttcaccccgaggtacagtaaattaagagcagcatcttgattacagcaaaagttcagttctaggtctcctttacggggcactttacccacagcttctcaggcgcatgtgtaaaacgaagtccacgtgctgtctgttcagaatagaacggagatgagtggtwagagatttagagagcagagtaatttcaggttagtgtttgaatttggtgtttgagagtagcccacaattaaatgctgtaaagtggcacaggaaagtggcttgaactttaagaatgttccctttccaccattctcccattttatcctgagattttccatttgtattaattatctccacagctcctgttgggttatacagtagaatttgaatttctaataaatgtcaaaatcagaaaataggcctataatctttcacaggcagttatgaagagaatggactttttgtttctgaagcattttgtcctataaagcacagaccttatttttcaaatgccttgtcaccagaaaccacgagccattctcattaaaagactctggaggagtactggggatggtggcagggcatggcggtgtkggagagcaggcctggagcagcagtgctcactggccggggcgtcctgtccacctcaccctgactatcagggacgtgcagtcacctagaagtctcttccctcgcaggacccaactttctcatccgtaaagtcaagatattaaaccagctgatctttaatgttctttcctgagttccatttctttgggcatatcatatgaaaaaccactctgcatattataatcaaccattcttgaagaagacatgagtacgtttttattcactgaggcccatagtacttgggtgaataaaattcatcatcacctccagcggtgattttctgtgtatttgggtgtmattgcatcattggagtcattaaaattattttatatgaagggccagtttatacaataaataaagtagaattgctgtggtttcctcagggactgagccctatgtgcctgtttcactttcagcccctgagcatcccctgaggtatccatagagccccatgatttgaaaatttgacattcagggttagatccatgctccggagtgtagcattgtattcttgatccaatcctgtgcctacttttcccaccaacattttattatgaaaaatttcgagcatacaggaaaagttgaaaaaattttacagttaaccttcgtatagccgccacctcgattctacgatttacatattactgtacttgctttatattcacatattcatctgtctatccctctatcctccaacaattcttttttttttgataggtttcaaatacgcttcagaattcctcctaaatgtagataatgataactaattagctggagttcaacatttatttataattctttttttagagtaaaatttccatacagtgaacttcacggaccttagttataccattcattaggttttttttttttttttaattgagatggagcctcgttctgtcacccaggctggattgcagtgttacaatcttggcacactgaaacctccgccttccaggttcaagtgattctcctgcctcagcctcccgagtagctgggattacagtcacccaccaccacacctggctaatttttgtatttttagtagagatgaggttttgccatgttggcctggctggtcttgaactcctgacctcaggtgaccctcccaccttggccccccgaagtgtggggattacaggcgtgagccagtgtgcctggcccattcattaagttctgacaaaagtatgtatctttgcaatttaaactttctgtcaagatgctaatcatcccctttaccccaaaaagtcccctcatgcccctttctggtcagtcttcattcacaccatctagaagtcggtattgttctgatttttttccaaccaaaaaagttgttttatctgttattactttccataaagagagtcatatatattctttgtgtctggtttccttcacttatcaaatgtttttgagaccatttgagattcatccacgttgtgtgtatagtagtttgtgtgtgtgcgtgtgtgtgtgtaatccattttatgaatataccactgtttacccttctgttgatggatatctggactgcatccattttggggctgytatgaataaagttgcagtgaatatacaactctttttcttgtgagtattttttcttggttaaatacctaggattagaattgaatcatgcggtaggtgtacgtttagctttgtaaaacattgccggccatttttctgaagagcttgtaccattttacaacgtcaccaacaaatcagagttctgcgtgttccacatcttcaccgacatttggtgttttcagtctttttaaatttagtttttctactggaacaacaacaagaacaataataataatgatggtgataactaatagtggtattccactggcttttatttgcatttctctgctgactaatgatgtcaaccactttttcatgtgtttatcagcttttttgtatcttctctggtgaagtgtttgttcaaatcttttattgatttgtttttaactgagctgtttgtcttttgattgttgagttgtaggaattcttcatatatccagctgtcagtttgtgtcatattctttgccggtctttggcttccctgttcattttcccaaagatgtcttttgagaaatgtaagattttagttttcaaaaaaatccattctctcaatattttctttcacgattactgctttctgtattctaagaaacctttgtccactccaaggtatgaaagcattctcatatattttattgtacaagctgcacatttggtcactagtctttacatttaggtctttgctgtatcttgaatggatgtatgtgtgtgctgtgagataggagctctgcctgyttctggccactccttcaacacaatctctgctgctgttaccctggcttactggccatttcccaaatgtatatacactcatgtctgtgtacttgtatgttgtgttacttccttacttatttatttatttattttatttatttttttgagacagagtttcgcactgtcgcccaggctggagtgcagtggtgcaatctcggttcactgcaagctctgtctcctgggctcatgcgattctcctgcctcagcctcctgagtagctgggactacaagagcacaccaccagagccagcaatttttttgtatttttagtagagatggggtttcactatgttggccagactggtctcaaactcctgaccttgtggtctgcccacctcagcctcctgaagtgctgggattacaagcgtgagccactgcgcctggcccacttctttatttattgattgcttattatgtgctagcagctaggataggtatcaagtatatagtactaaataaaacataagtaatctgtgccaccgtggttcttgttgtgtagtaaggatagacattaaacaaataaacacaaatgctcttctatgaatatctggtgaagttctttttatcctttaaaacttgtctttatggtatttggagacaaataaatataatctaccattatcagcaggctaaagaagaaaaatcatattatatcaattgatacagaaaaagcacttggaaaaattcaatactcatacaaataaaaactctcaacaaactagggataagaggcaaactttttcaacttgataacatttataaaaatcctaagttaacctcatatttaatggtgaaagactgaatgctttccctctaagattgggaaaacaacaaagatgtctgcttttaccagtcttgacatcatactagaagttctagccactgcaataaggcaaggaaaataaaagacattcagattagaaaggaagaaagaaaactatgtctatttgcaaatgatataattgtctacatagaaaatccaaagtaatctatcaaaaataaaacataacaccctcctaaaactaataagtgagttctgcaaggtttcaggatataagatcaacacatgaaaatccatgagatttctttacattagcaatgaatatgtggaaaccaaaattccaaacagaatatcatttgtaatcactctcaaggaaatgaaatacttaggtatraatttaacaaaacatattggatctgtatgttgaagattacaaaaacctgatttttgcaaaagcatctaaataaatggagagacacgttgtgctcacaggttggaaaactcaacatactgaagatgatagttttccctaattgacttgtaggtttaattcaattcatatgaaaatatcagcaaagtttttttttcttacaaacatcctcgatgatacagttaaaatgattaaacttactaamtttcaacccttgagtactttttagaaatgtatataaatatttcagtaatctttgtattttacacccttgctcttttactaatgtcttcarttagcctggtacatttgatgcaattaaggaaccactattgttacattattaacgaaatccacacttcattcagattttctcgttttttacctaataccctttttccattccaggatactacattacatttagtcagtaatcttttccgggctgtgactgtttcttatactctccttgtttctggtgactttgacaatttaaagaagtacctgtcaggtgtttagtagaatgtctgtcagttggatctttctgatgtttttctcatttttagactggagttatatgttttttttttttttggaaggatcacaattgtaaagggccattattttcatcacagcgtatcatgggtccattactatcaacaaaacttattactgtagatgttgactttgatcacctggcagtgtagtgtttgtcagatttctccattgtacagttattcttcccccacccctttctttactttccccaccttttctttactattccctttggaatcagcaaggtttgttcgttcrttctttctttcttgcctgggactacatggtgtgcaccaccatgcctggcaaatttttttttttttttttttgtagagttggggtctcactatgttgcccaggctgatctcaaactcctggtctcaagcattcctcctgcctcagcctcccaaagtgctggggttataggcatgagctactgtgcccagccccagcaagatttttttatacacaagctgtttttcagttttgtttggaaagacattgtttctagaataactaaaattttaaaagaggttagtcagtaggatcactttaactgatgttcctatctgctatagcgatrgtaaygaaggcactgtggcatttgcgaaaggttagacacagagatcagtggaacagaatagggaatccagaagtagatccccataaatatgcccagtttattttcgacaaaagcctgaaagcaattcagtggaggaaggctacctgcttcaggaaatggtcctggaacatttggacatccctaggaaaacactgtactttgacctaaacctcacactttgtgtaaaaattagcccaaaatgaatcatgtatatatatcaataccattgataattgtgtcaatgtcctggttgtgatattgtactttagtgttgccagatgttatcatggggagaaattgggtaaagagtccatggaattgctctgtattatttaattacaactgcaggttaatctatagttatgttcaaatgaaaagtttcattaaaataatccccttcaaagctaattcctctggagagctggrgtttcttctagcttgttgtatatttgctcatttagtcatttacatactcatcatttagtaagttgttactttctgccaaattcactgataggttctgaaaattcaaaaagtgagcacatgtctagatataaatatttgagattcagagccatatgggtggtaggatattacctcagtaagaatgtataatttcagagagcatcaaggctatacttgtttctctgtattgcatttattccacagagctgtctccaccagcctgtgaactggagcatagggccattatttgttcatcttcagataccagctacctgcttttgtagctgatatatataagccattttatgcaaatatgttgaatgattgatttaatgcatgaatacwtgcttttactttttatgagagcagtgagccatatgaccaaacaaagggactggacagggagatataaaactaatttttctttgtttatagattgcaggaacatatcttttcacagttctatgacaactggacctgaaatttagcaagcccaggaaaatcagtctccaaaacacgtatttgtgatatatttcttgtaatagcttatggaagattttcagctgttctttgatagaatattgacagagattaactgatcccccccacaacaaactacatttcttattttcctcgattacagaagttcagtgcataaaagcagggtgggggaaatcagatggattgccataatctcataagccactgttaattcctttatgagctcttctggtatttttttatagcataagacacacctaygtacatacaaaataaagatgatatcatgagatgtgagtaatttttagctgttttatctgtattgtgaccattgcgcaatgtgaaaatacaatctcaattcacacatcactgcaccatactttattgcagaagccccttagtgttggacagtcaagttgtttctaattaggaatagtaactgtttcttgttctgccgtattgtgttaggggcagtacacttttgctatctctataaaaagatgccaccatgtctaccagagtaaacctctggaaatagagatttgaaaacagcttatctccgcccttcatttatatcaggcttgttcagcccgtggcctgtaggcagcctgtggcccaggatggctttcaatgtggctcaacacaaattcataaacttccttaaaacattgaggttttttttttgtgattttttttttttaatttttagttcatctgctatcattagtgttagtgtattttatgtgtggccaaagacaattcttctgatgtggcccaaggaagccaaaagattggacactcctgatttatatgataggtgatcgactgtcataatattctttgaagttcactttgatttctgggagggagccttaaaaaaaaaaaagcttcccaaccagaagatgagcattgatttttttctgaaatcttaaactctaacttgaagtacgtcatgcccactctgctcaggtgtgtggcttgtcactatgtcagtgcctcatgctggtgctttctttgtgtgaagggagatgcagtgggtgggtcagtagagagcagtaggtgagcaggaagggagaacggaaggcctgaggctttgtcctcagttacctccagtcagcactgcctctgcagagaagaccagctctgggccttggtttcctcatctagtaaatgccctctggttgatctaactcatctctcagtttccgctaactataaattttacatttcttttgagatgtaaatacttgctcgactagccttgagagctttccatccttctgtcctcccttcctccttcccttcctcccttcttcctgtattaatttttatttttattttaactgacacataatcgtacatatgtacggggtacagtgagatgccttgatacatatacattgtgtaatgatcaaatcagggtatttagcatttctgtcatctcacacattcatttgttctttgtagtgaaaacmttcaaaatcccttcttctagatattttgaaattatatcatacaatattgttaatgataatcacccttctgcacagtagcacaccagaacttatttttcctgtctgtggccctgtacatgttaaccagtctctcccaatcacacttcccttctacagcctatgctatccactattctactctttgcttctgtgagatcaccttctttagctcccgcatgagtgagatcatgtgatttttgtctttctgtgtctttcatttcgtttawcataatgtgctatagattcatccatgttgctgtaaatgacaatttaattctttttatggctgaatagtatttcattgtgtatatattccacattttccttattcacttatctgttgatagatacttgagtcgattccattttttggctattgtgaatagtgctgcaataaacatgggagtgcagatatatctttgacatactgatttcatttcttttgggtgcatactccatagtgggactgctggatcatatagaagtcctatttttagttttttgaggaagctccttactgttttccatagtggctgtattaatttgcattcccaccaacagtgtataaggattcctctttctctgcatccttgccaggatttattttttgtagccattctaaccggggcaaggtgatgtctcattgtggttttgatttgcatttccctgatgatttatgatgttgaacagtttttcatatatctgttggccatttgtatgtctcttcagatttttttacctgtttttaaattgtaatatttggkgkttttttttttttttttttttttgctattgagttgtttgagcttcttagatattctgaatattaaccccttgtcagatgtacagtttgcagacatttttttctcatgctgtaggtattccagagagctgtcctttctcaggtgtgatagtgactgtggcagaaccaaagcccaaggcagaaggacaaaccaggcttttcatctcctgtttgctgcttttttttttttttaaaagtgatttcttgtaacagtggtcacagacatatattctggtctaagtgataaaatcttttttttttcctcccaaatcttactatgttaacatctccatctcatctagagattagttttctctccatgtcatcctctggagcacagcccaggactgagaattcaaagcctctaaagataaaacatggccatttcaatcctcttacactaaaaccagacaccatattctctaggtctttacccaatttcattgaaactacttagcattcagttctcatgagcttaattattttgcttcccagatagcttacaacagcatgaaagcctgagactcagaggggatggaggagctgagtactattattataataacagtagaggatctgctgaccaacggaaatcaaaggggcaaaaatgaaaacactaaaaatctatgattgcacagaatgcagattttcttaaaggattactatggtcattgataaaagcttagaatatgtttatatcctctgtttaatagtacagtaacatttcagtggatttctatgctagtggtttcctttttttttttttttgagatggagtctcactctgttgcccaggctggagtgcagtggcacgatctctgctcgctgcaagctccgcctcccaggttcatgccattctcctgcctcagcctcccgagtagctgggactacaggcgcccgccaccacgcccagctaactttttgtatttttagtagagatggggtttcaccatgttagccaggatggtctcgatctcctgacctcgtgatccacctgcctcggcctcccaaagtgctgggattacaggtgtgagccaccgcgcccggcctatgctagtggttttcaagccgtagctggcatgagaatcaccctgaagggttattarggtacagactgatgtgccctgccccagagttcctattttttgggtctagggtagggcttgagaatctaacatcttctctggtgatgtcaatgtcactggtcttgggactgtattttgagaactactgttgtattcaaaattattttaaatgttatttaaaataagtttaaatttcctgggaaacataacttgtgtgtaaaacgtagtccttactaagtaattatttttaaaatattttaattttgtatcctacttcctgtagctcccacctcctttggtgtgaattgagagtcatgggattctttgcttttaaataattctctgtgtgattcttccaccatgggagtctgccctcggtttcctcaatttagagactgtaaatatttgtgatttttccatttttgaatttacttctttctattttcatatttttaattttattttgcttcccttttactgtttgaacccaaaggataattttactttttttaggttttcctttttkttttttttttttttttgagacagtctcactctgtcacccaggcgtgatctcaactcactgcaacctcygcctgctgggttcaagcagttctcctgcctcagcctcctgagtagctaggactacaggtgcgtgccaccatgcccggctaattttttkgtaattttagtagagatggggtttcaccatgctggccaggctggtcttgaactcctgaccttgtgatccgtacrcctcggcctcccaaagtgctgggattacaggtgtgagccaccatgcccagcctttttagatttataatgctgttttctgagcagtggtcataatattcacatacacacacacacacagacacacatgcacacacacggtataacatgcaaaaggttagaaagtcgaatggtaaaacataaatttctttccctgctgtctcccagccacatcattctcttccttggagacacctactatgatcaatttcttgatatacactcaacccaatattattcacggattctgtacttgtgaatttgcctgctctctaaaatctgtttttaacctcaaaataagcacttgaggcgctttcatgggcatttacagagatgtgcacaacagggggaataaatctgacttgcccgatgcgcaygttcccrgctgaggttgaacacggtgatgttctgccttgttcagctctcaaactgtaaacaagtgtccttttcatggtctatgtagtgtcacatttcacgcctttctgtgctgtttgttggtgattttgctgtttaaaaatgacgagacagctaggcgctgtggcttacgcctataattgtagcactttgggaggccgaggtgggcggatcacttgaggccaggagttcgagaccagcctggccaacatggtgagacctcatctctactaaggatgcaaaaaatcagctgggtgtggtggtgcacgcctgtaatcccagctactcgggagactgaggcacaagaatcacttgaatctgggaggcagagggttgcagtgagctragatggcaccattgcactccagcttgggtgacagagcgagactctgtcaaatgataggtagatagatgatagatagatagattagatagattagacagatagacctgaccraagtgctgtatagtgtctctaagtgcaagaaggctgtgatgtgccttacagagaaaacatgtatgttaagagcttcatttaggtatgagtgatagtgctattggctgtgagtgcaatgttcatgagtcaataatatgtattaaatatttttaaacagaaacacacataagacaatattatatactgattatttgacaaaaatgtgaccagaggctcgcaggaaaccaactgtatatttcccctcggagcagcgcttcactgtttgctaatttagcggtcatagcaactttatagactatactgcagataagaagaacggacggcatatgtattatttcttatatgctttgcaatttcaactaaatgattttgtgtattgctaatccttacaacagacctacaaaggttatagagaagtggagggctatttttttttttttttaaacgggaattttagcagagagcacagtatgatggggctgtttggggttaatggaactccgatatgtaggcctgaattccactcttctagcaatcttgccactatgttcaggatatgacttaccatgcatagaacagcctactctgaattataaaataaaaagttgtttgatgtccatcttttcgaaggacttcctaaatgaacttcagtgctgtgctttagtttttcaactactttgtcactagatccattatggggagaaaatggagctttggaaatatcactgtgagttaaataaatggtatcttttcttagctaaacagtgatttrgaaatgtataacataaatgttcataatgggtttactccatttgatttggaaaaacattccttttaaggatagacatattgtccaaaacattgtctgaagcaacttgaggacatactgtccctgacctcaagttgcttaagatctgacagatggactagcatcctaactagtaagtttagtgagtgttttatgtgccatgagtgaagtgtgtacagaagacaattgggaagagagaagagatggctcagttctccccgaggagagcatataggataagttatggtttgcatagaggtaaaacatctctggaattatagatcatgtcaatgggaagatgtgttttgacttaaaaagaaattttatcaagaacttactaggactacatctattgaaaaatgcaaggtaggctaatattcattaggagagrgcaggcaatggaaatagcaggggtggactggaaccaggtaggagtcaggtgaacctggtttgaatcctggtgctgccacttaagtacttttggtcatttggcatgattttcacagattaatgtttgtctttcatagtggtgttatgaggattaaaagaaaagagtaatgaagaaacggcttcatagagaagatgatgctcctttaccatttgtaggtagagaaatatttcaggctgttagactctacttactaattgtgagtgtaaagactgacaaaacctttgtgtaattgctgcactacagtcaagagccaggagtttatatgcagtgacttcatttagagaatcttataaataatcaatttatttagaatattcaggagaacaggatttttaacctggaggctatttcttctgtagcacagtaatgtttttaattgcttaaaatagtttttaatatgtggtttagagagttgatttaaaaaaatttttaattttacttgccataactattctgcttgctaaattgtttgtgggggaaaacttgattctttttcattagctgaatatttttagtttaaaaactgttatatatatatgtacatagtaagattattataaaattcttttaaatgctgaatattatggataattaattatgccaacattccccaaatatggaatatgtagagctatagtttagttaataccatttgttaaaaacaaaaataaatgattttgttgagatgctwaaaaacatgaaggatgattttgatatttttgtgtaagaswgagagagaaagccagagtatgtattgtgctttttccatttattgagaggatttttttccctgatatgttttggaaagcattggtacaaatggatattggtaatgtgaacttaattttaactgaatatatttttgaaagttaaaaaagcaaaagaatgattgggaatcactacaattccaaatacggtgatatctttagacacttcagattaattttgcagtgtytttggtctgtagtcattctcttatgtattcatttaattacagattttaaccttttgacttaggacagcaaaacggatttcttttggaactaagtactatgatttgtgtctaaaaaaaaacttctaaaagttatatttttctatttgtttttgtgtttgtcacaagatatgtttctcatgggtatagaagtttccagtgtgacagaacactttcaaatctctcattcttgaatatatggcatttattagcaaagaatagtattgatagtcatttctcaatcgaattatagtgatgaaaagataccyttttttttttttttttttttttttttgatatggaggcttgctctgtcacccaggctggagtgcagtggtgcaatctcggttcactgcaacctccgcctcccgggttcaagctattctcccgcctcagcctccccagtagctggaattacaggtgtgtgcaactgtgcctggctaatttttgtatttttagtaccggcggggtttcgccatgttggccaggccattcccaaactcctgacctcagggtgatccgcccacctcggcctcccaaagtgctggcattacaggcatgaggcattgctcccggccaagatatctcttcttaatggggaagatggcatggtatattgagataataattgttttagaattgcttccctcactacttttccccccattagacttatttttttaaaaagacattgtctgcacaaaaggtagctattacaaaagaagactgaagtgtcaaaggatttcttgggctctctgatccatatgccctggcactgtctctcataaggcttgccctcttcatgcagttgccaagtgcttgtataattgtcttgacaaatggcatactcattaatattgtgttgggcctttgccaacctgtggaagccatgtgccccgggcagtgaaatccagtgccaaactcttactgatggttataaaccatgccttaaatacgttgttgagaccaatgatagataagtaaatagccatttgacctaaaaatacttacatttatccatggaagccaagagcatttgtgaatggtaaggggctgctggggttctgagctgtagacactctcatgtgccggagctgcagcttcctgccttgagggctcgtcttttgtcacttacttgctccagaatcaatcagaaaaacataccctgatgaaccaccacagaaaagaggttattcacttcttcaaggctgttaaagtgcctagtctagaagcaacgtcattgtatcagggcctgcaatcagttctagaaattaggtacaccaaattctctaaaaattaataattgagtctaaatggatgaaactcaggaaaagggtgtgagatgctctcggtacaactgtatattaacattttctcccaggcatttcatgttacttcaaattaacgatttcaaaatgcactgttcatttgtccttrtattggttgaatggtactatgcaacttgttttttcttgagctcactagaaacaattgtagcagtgtggtaagggagccattcattcatttttttcattcattcattcatggaagaagcagtttctttgggcacttacttcctgtgcctgaccatcttatagaaacaatcaaatgaatggctcctgccctcaaagtcttattttctagtgggagaggtatacatgtctacaggtaattactgcctgggtcatttggcatgaaaaatgtatttctattttaaacatccagcttatttatattgatttcaacaaagctartgggagataggtttgcccggtgcagagttagttccagaatttgtagacccagcatattctgttcttctgtgcatccaagctggcttcctggtgatcttattatttgcgtattacacaaagtccctgtaagaataacccccaagtattctccaaggtagatatctagataatgtgtgaccttgtccctgataattgatttcatttgcccatgaactttaaaaaattttatcctccctctcagaaagaaggtctggataggataaccaggatcaggagctgagcttgtacagtttaaaatttatgatgttatgttagtagaaggagaatgttctgaatttagaaaaattgatgtcagtattcaagacatttttagtgaaacagagaagatcaggctagagaatgcttatattacctgaaccaaagragccacagaaactaagcacagttgaaacttggcgagataggacaatggttttaaagtttaatttaaaatataatgaatgtctatttagaatatttggaaatataaatacataaaatagaaaataagcaccagggataaattgctatgaaatcttttggctagttcttctcatggtttctaaatatgatatgcatgtgtttataggtaggtrtatatttatagagttaagatcatatcgtacatacaattttatatcctgtttatcactttatgtagttgtatcattcaaactcgttgcaaccattatatttaatgactgcataatattttattgtatggtctcccataatttgcttaatcattcccttgttgtgggacatttatgtggtgtataattttttttctgttataaataatactgtaatgaaacttctttgtgtttaacttctgtcttcatttacattatttccttgtgatagattcccagaagggtaattaccctgtcaaagggtatgaacagttttaagtctcttgatagtgctgaattgctttctagaaaggttgcgccaatgacaccctcacgagtaatgcaggaaactgcctgcttatagcccttctctttttgttcatactagtcagcaggagcaaaagcattctcttgacttggctttgtatcagtagaagttaatggaagttggccattttcccaccattgtttagtagaataaaatgtataactgtgttgactgaaccaagcttcattttttcttgatagaaattgtgtgagtattgcatctggtggttatggattgtgcttgaacacttttgtctagtggtgaccatatatgggttatgcctgctcaccattggctatttccctkaagctaattatgctttagggaaatgatcagtccagtacagtttgtgtactacttaatgttttctttacacagaagaatgagggaggttgaaaggactgttgaaatgattataaaactcattcattctaacaacaaacatttattcagtattttactagttgttgtcattgtgccaaagaatgcttacagcattctgaatgtgtccaaaatgaaaaacaagcaaaataatccaaatgtgatccatgaccatgtaacagatgcttcagatacctttcgaaatgttacttcttagagcagtcttgtagagaagtggacttgaccaccatgcccactgtttggacattccaggcagctgtattccaatagtaatgatagaaataataataataatgataattgctgccatttattgagtacctgttatattccttcaagatactgtgctgttttttaccttcattgttgtttaatactcttattaccaatgcaaggtatatgttattttcacgttgagaaatatagggaaagtaagattcagagagagagcgagagttctcctagttcatccttgtcacaaatcacaggatttacttctgtctaaaggctgaataatattctattgtatacatacatcacattttctttatacactcatctgttgatggacatttaggtggatcccatatcttggccattgtgaataatgctgcagtgaacaagggggtgcagatgtctctttgacatgctgatttcatttcctgtgttatatacacagaagtgggattgctggatcatatgttaatagttctatttttaaatttttttgaacctccatactatttcccataatggttatactcctctaaattcccaccaacagtgtacagtggttcctttttctccacatcctcaccaacacttaccttttctttttggtaatagcggttctaacaggtgtaaagtgtatctatctcattgtgcttttgatttgcatttctctgatgactagtgattttgaggattttttttcacatacctattgaccatttatatgtcttcttttcagaaatctttattcagatcctttgcccatttttctttctttctttttttttttttttttgacatggagtctcactctgtcgcccaggctggagtgcagtggcgcgatctcggcccactgcaagctctgcctcctgggttcacaccattctcctgcctcagcctcccaagtagctgggactacaggtgcccgccaccatgcttggctaattttttatatttttagtagagatggggtttcaccgtgttagccaggatggtctcgttctcctgccctcatgctccacccacctcggcctcccaaagtgctgggattacaggcatgagccacctcgcccagcccctttgcccatttttaagttatttgctttcttgctgttgagttgcgtgagttccttatgtattttggacattagctttttcccagatacatggcttgtaaatactttttcccattctgtgagttgtctcttcactctattgagtttttaaatagttctttactgccccttccaaagaggcagccttctttgttttgtttttgctgaccaatttccttccattcttttctttttcttcctrtttctcttcttcccgcgtcttccacccagcatcacatgtagtgctagattatgggcatacgatgataaatataagagagagaggagagaaagagtatgtgtatatatatgtgtttgtgtgttctactctcaagaaccacacaggctagtaggaatacagacaacagcaggtagtaataatacggcatgctaaacattgcacattgagtggtatttgggtccaggaaacaggcccgtttccttctagatgtcttttcccctgacttctgtgctgtggcaccctttacgtcccctctgtcttactccttacatccccttcccttaaatatgataagttccaagtattcttctatcttttgcccacttatatcttgctcttagcctcccatggattcttatatacgcttgtgatattaactcttacgtctatgcaaattacctccaaggtctacatttccaggattaatgtcttacctcatttccaaactataatataactcgaattgccttacagaaattgtaatgtggctatctcattcatactgaacttccattgtccaaatctgtttccctctacaaaagatgatctgaacaaacaacaaaaatccattctgagttctctgtgtcagtgaatgactttattagttcatccgttacccgatctctagaaatctctgggtcacttttaaccctgaattcagctcatcttacccgttacacactgggcaatgagttaattagctgatgaacatgatctagtataatcttttcattatgagataagtattatatttctctgttttacagatgagaaccttgaggccagaagggtcaaataacgtttctaaggatgatacatggcacctaagagatcaacctaggatcaaaccaacattagtatctctgcgaagtctggcctattgcccattatattgtattttctcttcttatagttggtctgattgtttcttttgtaccagtgctaacatacttcacgtccacatttgtattcttgctccttttttgtgactttataatctacatatatttgtgactaggaagattttattaatagtgtagaaaaatttttcagtaggttaagctaaaacagggctcagcaaactctataacagaccagagagtgagtatttaggctttgtgagcaacacaatctctatagcagctattcaatcttaccttgatagcaagaaagccatggcaaatgataaatcaagaaatggctgttgctgtgttccaacaaactttatttgtaaaaacagactatgggcaaggcacgatggcttaagcctgtaatcccagcactttgggaggctgaggtgggcagctcacttgaggcaggagtttgagaccagcctgggcaatgtggcgaaacctcatctctacaaaaaatacaaaagctagccgggcatagtggcttgcacctgtagtcctagctatctctggggcagggagccactggagcctgagacaggaggatcacttgagtctgggaggttgatgctccagtaagccatgatcatcccactgcactccagcctgggtgacagagtaagaccctgtctcagaaacaaaaaaaagccaaagccaaaaaaaaaaaccccaaacagactactgtgggcagatttggcccttgggtctgtaaatacttatttcatttttactatctaagctaatgtgttttattggatttacttattcatgcatttatttatgtatttaaaaacacattgatgtataatctcaattagataaaatagaagttaagggaggtccttgcagagataccatttgaacttaacaatcttggacctttgattgagaagtatactttctttttttttttttttttttttttttttttagtgaggcagagtctcactctgtcacccaagctggagtgcagtggtgcaatcctggcttactgaagcctgaactcctgggttcatgcagtcctcctgccttagctccccagtagctgggactgcaggtgtgtgccaccatacccggctaatttattaaataaaawtttttttttttttttttttttgtaragatagggtcttgtcatgttgcccaggctgctctcaaactcctgggcccaagtgatcctttcgccttggccttccaragtgttaggatcataggcgtgagccaccacaccctactgagaaatgcacttgacccctggacaactgattaccctccctcagtcagttgaaaattcctgtataccttttgacttcccctaacttaactattaattgttaactggaggctttactgataacataaacaattgattaacacatattttgtatgttataggcattatatactgtattacaataaactagagaaaagaaaatgttattaagaaaatcatgaggaaagaaaatgtatttactatttattaagtggaagtagatcatcctaaagatctttattcttatcttcatgttgagtaggctgaagaggaagaggaggggttggtcttgccttctcaggggtggcagaggtagaagagataggggaggcggaaggggaggcaggaagggcaggcacactcagtgtaactgttactgaaaagaatctgcatgtaagtggatctgcacagttcaatccatgttgtttgagggtcagctatatttgaattgccaagaattctgaactgtctcatggctagctaggcatatgaatttatgctagttacgtgatctttttgagctttatattctttgttggtaaagtggtacgaacaatacttacatcacagaactgttgaagggatgaaatggaagaacaatgtattartagaagtatgaatgtcgttggtcttatcctcctgggtctcttatgtatttccagatgatatatttcttatagagmaattcgatagaggtagaaggaaaggaagtcacttctcagatagaagtgggaaggctctcctagtcatccatctctctctgttagagatagtaacagaaaggacagatacttttctgtgtggggtgaatgacagtggagaatgtaagcagggctgagcagatagatagaaggcctgaaaaccagggcaagaacctcaaactttcatcggcaagctgggggttgcgtgaggagagcaaggaagggacacgaggctggggcacatccctgggaatggaacccaagtgtgggtttggatgtgtgaagagctggaaactgggaaggaaaagcatcgacagcagcccacaaataactggatcagaagcacctttccgagaacaattctgaactttgtctaacacatatgcctttgggaggaagaaagcttttcttgtgttttggcaagggtgctgagctaggtagctaataacctaacagtttgattttgtgccaagatgtgtaaggctgcatatgcatgtttaaaattcatatccactgcagtgacaagtcactgaacactagatgggaagacatttcagttgaagctcagccaaaagcccttttgaaacaactctgacaaaataacgccataagtgaataaaaccagagagttcctgggtatctttgaaaatrtctcccatgatgacagtctcagacaaaggtgctgtgcacagcttctaagaagcaatcacacacaagcacagccattcaacttgcagctagatttcctcagttccaatttggagtcaggtggattgtgttgtccagggacagactgtgcttttgatagtgacttggaacaatataattctttgctaatgcagcttcatatcatgaagttacatattttcttggtatgattgcacrgcccttgaagtaaaacagccacatagttgtatgctttaaaatagcccggtagggaagaattccacattttagaagatggatttttataatttaagtttgtgaatgtaaattatttgtgaacaatgggatgtgacatctcaagactctccttattgggatccctgagtgagtttaaaactggcttctgtggsagtgggaagaagacactgtgtgagtggttcacagccctttgcggttgtcttattgaactctttcaataccttagagttttgccagttatacttaggtccttctcacctcatccgtgacttgaaccgcctatactagatgacagctgaggtgactttcagctgtaaagtttggcattttatttacttaaaaatctaggtcagtgctctgccttctggctgctctgtcactcttccccaacaagtttagtcctgtttctggttaattgtgggtgtgtagtagaaatttgcccttttgccaaaggtgtaattgagaggatgccacaaaggtattaagtttaagtgacatgaccagatgtgagaagatttgcatttacagctgtccattgatatagtctatcactttgtacaatatttcctgagattttctattttatctttaaaatattaaagttaaccacaatctaaagtggtgtattttgtttaaaactttttaaaaaaattagtaatgtcactttgtgatctagtgaagtaatacagaagttatgctatgtcaaagataaagagaactctgtagttatgaggatggtcggcagaaatgtgaaggatggctcttaaatctcttctcttccactctccttcggaagcctctgtctaatcatttgcttcctttattagtgggacccttaatagggtccaattaagttctgtattttaggggatctctctgaagttttttggttctataatgtaaaggttgtcgtgtttacagtttttttccacatcacgagttcaggacatgataacataataaaygaggttttctacaaagccaaggatctgaaygacaaaggaaggacaactagagattagggatataaaagtgacttccaggaatcytttcatttagtgtattaagtatcacatgtctgtcagatttctttaattggctctttcagctgtgtggaggtcgtagtgggggaaacatgccagtaggacaagagggagctggtgggagatgcaaagaacacacttgctttccacagagtgacacctgacttgtgctttgcctgtgtgctctttccagaacctgtgagaagtttctacaatggtgggctcagctctcaggagaggtgcccatgcatatgtctacctggtgagtaaggccagtcacatctccagaggccatcagcaccaggcctggggatcgaggcctcctgcagcagagtgtgccacccaaagagctccaggcagtgtggtggagctgctgggcaaatsctaccctcaggacgaccacagcaacctcacccggaaggtcctcaccagagttggcaggaacctgcacaaccagcagcatcaccctctgtggctgatcaaggagagggtgaaggagcacttctacaagcagtatgtgggccgctttgggaccccgttgttctcggtctacgacaacctttctccagtggtcacgacctggcagaactttgacagcctgctcatcccagctgatcaccccagcaggaagaagggggacaactattacctgaatcggactcacatgctgagagcgcacacgtctgcacaccagtgggacttgctgcacgcgggactggatgccttcctggtggtgggtgatgtctacaggcgtgaccagatcgactcccagcactaccctattttccaccagctggaggccgtgcggctcttctccaagcatgaggtgagtcttgagatgtttctcatcgctgaaggatgtcatagacattttatgttgaggtcactaacatttagctcgatgagaccagcatagtcatccttgcttgccttattttgccttagtgaatcatccatacttaatgacatcttgtgtataggtgtgccccagtactttttgaccgctttgttgtgttagtaactacagaaattggtaagccttagtttccagttgtctgtccttatcctttctctcaatactgacccgccattctctgggttacttcttatgaatggagaatagtctgtggctcaaattcacctttaatccaggatggctgaaggtgcaacatggaaacctgtggtcaggtcattcttaattctgttaggagaagtaaattatattttcttgctgttagagagaaatgaatttcttaggtaccttaggggcctgatgatttattggcttgggctgtaaactgtgtcttgtccccaggcactttcctcaccctccctggctttgcatgttgctgtgagatgtcttaattgctgtgggatgtcttaattgctgctattcttgaagcatgtgttaggatgatgcatggagccttttcccaactccttgcgtctgttagatgttatcctaatatgttgtgtgcatctgttagatgttatcctaatacgttgtgtgcatctttttttgttgttttttttttttgcaaattctgaaatccctaaaagcttgattccatttcctaaaaacttgccataccacttgtccctcactcatgttttaaaaaccatctctgtttttatataagaaacaaatgcgttaaactaagcacagggtgtatttcattttacttccttagcaatgtcccttccagacatgttcactggaacaggaggaattattatcgtcacaaaactctctcctgccaacgtaagctaaatgagttattaatatgaaaacaaatagtatagcatccttaggccaataggtaaccattgttctgttgtattctataagtcctatagcaggagataactgaacaggactgccctccccttctctcctttttctttctgtttacctctggatgtgctgttcttttgcgactctgtgataatacagtaatagcttagccttacacaaaaaggccatccgtgctggatctcgggggatctcaaatgagcattctcaytacttggaatagctgactattttccaagttaggaaaaataatgattaataaggatatagatttattagggaactaatatgagatgaataaagacaggtcaaaatctgggaaatatgaccaagtgatagaatgtcatttaaaattaatgtacaagaggagctgtgatgccagtaatatgacgtccaggtcacagtagcagacaggtgctcagcccagcttacctcattaaagaaataagaaaggactgtgtgctctgatttgtaagcctgcatgccatgaaagaggcaatgaaggctgccaggcacttctagcattttaatggagggaaaatcaaggctgccacrgaagatgggaaataggaagtggataggaaattagccttcaccttgtttcatatttgttttgggtccagtccaatttggtagttagtacaaattactaatctaaactgatgatgctactatatattctgygtatagttaaaaaattatgctcatgtgtatgtatgtatctaatcttcttatataaggtgcatctgtgttcattgcttcgtttactcctcttaataaaaacctcgcaaggtagatcattttgacttcagccatgaggaatgaggtcccgaaaggtttagtgacttacccaaagttgctgaagcagttagtaacatgcctaraactggaactcagctcttctgaattcattgcctgtttttctgtattctgctttttttcatgacrctcctttctacgtgggacctgcttatgacccaaaggggagttttggttccaagaatgctatggagagtggagtcagaagattgtggtgttttctgaattcctaacctcaactaaagtgttggtactaactctgacctaatcttaactctaaacaaaatgttttttcgtctttcagtttattcccctatgaataggatttttagagttgtaataatgttacagagacaattttaaacattttattattatcttttaaggtatttttgttgtttaatctttgtaattattactttcatcactataacgtgtatttcagcaagaagaaaagtaaatacagaggtgcagggtaaaaaaacaatgataagtatagaaatggatgagtcacagtaatctatacacttagctattaattgtggaaaaaaatcttttgtattttgaaaaatagtaaaatgaaaactctagtgaacagtaataaattggggggagtaatcaatagatattgaaagtctgctaaggctcttgtcatatttggggataggataaaattactgagtaacttcagactttgttggaaaaaaattagattgcagtacaatgtatacattgcaaacagttggagtagaaaaggaggaatgtagagcatgatctcaatttaacagacaggaaaaaggaatgaaaaaaatatggtaaatagaaaccccaaattaaggatgtagatataagtccaaatacatcagtattcatgaatttaaatgggttaaacttactaaagacacacattatcagattggatatttttcagttagagaaacctgaaacaaaaccacaccaaagggtgaaaataaggggcaggaaaaagagatatcaagcaaataattatcaaaagaaagttggtacagcaatattaatattatgtaaaatagaatttatgaaaaaagtgacaagcagtaacaaagaggggtagttcctcaatcaggaaactttatgaattaagaatttttatgtattcaacatcataggcttagtacataaagcaaaactgaagaattaaaagttaagtttgacaaatttataaccatgttagaagattttaagtgaccttggtcagaaaccaatgggttacgaagttaaaatgtgtaaagatacagacagtctgaaaaggtggttgacaagtttgatttatatttatttttaaaatttggtagccataaacatatatatacacacatacacaattatatatgtatatgtgtataaacacacatgcagaaccatgcacatacatggagttttatatgcaaatgtcagaagtgtatagtcatatggatttctaaaaattacttatgcattactaattgacagtcaaagtctaaacaaatgtcaaagaatcaacaacataaatagaactttgcctgcctgacttcagtgtagtttatgtagaaagcaataagaaagtataataaaaatgttccatattctcagaaatttaaaaatatacaagtatagcttcatgggttaaagagaaatattagyaataaattacaaattacttatcactgaccagcaatgaaaatactttgaactgctcaaatgtggggaaccatagtcacttcattatggagaaacttggtattccccacctaagccgtaggatcactgttaacattagaaaaacaaaactgatgatgttagctaaaagggtatttgtcatatctttcgctttagatatgtttattttaaaaattgaaaatggaaatcatcaaattaagtgttcaatttatgatgctaaaaatgactttattacaaaaaaagtggaagggaggtgggtgtatagtctttgaatatccccaaatcttaccaaattgagagagcaactagaatagcaaaaccaaataccgcagacaacatctacaacacaattaggtgacaagttctccctaaatcctcacaaatgcatgggaagtcacaatgaacagctagaagttctgcactgtatcagaaacaggtagtatagggacacagcagtacttgagagaaaaggagagcttccttaggggtctctcagagaacaaacttccacaatcaaatttacgggagagactttggctcaaagtaccagtatcactgttcatcagtgactactgacgtcatctgtctaggaaaacagtggatctctacctcacactaaatcttcaacataatgtgggaaggtggattagacattaatataaagggacaaccacagttaacgtgtctcctgaaggaaggatacaataccaactatagagtctcccccaaaatgttggacttgagtctgattaattctctagacccaactaccatatktgtaggacatattcaggctgtgggaaattgtgtagcaggtctactggaggtgtgatctgcagaatgaaataaatagaggactcaagagtaagtactaggaaatgtttaaccaatgctaagggtttagaaatgtttaygccattgtattcaagcacgttattagtggacttcttttgttgaacagtgtgtgtggatgggttcaagtgtccttaaatactcttggtgtgttgagtgtgcccagtctatgcagtagcagtaggcccatgtatcagtttgtgatccttgggaaatctaaaactattcctttgctatggcttgagaagcgctgctctatgggataaaggacccaatttcttcaaatgattgcaagaaaaataaaaggggatgaaaacgatacccgtagattaaaagaaagatctatcagtcacaatgtgtagatcctatttttaaagaaaaaaaaaccatgacatttgagaccactggaaatttgagcactgactaactgaatatttgaaattcagttcttttttgtttttattttttagatgtgataaatggtattgtatttttatgaagtcattttgttttagagatacatattgaaatacctaagggcaaaacgatctgatgtctgtgatgttcttcaaaacaatgtgggaaggtggattaggcatttggagatggatgtaagaggattaataattgttaattattgaaactgggtgttggatgcagagaaatcatcatcctttctattcgtgcatacgtttgaaaatttccaaataaaaggctaagggaaaagactgaaggaaaacactgggatccgtcagtcagtcaaaaacattggctgaatatgtactgggattcaagactgtaagaagatatcagacagtcatgagatggtccctgctttcatggggaagacaactattaatataaaaaaagagtgcaggataaattaaagataaaagcattcattacatgtaatagaaaactgaaagcaattaactctaaaattaatagcctttcctccatcagcctcagatgattttacacaagtttttaccaaatcatgaattacttgtacaatctgtttcagaacatagaaaagagagtcctaccaagctcattttatgaggttagacatgttaatatcccaactagataagaaagaaaacttttgaagtttcatcattatgaacatagattattcctttttaatgaacagatatagaattattaaatgaaatatttgaaaattcaattcattgatttattgtgtcctaccacattattattgcatatacattacattgtactgtattaactgatataaggagaaaaagcatgtgatcatctcaatagatatagaaaaatgattgcatttaatgtctcatgacattaaaaaagcatttgatgacattaatgactcatgataaaaacttttagcaaattagaaatagagggaaacttccttgactttacaaatgaaatccatgaagctcttacagcaaacataattaatggtgcatcattctaaatatttctatccaaattagccacaattcaggattccttcctatcactgttcatcattatgtggtaaattctagcttatgcagtaagccagaaagagaaatagaaggcataagcattggaaaacatagataaaactgctttatttgtagaggatttgatgctttacctagaaaaagaatatacagatcaactattagaacttacaagacaattcaacaaagttgttggattcagggacaatatagaaaaattaatgtttttatccataagtaagaaccaattaccaaatataataacacattttatttgtagtatcaactaaaatatttcagtacctaggtataaatcttgcatcagatatttgagatatttatggataaaattattaaatattattaaaagacatagaagaacataaggagagatttaccatatttgtagattcatagataggaaaacaatatcatgaagatgacaattcatccaaaattaatctacaaatccagcgcaaatccaaccaaaattttcactggatattttggaaaaattgagggactaatcttaaaatttatagaaagagccccaggtattaagacttatacttgtgtagttgtaaagatagtttagtaatggcacaaggttaattgggtagagaacattgcaacagctctacttcatatttgagaacttatgaaatataagtgatatttcatatcacataagtgggaggtgatggattctacattaattgttctgagacagttatctctataggaaaacagtggatctctacctcactctaaatccatcaaatggatggattaataagtcatttgtgaaaaagaaatctttaaaacttttggaagaaaatataggagattgtcatttttactctgatagaatataatatcataaacatgagaattcttgaacaagaaaaatccataagggaaaaaagtgctaaagttggctacattgtgttaaaacatctgcctaataaaagtctccataatcaaagttatgagacatttctacgtgctgggtggagatatttgctgtgttgtcagacatattcctactggattctttttttcatcctgagactttcttttacatgatcactaccaatcttctgtcaatctttcgacactgttctcctttctgaaaatgcatataggtggtgagcacacgtgtgtgcttttactattctttaaacatgtcatactcatatacttttatgtgtatgatttattgtgtaagaagaaggcacatgactggctgataaacaaggaccagctttatcaataaacaagaaaatgcaaattaaaacaaccaaatatgattccaaactcagcagattagcaaaatttgataatcctcacaataccaaaggcctagaggaactgtccatcttatagccttctattgggagtrtatatagttactgccactttggagggtaatttggtagtttccaatgaaaacaaaaattgtatgctatgtgatttggcatttttttctttaagtgttaaaaagtctcaaaaacccatcaagaggagcaaggatagataaaatgggctctgtttttatattgaatactttatagcaattaacataaacgatctagaggtacttgtatcaacatggatgggttttaatgcaatcttgagggaaacaagtacaccgcgagtggtactaaactatcatatctttttaaatggatattcagaatgcacccaataacaaaaacatgcccgacaatgtgtgttcttatggacttgcttatattctttctcatctgtctttgtctatttctctttttatgcacacaaacacaatttttctttaatccagctagataaacataaaagtagatgtgaaaaaatatatggaaataataaacacaaaaatcaaggtcgtgattatttatgatgtggaaggagggtgaatgagatcaggcatcatatcattctttgcaaacaatgcaatattttatactttttaggagcatagaaggattttgagacttacatgtttgagaaccactgttctatagcttccaaacgaaatttttagaaaacatttgagacatttagtttgcaaagaatggtgratttcaagtatttgrcaggcccaccagaggaaactcttacaaatcctgtgtctatttaatctgattaaaaatgtcagttgaaacatgcatgtgtggaccagtgctcagacaagttctgttttcccactctccctggtggcaccttgtcgtgtttcaccagatgcacacttgtgtgtgggccctgaggatggacagaggagttgcgtgagagacaggcattccgcaggttgttctccagtcttggctgcagactgtttgcctccttattttgtcttcattcccctttgataacatcctctgggtctgtttcttccaggatttttctgtcgtgtacacacatgtgcaggcaatacttcctcctgaatttaagacgattcataatgagccttcttttcttccagattctgtctccattattattattattatttaaaattctaaatgcctcttgttttcttaaattttatacaagaatgtgcatatctgtttcttgtccttcttgctagtagttctcaaacttgagtgtattaaccagtcttggtccatgaccgagtttttgttgattttacaggaaaataaaaaatataagagcaatataccaatttttataaaggtatatttatttattttaaagagctctcctctgttctaggatgatttcsttgccactttcctgagtgttaaaatgcaatttctcttatgaagtgatggtgatagtattttaagcatatgcctgtacttggcaaaataaagcattgcctaccttatcttagtccctataatgttttgaaatttttaccaatctatgaaatatataaccttacaccttaacaaatgaaggcataattgtggagaagttataaatattacataattaatatataatttacaaatattcacacagaaataaagggaaatcttttcggaaaagaggatgagtgaaggtgtacagagaagtaagctttttgtataattttgaccacaacccattactggaatggcccttcatcaagaggtgtgtgttcagttcatataccacccacccctttaaacataatcatgctcattcgccatttcctcatggagggattttaggagcgtagaaggatgttgagacttacacgtttgagaaccactgtcctcaaaccactgtcctcaaccactgtgggtgaggggctccttccacggaggctgctcctgccctcacgattccttcccgctggagtgaggcgcttctttttgaacacccctttggcatcctttgtggttcatccttgtcagaaaaaaccgctgtcatttatcattagaaaatctcacttttgctgcctttgatattctctcccactttccagatggttcactggaaccctcctgttcttgggcttctctttccaagcttccccgctgttactcttgtagtgagcccatggttgtctctttattcctgctttctgctctgaatcacttttctgtctttcagtgagtgacagggttttattctccaccgtgtggttattgggtttccttaatagcctcatgtggaggggctttgttgaaggcatttttattcggctttgacagattatagtccccatgtttccctaatctcttctttaaaatattttaggaagcattgtccctgtcaaagacacacttaaattcaaacagcttttcctttttaaaattatttttctctgttcacatgtttacrtagtcctctgtcttgacagttaagtgagaggcaactggtcatagtgaggagtccatggatttgggaaataccccattattggagggcaaagcatgatttggaggaccgtttggagagagacccctttttctgtggcacagggcttttgcagataattagtctttggctaygacaagatggaaactattaggctcttagtctgagactcatcactgccttgtagcagttttgcccatgacccttactgggctttcagcaactcactgccttgaaatgttagtttgtgtgtgcctggtgtctccagctggttagtcaactccttaagggtgccactctatctctttttgtgcctgatctttctaacccaggattctgcacagaacagcaatgtctccctctttctgggctgtcaactttcactgmaaaaaatgacagctagcactgttaactgcatggcagctcacctrtctgcttgtctagttgggtattctcagctataagagcacatgtgtctgttagggtccaattctgatatggaaaccgcacagtaacttgatcaaggaaagcataatgtaaagaattacaaactccaacacagaacttgggtaatcagggattggccagtaagaggtaatgaaagagtccagaagtattatctataaggaggagctgctacccttaggactaagacggggacccagagaagagccccttcctccttcccgcagctgtggttcactgagtggctcagaagtgstagtagtggtgccatgctggtgaaattgcttgatatccacrctctggaatgtaccgaaatctgctttcttgggtgtggggaaagttaatttgggagacttgtcttgtgggaagcactatgctatgaaaatgatcaaatggggtaccgaggagagcagctggccattggaggagctgtgttgccacctgcactgcagatctgggcaaaagaagtgcagggtgcccagtaagaataccttcctttgccatgtccctccagcgacctctactgacaaagtttagcattttgccagctgkcaaaggaaaatatttcaaggactcaactcagttttcacagagcaggcaatgaaggattgattgttttgtgtaggtgataagtgacagagtcagcttgctccctttcctgaatgtctagaagcctttagggagataggctatcatttatgcaattacatgagttgctagggaaagtcatatttatggaggcaaaatatttgttcttaattcaaatttaatatttctgaaaacaattaggtaatgggaaagctctmtagttattcgatcttagtagatggaatacayagagaatagaggatgttctcaagggtaaaagcttgtgctcctgaaccaataatagcatccaaagaaaaacagattaatattctttacatctcatttctctaagatctcaggaaaattattgccatttacattctacatttgttgttgaaggctaagagggcctcattaggtttaccaaatccaaataattacagttagagayggtgtttttttctactagctgaagtgatgtgtgaaaatagcaaaaatattttcacagagaaattatgctctttaacagtaaacttcacgccttgctaggaactgcatttctctgcctggtgtgtatcatcgaatgctacttgtagggatggagtggtctaatttcacatttcgagcttggtaggtgcaggtgggctgtaggtgaaagggagttttctttaccagccagcctcaaaaatggctagcagccggtgccactcgcatagtgttgaattatatgtccagataccccagtctactcacaaatgtaaaagactacactcttgctatttgaccaagaatgcaccctgtactgggtactttcattgtcttcgctccgaggcttcgtcctaaaatctgctttctgtgtcatctccctgactcatcctgggataggtctctgcaaaattgtaaacttttgttagtttaaatgaatttgaaaggtaagatagttttcttaaactagatacatcatctaaatacaatgttagtctttagctgtatattttagtttttatagaaactttatataatcttatataagatcaatagtagttcattatagcaattatttatttatttatttatttatttatttattttgagacggagtctcgctctgtcgcccaggctggagtgcagtggcgcgatcttggctcactgcaagctccacctcctgggttcacgccattctcctgcctcagcctcctgagtagctggacctataggttcccgccaccacacccggctaattttttgtatttttagtagagactaaaaatcctgttagccaggatggtctcaatctcctgacctcgttatccgcccgcctcggcctccctaagtgctgggattacaggcgtgagccaccgcgcccggcctatagcaatgatttctaattttcttttcttttcctatttgagagtctgatgagaaatttgcatactccccagaaacacacacacacacacacacacacacacacacacatacacacacacacacacagatgcagaattttttatatagtttaaaggkttttataggcttattagttaaagggttttatgggctactggattagattatgaaatttgaagtcagggtcaaggagatagtttttgcttttaataggtaattcccaatctcagtctgtagtaaattggaaaatctgttctggattctttcagcaatcctctctctttccacatctgccacttttctgtgacacttcttttgggtcacattgccatgctggggttatgtttggtggtcgattatgtaagtagcaacggaagttagggttaagttagctataggaaggcagagaatgctgcctaacttgggtatgaccagatgtcagttattagaatgattggagattgagaaccaagtcaggagttcagagtcagaggcagtgtaggaacmggaggctgggttggatgtgttgggggaaaccaagggaaaagtggaaagtctctctccgagggctgggagcattcctaagttgtggtcatttctggaccaggaaatacaaagagctggtttctgtttagaaagctggtgaggcggacagatagccaaagagcagactctgggacagtgggcagcatgggtcctgcggggagcagatcttgccatscatctggtaaacactggcccttggaatcttgttatgtgttggactttagatagcgtgtgtgtattctttaaggtttatgagctatgcttaaatcaagcagagaaagatttacrtttgacaaatgacaaggaacgatttctcaccataaagattytgagtgagagaatgagtttcaagggaacttgggttaaccttctccagggtgatgcttcttaatatttttatgctgtggatttccagataaggtaaaagacccttcagttcagttatcccaactctttcatctctttaatgcaaaaggaactcagtgatagcaatgaggtgtcatttgggaatttggtggtaggactatgtagaatatgtatccctctcctttggtaatagtagtacaaatgatttttatttaaactttagtgtctcaaatataatcttaaaatctagttgttagatattgattctatcatgtcaatttacacacagtaaagtcatccataatgatgtagctagagtaacagtgatttattattaaaaggcctaatagtatgtgaagtctacaaccaactcaggctaccactgaagatccactgatagtttacttcttggaatcgtggagattccaccttttgaagagtgctgcagggagtagaagcttctttgttattgtctgtttatattagtcagggttctccagagcaaccgaaccaataggatatagcacagatatataataaaaagatggctcaggaggacaaacattatagtttgtcrcaatctgaaggttggagaagcagaagagccaatggagtccaagtctgaagacaggagaagactgatgtcccagtacagggacagtsaagtagagagaattctttcttcctcagcattttattctattcaggtgcttgatggattggctgaggcccaccacactggggatggccacatgctttactcgctttgcctgttcaagtattaatctagtccagaaacaccctcacagacacatccagtaatgatgtttaatgaaatatctgggcaccctgtgaccccgtcaagttggcacataaaattaaccatcataccattcttggggatcttcatggtgaaacactgagagtcctcagtcagttctaatttatatgttctatcgatgccacatttttattaataactcctagtgtaccacttagtcaatgaccaataaatagcctctatttgtacataaaagtataagaataaggaattatgccttttttaccctttaggactgaataaaggactggaacttttggccgctggcytttggagcccctccatggcctggacattatatcttgaaaatgtttgtttttatagcagtgcttgttattctccagaataacaccagcttttgagctagcgaaacragaggcaaatcctggctgtgcaactcagcctctggtgaccttagataagttctttaacgttaacactctgaacttcagcgtccataactaaaatgaggacaactcttgagtggtggtgaatgagcctgccacgctcctgacattaggaggtgttcagctaatggtcgctgccctgcccatccccttctgtgtatcttacaaatagttgtctcctccttttgtgttaagtgttgatccatctgarcattgtcaatgtcaattatgtatcttgtgggttgtcctttttagttctgatctactttttttttttttttaaagcctttgctgtcttttctgttcyttcccrtggttgactgattagtaatgtgtcttctgtcaccttcctrtagaacaggtgatggaatttagatggggcctttgtcctgttatattttrcccactggcatcatgaatgagctgtttagccacctggagaagaaaatgcaatctctttctctctgtttgatctgtcatcatggcccaggaagaagatgttgagagatcataattttaaagttgacagcagaatgggtgaagttttctcctacttyacatggtggttgtcatgagaaccagttcacaccagaatggggtgttttttgttgttgtcattgtgctttttgccttgacacatgsagatatttaatttccatgtaatttgtgtgcagcttccttgctttgacggaytgaaatttctgattctctgtagaggccagagcttggcagkaatattaatctacttccttttctcctaggagagcccctgagagaagaaaagtgctggaaagtatagtcattgcgatatgtcaggattaataaaagcaggcaaagcaaatggccagatttccaaaatacccagcagcatttggcagtatttttggggaggccgagttcaggcagctgccgatgccaccccactgagagcactgyggagggcagcctcgccttctgccggccacatggctgtgtggaatcccatgggatggaatctgctgcccttaggatttctattgtccctggcctctggagagcacatgttttggtcactaagcaaggaactgagtagcctctgtgatgtgttcaacttgagttttctgtcatggaggcttaagtagggggagatatggacaggccatgttggccagcgaggacttgtttgagttggaaaataaaggtctgacatagggtttccctgagaaagctcagactgaaataggaggaacctgtctgtttgaagcttgagcttctaatctagtatagcaccctgacagccagtattttgttcagctgcctggcagaagttgtttctcagccaccaatgtatttttgtagcatctttcaccacagaatactgactgtttcacatctcttcccattaatccactggcacaaagtctcattgcaaggagaggaaatgagacaagcagcagggagaaaataaagtctgctttttgcagtatagggctttagtgcatttcttcccctgtgctcatctctgtaacttgattaattggcatgtggtgcattacagaaaatccaggcaatggcaaagstggttcaatatcaattagttaaaacagggagggacttcccatagagaccttaggacagagttgtatttaactgggcccttgaaacacaagtcttcccgaatgatgagcagtagaagatcctacttagggcccagttggttaaagaaattgaaaactgtagaaattagcagctgaaatccacttggatgagtttgctatccctttaatatatctgtctattcatcttactaaggcatcccaatccttcctccaaagtgatttgaatacttaatatttgctgaaatgctttagttggatttgaataatgtaattgaatttgcttgctgcatttgggggaratgaaggcttgggagtttcttttctttttttcttttcttttttttttttgagacggrgtcttgctctgtcaccaggctggaatgcagtggcatgacctcggctcactgcaacctccacctcccaggttcaagckattcttctgcctcagcctcccaaggagctgggactacaggcatgcactaccatgcccagctaatttttttttgtatttttagtagagacggggtttcaccatgttggccaggatggtcttggtctcttgacctcgtggyctgtccgccttggcctcctwaagtgctgggattacaggtgtgagccacmacgcccagctgggtgtttctatggtaagaaatgtgagtgtgcttatgtttagcagtgattcttatttctctgtatgtgaaccaaggattaataagcagtagacctgccaagtatgtgaggctgtattcatcacagttacrgcctgtgtctgtcactctgcagatgactggcttatccctggggctcaggggtcgcctgcttagtgacaggttttggttgaaccgagttggatatagattgcctttgtgtttggatgccacacattcttgggaagctcgtcctaaaccagattgctgtaaaataagatattgactaagtgttgttcctatatatatakagagagatgaagtataaactctgctccccacagtcagcatartggaagatacagtcaaggcacggaagagggagagctctattcctgggggtaataatagaaggtgtcccaaagaatctcagacaaaacattatarttgtacaggcagagaagaaggggcactgtgtttcaggtggtgtgagtagcagattgaaggaatgaagatgtatgaaggtgacgagtccccggaatgtgtagtgtggagcgtggcacattggaaagtgacaggtgatggagttagagaaggaagcacgaactgcttcatgaagggcctgctatgtaacttttataatttgaacttcagtttaaaaagaatgaggagtctttactaaattttaaggggccagagtgaggcaatcgttcaggttggcattttagaaaaataattctgcaatgtggccagtggaatggagcagggtcaggcaagactggtgatggaaagagttgttaggagattattacaatcgtccgagagaaccagtgcaggctaagccaaggaaatggcagggatgatcgataagaaaggatgtaaaagaggtggaattaaytggattttatccctctacatggggaagtgagggaaagggaaaagcaattaaaactaactcctgggttgcttttttggtgccattcacagagttaggggtctcaggaagagaaatgtgttttggggtagggacaggagagagacttgagtctgagacatgtttaggtttgggatttgcaagtagaaatgcccccttggcaggtgcatstgtgtatctgggcctggcacagtcgcctggggtggaggtggagatatgtgatctatgggcatatgatgatagttggagctatcagtttagctgcattcatctaggggaaggtacgcagggtaaagactgtagagggctgaaaacgagtcccttggcgtacaaatatttagtgacagtggaaggaagggaagcgtgaagaagaccaaaaaagagctatcaacctaactgtatttgtgagaggggatagttgcarcatggtctggggctggagggagttttgttggtttgttggaccgtttgtttaaaggaaagaatggaatatattcatagaggagaaagagcctttggagagattactggtacaagagagatggcatgatttctaagtgacatctttgaggagacagagtgacgggatagggtatatccaagacgygaggagatggattagtaacacctgccgcctgaccaggggaaggcacccttttcctgttgttacaaaggtaggaatgaaggattgaagcatggctgcagaaaaggcacagatgtttatgaatgggaatacagggcttagacattagggagcttcttctctgttggcttctctgttctcagtaaagaagaggacaaagccagttttttccccagttgaaagtagcgtgggagggatagacattttaacaagtgagatacatgattagcatagtctctgaagttaattggagagaacagctaatactttcttctccaaaatttggttcttgactcggcatgtgcttatagaggcagtctacattgatcaagtaattaggaagaatagcgtgaagcatctgctatgttcaggacactgtgatgggggtctctgctccggaggtcgtgatgttatccttctagagctctttcctcattctttcatgttggttacaaatcatggttgcttgtcttctctcacgataagagactgaagtgttgttcctggrgctgcaatctgtctatagcatgctgaactcattcagaggagtatattgtctctatattaaattttgcaataaatgtttaatttcagaatagttctaggtttacagaaaaattgcaaagamagtayagaaagttcctgtataatccatattcagtttatcctattattatcatcttatattagcatggtacatttgtcacaattggtgaaccaatttttttttttacattattacctgtattcatttttgttcttttgtttctaaactctcttgctatraccttttcagttatctttgrcagtgggagaagcacttatctactaatgcttcagaaacctgagatgaaccaataatttgaagcatcccctttcttgtgtctttgggattatcttatcttaaacsctatgtcttcttatttcaaaaatcatacacttggcaggggggaaatggttgcagagaaaaagtaaatatcaactgggattttatcaagttcatatgaccctactgtgagttatatgtgtgtttaatttaaaaagtattattatttattaaatgcaatttgacacaaatcttttttaaaatggggttcatcggggattaataatgaagaatgttttttggtgacaagatcgtgtaccatcgccagtaataaaatagttctctatgtctttgcctctagatggcactgattttatatttgcccatgatttttaagctattgagtttggaataaaaaagcctgttcttttctggctaacactgtgtctgtgctcatttgtgcactctgtttttacttcactctcagcaaaacacagaattaagaccctgttttagttcctgtaagagtccagccattacaaaatcattcatgagtgatctagkatttgctgatgaattcataaggaagagakcatttgtatcatgtaacctatatggaatcattctgaaaaatatttaatggatctgtattttctccaagtgcctttttctgttgtcggtgggcagttgtcctgagctattcctccaggtggaactttgctctctggtatctgcttctcaaagccaggatatttcaaaatccttttaaaaaatcccttttgtcatacttgtcctacagaattatttagcaggtatcttgtattccatgggcccctttgggttttcagttctccgtcatatctgtttattgttgccctcccctcacatccacagatgtcaaagaatctctttactttttactcagagagtaagatttttccttcctaattaagctgctaaacttttctgtcagatcctttctaatagaatcatacagctaaatgaaacagttaaaaaatatcggcttgcagaaatattttatgrctttggacatagcgtcattcttggacaatgcaaaaatgccttgtagtttgaaaatgttacatcagttgaccactgtgttakgcgagtactattgttgagttctccaagctgctactgttcctcctcccctcccttgccatcttctctcttgtgtcctgtctctctctctctcctctttattaagatgctggttggcacagcctggactcttagttatgacctcctttctttcatgtactcaatctgtctactgaaacgattttgtttggctgcattacctagcaagatttttctattagcattctcttggrtcatctcttcactgctcaagtcacttgtacttgcgtttggtattgtgcagagcaagaatgtcctgtggtgtatcccatcagactttacctttttggtctattacctcaggcaaagattgacttatgaagctagaattagtgaaattggtgatayggtagtggctaactgacttaccacctgcttgaaaatttcaaatgcagttgaagtgacattattatatttgtcttaatgttacaatgsaaaaatgcctgtagtttgaaaatgttacatctgtttctgattttcctctctgaaacaaagctttctgaattctgctcctactacagtttttttgtttttgtcgttgttgttgttattgtttgtttttgtttgtttgtttttttcctgagagagggtgtctctctgtcacccaagctggaatgcagtagcatgatctcagctcaccgcaacctctgcctcctgggttcaagcaatcctcttgcctcagccctccgagtagctaggattacaggcacgcgccaccacgccaggctaattttatatttttagtggagatggggtttcaccatgttggccaggctggtcttgaactcctggcctcaagtgatccacccatgtcggcctcccaaagtgctgggattacaggcrtgagccactgcacccagcctctactacagtttttttgttccagtacttaccttgcttgtttaggttattcagaaagtgagtactattgctttctttccctgtgaggtaaggccagtttccaagcccatgcttggccccagacacctcaggcaggaacagtaggtataattatttcatcagcgttaggattaagttagaaagcaatgagtatgtattcttttgcatcscacatgctaaaaatatccttactcagcacccttgatggatcctgccttttatgagtccccaggtaaccacagggactgctcaagtyctactgttacttcaaggattattttgattgttttctatgacacatcatctttcagaattttataaaccgaacaacagtatcacaaaccagtgtcttttctgtgtgaaggctttcttgtgaacagctcctgggtttgagcaatatttctttcccttacagtgtatataagraacatttatttggtcagttctcaaacatattatgcctacatttcttctgctgtttttctttggttctcttctattcccttagtttaagaggaaaggggctgagataaccagtgtcaagcccgggtgtcctaatagctgccccaggtatggcccctttcccgtactccatgttgcctttgggagttcacatggcctctaaccacacagtgccttcttatgaataatgtggaacatgatcatagcttacatgtttttcaaagcagtcctcctggaataacccaagaaactgttcacattgatgcaattgcacatatgctaagtgcattttaaaggcagacctgaatttatcactttttgagaaatgtattagtccttgttcaataggaatgatataactagggtaaaccrtcattattttattcaggktgcctaaagcagtagaagtgtgtggagctattgcagctcagctctgttcatgagtgttttatgtccagttctaaatcctattcatctgaccctattgccccttttaatactgaagctgaagagagtgatagtrtatattccatcacggaaataaccacagagcctggaagatggggtcatgacttggagattttgggttgaattcaggctccaccatttactatgtcatggtacatgttattgaacctcactaagcctcagggttcttagttgagaaatggggaaataataaggattgtgaagattaaagaaaaccatatagtatgtaagataagcactcagcaaggtagcaaaggtactaaacggtgtgtaactattaaccgttagtactgcaagtggcagtgaagtgtgttataggatcatgttatcagtcacaggaactcagagtcaggatagataagtgtttagcattaatttgtaaggcagattgtatagatgaaactggtggtcaatagttatttttttttttaatggctggtataaaaatgactactttgggagccacagaccagtcctcaatatctccttgaaaatctactatcatccaagcctcattttcactttgccacttgtaggattttgcaaagaagcaaattcttcttctgtccgttttcttttttctgtgccctttaaatgtgtgtttaaaatctagaccttttgggaaaatcttgttggctttctaaattttaaatttaattggcttttgcaatctacttttattcttaaatctgattagaagtaattccttgctcagtaattcctcagtagttctgaactactttctgtggcttttgtaagcagttgtagttggggttgaatttgtattctgggtcatttggatttgcacaaggacagttaggaaaatgtcagagaaatagaagcagtcctagtggaaaataaattatacaractgttgggtgcgattaatggaaattaatttaatttcaatactgtggtatctcccaaacataaaggtaagtgagaggcagatacttagaggtccctggaatcaagggtgagattggtcctggaytgatgtctaattggctgagtgatcttaccctctctgggtctttacctttctgagtttcctatccttatatggcattggttaatggactacagtctcttccagctccagtgttatatttccattagaaataatctctgcctttgattagtcttgttcttctgtgttgtgttgtgcacatggccttatgaactgctgcttttccttatttcagggttttgaaaactttastgtgttttacagttatattttggtcatacccatatagtgcatgtatgattagatcttaataattttctaaaaatagccttaaagtgactgacctcttttgcttagcgctattctaagctatagtacctgtgaaatcatgggtttgataggagagttatatatttttctatacacattgaaagtattatgtagttattaaaatgaagtacttagcccacctgctctctcagctactcaggaggcttaagtgggaggattgcttgagcctaggatgaccagaatgaccacattggactgaagcttaagctttaagaccagcttgagcaacatagcaaaacacttgctctaaaatatatatatatacacacacacacacacacacayatgtatatatatgtgtgtatatatacatatatgtatgtgtatatattatatatgtatatatacatatatgtgtgtatatattatatgtgtgtgtatatattatatatatgtatatatacatatgtgtgtgtatatattatatatatgtatatatacatatgtgtgtgtatatattatatatatgtatatatacatatatgtgtgtgtatatatatatacacataaaatatattkattttaaatatctgaaaatatttttaaaatttattaaaatatatgtaaaataagttttcacaatggaatgtgtgctgcattttgggaattatcagtgggttttkgatttattgcttcaaccattccctaatatgtccctaatatttttcatatgtacctacatggatatactagtatttctgattgatctattgaaactagcttggtcgcaataaataattgaatcctgtaatgcacaggtagactctcaggattattataggctaaccatggaatcctggaaaagatactcccacagatttggattccatgtgtgtaaaggagtggtggttatggtgtcagtggcagcagtggagggtctgggagtgacgatgcagtggctcatgtagaagatgacaagtgctttggccgggcatggtggctaacgcctgtaatcccagctctttgggaggctgaggtgggcggatcgcgaggtcaagagatcgagaccatcctggccaacatggtgaaaccccgtctctactaaaaatacaaaaaaaattagctgggcatggtggtgcgtgcctgtagtcccagctacttgggaggctgaggcaggagaatcacttgaacccggaggcggaggttgcagtgagctgagatcttgccattgcactccagcctggtgacagaccgagactccacctaaaaaaaaggcaagaagatgacaagtacttttaaaattataatacagtttaccagtgtgaggtataattagtattatcacgcaaacgtgttgtttggagaaaggcacccttttcctctttgaccgtgggtattagagctgtcctccttgcgtgaggatggagaactgctgagatgctcattggtcatctcctctgtgatgtttgtttagtatgtggatggaaggggcagagtgagtgagacatctcgagcatcctgctatgcatttagactgaaaatgtgttggctttggtttttattgccaggaatggtcatggccacattggaccgaagcttaaggctctgacttcctaaatgatcaagtatttctccttggcttgagtagaaatttgaaagaagagtttattttcctctggtaactacataatgacattactgtcaaagaggggactatttaagcttcagaatgaggaggagcataaagctgaaataaatgtatgtgtgtatatgtacatacacgcacacagtcctgcaccgcaaaacatttcagttttagtatatatgctgctgaggtgagcacgagcagaaaacatttcagttaatggcagacctcatatatgacaatggtcccacaagattataatgcagctgaaaaattcctatcacctagtgatttgtgttacagttgcctacagtattcagtatggtaacatgctgttatagatttgtagactaggcacaataggctatacttcatagcctaggtgtgcatagtgggctataccatctaggtttgcgtgactacactccatggtgttygcacaatgacaaaattgcgtaatgaagcatttttcagagtgtatcctcttccttaagtgacacatgcttgtgtgtgtacatatatgtacatataaaaattacagtaaaactatgaaggttttattactcaggttttataatctragtacctaattagaaaatgtcgaactgggtgatatcttatggaaactctgctgtttttcttgtaccttctgtaagtgacatggagtaggggctgtttgttttctctttcaagtgtcactttgaaacatctgtgttgttagtaarggacagtgttttttttwaaaaaaaaagcatttggtgtccttaaataactgcaatataaaaagattttttttcttgatgctcgttaacttttgacgtcacactcattttgccattcgaagtggtacagaaaccatattccattgtctaaaaaaggatgatctgcgtcttttgtaggagagtaggactgtcaccttgtaggcctctctcttttttttgccgtttcttagtttagccaggcttattctgcaaggccctgctctagttctcttttctagctgaatgaccgtcaacaytgtgctgattggttttgagacagagtctcgctctgtcacccaggctggagtgcaatggtgtgatcttggctcgcttcaacctctgcctcataggttcaagcgattctcctgcctcagccttctgagtagctgggattacaggcatgcaccaccacactgggctaatttttgtatttttagtagagacagagtctcaccatgttggccaggctggtcttgagctcctgacctcaaggaatccacctgcctcggcctctgaaagtgctgggactacaggtgtgagccactgtgcctggccactgattggtttttaatatataattgcaagtaaatacttccttttattaccaaactagatcaggtaacagaattttcacttttcctggactataaaagatattctttggaacctggggtctttctggccctgatcagttatttatatttttgtttagtagggatgacactctctacctggagccacattttgaccaagaacacctcatttttctytgtaccattactagtgaaatattcccctccatttcrtcttattagttctcctctccttattctccactaattaacgtgttctgggagtagtttccatctttggaaaaaacagctttatcttcatttgtaggaatatcaaaacactgtgtgcttataataattttggggttggccactgtatttctagcattaggagagactgatgtttgaatcctttcctattcctctttttatccttgtagtaacatttgttgttttctctgcaacttcaaatgtaaccttgcttattgaggaaatgtataaaatatctaaaagcactgagaagaaaaaaattatgggcaatctgaccacctagtggtgataaatgtttttaatgttatggttttgttttaaatcttgaattttaatgttaatgtcatagcccactgacattctagtattctattaggataactctatttcatatataactattctttaaagaaaattgttattgcttgctaatttaatctgttgtatttactaaattcattgttcttaaagaagaataatgttcatgaaacctggaattcatataaactgcttcccaagagctccatgttgcatgtatattatgtttaaaaggtactgagagatttttaaaaatagattctagtaattaaaggctatttttatctttcagttaatttcctcaggggaaataaattccagtgatgctaaagttgctcaaatattgttagagttgtgtttaatttcaccgttatatattgtcattggtcctcagccttcatcccttcagakatttgttttttgcataatcatttgtaaaaaatcatttggctacaaggctggaatttggggttgtcaagcggagtaataatactgttttgattaagaacaaggtataaaagtatgaggatttttcaccccctgggagatttataatttgattctgaaagcagtttatgaaatcaagttccggaaacttccacttctttcacagactagatatgctggctaaaaaaaccccaactagactccacataaaataattttgttacaatttttaggctcaccgaaagtgacagaacttcccaagggagaggggagaaaatggaaggaactgagcgccaggagcagtgagctgacatgaagcgtgtggaggtgctacagctgctgtcagcagcagggcagctgagcgatcaggcctcttggtagtagtggcaagatggggaagtcaaacctgggcccctcaccttcacctcttcaagagcggtaaattggttccagggctgttgctgccctggttacacacagtctttgaaggcaagtgtcccctacctaggccctcacgtttccccctgatttgatatcatccagcctaagatcaccacacacaaaccatcctgtgtgaaaatcagcagaaatcacacccagttgcttcagctatttgaattcmttggcrcaaagtataaaataactgtatgaaatctttaaagaagtagaaaatacaatctcaaataygtataagtaataaaaatggtttttaacraaagatcatacatgagttattaatcaatgagaagacatgggggaaatgtacatgcatattactcatgaaggaagacaarctgaaaaggctccatactctatgtttccctctatatgatattctggaaaacacaaagctagggaaacagtgaaaagagcagtgatgatcaggggccagtgcggagacagtgatgaattggctgagcgtagaagatttttagggcactgaaaacactgtgtgatactataatggtggatgtatgttcgacatttgtttaaacccatagaatgtacaactccaagagtgagccctaaggtaaactaaggactttgggtgattataatgtgtcagtgtaagtccatctagtgtaacaagtgtaccactctggtggaggatgctgatagtggaggaggctgtgcatgtgtggaggaggaattatatgggatatctctgtatcttcctctcagttttgctgtgaacctaaaacgatgcttaaaaaagtctttatttaaaaaaagagactatgccgaattgagaaagaactaaatagaacatgtaaaattgaaaaatgtgtttgcttgaatttaaaaacatgtcctttttctggactagaattcaatctaggattacatgttatatttttcacgtgtccatctcctttattaaattgggatagttactcagtcttcctttgtttattatgactttgatgtatttgaaaggtactggccatatattgttactcagtctttctttatcatgactttgatatgtttgaaaggtactggccatatattttgtgtcatgtttctcaacttgacatgattttgtattttctcatggtgaaattcatattctacatttttgacaaaaatgccatggagattttgttgtgcccttagtgmgttctatcatgaagaacgtggtggtgatatgttaactctgatcactcggtaaatgtggcatccattaggattctccrccattattattttcccctttgtagttaatagtgtttgcaggaagatactttgagactgtgtaaatagttctcataatattttgccctattaactttggattcccttgataatttttgccagaaattattgtggtgtttgtcaaatggttattttctttctaatttattctaaaggtattaattagaattttactgtaaggaagacctttaccttctctcccatatatttatttaattatttatatcagtatggcttcatgaatatttggttattgtatgggttataacctattactaaaatgatttattttattgctgaaatttacccaggtttggtctttgggagccccttaagtagttttctgtgtcctctgacatgttatcattttttgtccccatgagatatcccagattcatcttttactttctccaccccagccctggaatcagtcatttctttaagaaactctgttccttttttattaaagaatggtatttagaagcctagacctgagtatacttattgccctagggatatcattacttgtaggccccctctagtgacagagctaggaaatacatatacctacttctatttccgtattgatgtatctgcatatatgttacaaaatatgaattcatatgagtacctccaatctaagccaacaccayatggctcattctagccctccccattgcctttgatagtgacagtgagaaacctggttcttcttactcatgacatatttattttcttgttcagtcctggaatgaacataaaggtagtttcataattgttaacacatacctctgtggaaaaaatttgctaactagtgtacaatatttgctatgtttattttgtttttcatcttatttagttaaaatactgtttttgaaagttattttggttaattcttttcttctccactctctttaagtggctgtcatttatttagaataaacttctgtccatcattactgtttgtattccatttgtgttcttcccacctctgggtagattttatattattttattattattattattattattattattattattattattattatcatcatcatcatcgagacggagtctccttttgttgcccaggctrgagtacagtggcatgatgtaggcgcactgcaattcctgcctcccgggttcaagtgattctcttgtctcagcctcccaagtagctgggatcacagacgtgtgccaccacgcctggctaatttttgtattttttggtagagatggtgtttcaccatgttggccaggctggtcttgaactcctgacctcaagtgatcctcctgccttggcctcccaaagtgctgggattgcaggtgtcaggattttatttttaatgttttgcgtagataaagtattaacgtccttctaaaactcagaactatacaacaaggtttacttagaggtcatgacccccactctgccattcattatactctattcccattcaaccattttttccatcctgtttccaccacctctgtgtaggtgatttatttttgttatttctagcctatccttcctttttttcacaaatgagatgattcatgtgtattttattatttcttacatgaaaggtagcaagtaatatatgccctcttgcactttgccttttttatttatcaggatgtcttgaaaatcattccatatcagtccagagagatcttcctcgttctttattacacctgcaaaagtactctattgtataggtagaccatagtttatttaacatctttccaatgtgagactttttaaaaaaatatggtgcagttacaaacaatactacaatgaaaattttgtgcatgtgtattaatgttggaagtatattttcagggtaagtagttagaaatggaaggactgggtcaagagatcaacaaatatgtagttttgttgggygttgtcaaattcatctccaaaagggttctaccagtttccattttcaccagcaaagtatgactgtacttattttccaaagcctcagcgtattcaaaagaatatgttgtctgacttttaactttttgccattgtgatagaagtattatgtcagtgttattttaatttgcttaatttgctctttaagtttgaattccttttcatgtgttcaggggtcattttcatatcttttttttgatgaattgtctgttctttttctatggagtttttggccctttgtcaacttttaaaagtttctttacgttagtggtattacctctttgtggtgtatgtttcctgacttttgttccccttctttttttgtcagttttcaggtggaaagacctttatgtgtgtgtgtgtttgtatgttgttaatgggaatgatttttagttttattgtattttaatcagagagtatagtttattatttcttctttatggaatatacttatttctttgtgacttactatgtgatcaatttttgttaatattctctgggcccttgaaaataaaatgtatttttcattatgaagggagtaagtttaatrtgtgtgtatgtgtgtgtgtgtgtgtgtaaaatatacgtatacatatttatgtatacacacatgatttcatttcctaattatgtttttaggtcttttatcttattaattttgcacatttgatcttatactaagaatgatgtattaaagtttcctattatcattaatattaatgtgtttctatgtgtgtcttttgcgtcccctatggttctttctacacagaggtaataattgtcttattgatatatagatattcataagtgttataccttcactgtgatttgaaacttttagcattaatacaagatcttctttgtcttgctcggtgtttttttgcttgaattctactttttctgattttaagaatgctatgcttgcttttttattgtatccatttgcctgttatattctgtccatccatttgtttttaacattgttttaggtgtatcttttgtatagttgagtcatgctttgtggccagatttatttttttaagaggtgaattaagcctgttcatatttattgatattactttcacatttattgagttattgatatattcgatctgaactttatcataatatattgtggtgttatatatgtcataacatgttacattttatttctctacaatatatrttttattatgcttttgaattgaaattttggttgctctttagaaaggttatatttttgttttaatggttgcttttatacttaaaacttttaaagtcccttatccctcatttttaactttgttcttagtaaaagtattctttaactattgcctatgcaataatcagtatattctactttcctctttgctgctttcttccattgtttagttaygttatttctactttgtcagaacatataacaattggatattagtctttcaatgtaatccccagcttttagtctgaaatctgtaatttttatgtattaacatgttctccatttgttttgtgctgaaattttcctagttatttattacttgaacaaggctcatgctttggtaaattcttcagaaagagctcattaatgtgacattcctatgctcttgtgtgtttcacgttttttctgtagacttggtgctttaaggacagcattgatggatataaacttcttgacccacatttttaaaaactgagttgtttgaaaatgtggcttcattgttgtcttgtttccgtgttgtttttgaagaatctgatgccactctgattgctttactcctctacattagttgatctttttgcctagaggccttgacgattttccccattatttatgaaatctgttttataagaatatgtcctatatttgatttttccaggttctttttcacaggtacccattttatctggtattagttctgctccattgtttttttttcccctctttaacggactccaattatataaatgtaattccttctttgcctgtgttccatttctaccactttctttctgattcttctttctttattttaccatcctccttctggttgtttttctccttttcttcaatgccccctcattaaatcttgattgattccattgtcccttgcatgctttggaatttagattttgtttctgagatgattttatttcttttttttttctgagttaaatcaattctcttttcattttttctctatttttgttcttaatttttgagtttctgactaaagcaatttatatccttaaatgcttgattgagcatatgtaacttagtttttaagtattagtttgtgtttctttttagtgctccttagttttggggggtgggtgggagaaaagttggattttcattagttgagctcttttgaattgactttctgatttttgagtaataattttctatatttttattgaatttatttgtcgttcctttttggttgtgtaaaagacttccttagtctctggtgccctcttctgttagtgtagcaatgcacactttagtggtttatttatttatttttggtgtgggttagagaatggttttgtaaatcctctaattttttagytgtgctttatctttcacaaccttgaattttctcatttgcatcttttttctcttcctactcarttgaaaaggttgtctttcgctttgtattaactcctttttcttttattgtaactatggttttgggatcctctcacttcaaattgggcatgcttttacaccacttttctgtggtccctgctcaggcctactaggacactttttaaaggmttttcacacttagtgtaacttacactttctgggtttctaaggtcaaccttagcacctcactcattctcctctctttctcttattttttccagcttgctcttgcttacttcaaagccttatcagtggggtaggagtataacagttctgtccctaggttttgactggcattccttcctgcctgcctgcctgcctgccaaaggcattgtgttcaatagttttatttgttcttgttgctctaaattatttttagaggaagcattgacagccgtcattgtctttagtcctcataagaataatttgaggcctaggatattagaatatttctctgaaaacggttttgtctcattttgctggccagttagaggaagtatgtctgggattgccttagatcatcttcgtagcctgaagctctctctattgttcagaaaatgtgatacctgactgcaagtctacacaaggactggtttacttttgtgctcatcctcatcagggggatgagtcttttagggactcaaacaccccagcttggttccacagcaaagctttcccttttgtctcacttccatggtaagctgttacaacccatgttcaggttttcagttgataggttagataggcagatactctcaatgcttctctctggctttgtgcttactttattttttatttttattttttaattttttacccctggcttcatgcttcctgtagagttcagtcactcctctctatctcggttttacttcttcaatgctgttargaatttctgtatttttttcagtagcatttatcaggaagtttggttctaattatcmaaaccaacattactagaaatggcagctgaytcattcttttattaaaacattttttatgtttgattatgggactttgggtgggaagaatgatacattcatttgctcagttatcccttttgagccaatcttctaccaagtaaagacctgctgtgtcactgaccagaaagttactttatttcagtggtaaagcagcttatgactaatgatagctgtggttaataatcatgaagacaataatgaggaaaacttatttagccattggaatgtgccagatactctgtattttttatatattattttgtttgtaataaaatctactaatttactattattattcccactttatagatgattccctgaggcttagctactgtatcacttgcctaagtttacacagatagtaagcggcagaaacatgtttgaggctctgccttgagccttggagatacaggactagcaaattccagcttgcttcctaccttcatggaccttacaggatttaattcctcgacactgtgggatggtcagggatgtaattttagaatatgaaagcgattcactagwatttccactagaattgaggataatgtctcttgttgggaactgactataagttcatgcaaatcaaaaacagattagcaaagatcagaagagtgtcttaattctctaaaaaccccccataccatgtagygtagtgttttcttcagagttgtactaagtgaatgttaatttcattacgtttattgacaggacataatgagtcttattcccacattataactttttagagtcaaaagattcttagcagaattttaaagttatctgatatagatgggccaggatattttctttatttatactttcctgttggtttacagttatttgctggtataaaggatggagaaagcctgcagctctttgaacaaagttctcgctctgcgcataaacaagagacacacaccatggaggccgtgaagcttgtagagtttgatcttaagcaaacgcttaccaggctcatggcacatctttttggagatggtaagtgctcaaacacaggttgacgatctcttatctgaaatacttgggacagaagtgttttggatttgggttttttttttttttttcatattttgaaattctttttttttttccccgagacggagtcttgctytgtcacccaggctggagtatagtggtgcgatctcggctcactgcaacctccacctcccgggttcaaggaattctcctgcctcagcctctgagtagctgggattataggcgcccatcaccacacttggctaatttttatatttttagtagagacagggttttaccatgttggccaagctattctcaaacccctggcctygtgatccgcccacctcggcctcccaaagtgttgggattacaggcatgagccaccgcgccaggcctgaaattcttgcatatacataatgagatgtcttggggatgggagccaagtctaaacacgaaattcatttgtatttcatatacactttacgcacatagtctgaaggtaatttgatataatattttaaataatttcgtgcgtgaaacaaagttttgactgcgatttgactgaaaatcttaatgagttcaggtacgaaatgtttcacttgtggctgcagattggcactcagaaacttttagctagagaaagaaaaatgattataacgtttgctaagaatgataatggattaggtcagtstcatcaatggagtgaaaatatacaggctgatttggagtatattattatgttatcattacatgaggacgtgatcagtggagcaaggttcttttttttttttttttttttttttgagacggagtctcgctctgtctcccaggctggggtgcagtgcagtggggtgatctcagctcactgcaagctctgcctcctgggttcacgccattctcctgcctcagcctcctgagtagctgggatgacaggcgcccaccaccacgcctggttaattttttgtatttttagtagagacagggtttcaccgtgtttgccaagatggtctcgatctcctgaccttgtgattcacccgcctcggcctyccaaagtgctgggattacaggcgtgatccacggcgcccggcccagtggagcaaggttcttaaccatgtgaatgaaccagtggaaaactttacgtattgccatactgattaccactatcaacaggagtatattaacagtatattatatcaacagcaaaaacattaacagtatatttcgtgcaggaggaacaatagtgttgcaatctagacctcacttagtcacttgcctttatttttcaaaaaatatttgttttcagtaatgccaccttccccctccagctatttttaacttaattgagatatattttgtttttttaaatcacgatataaagagaaggttagtggattttcctaattgtgactatctttaagaaatacttacatttcttatctgagaagacagatgacctactgtggttaggattctcctttactctcttattcttgtgagcttttgtaaaagtcagtgttgttgaggtgtaattaacataaagtaagctacacatatctaaagtgtacattttgatcagttgacatacaatgaactgcacacgaacatactcgcacagtcttacaagttttgacgtcttgcaagttcatgccatgaagctaccagcagaatsaatacatgaacatcttcattgtccccaggagtttcctcctgctcactggcaatccttcccttctgcccttaccacatctcaccccgggcaacatgtgatctgctttctggtgccattaatcagtttgcattttttaggtttatataaatggaatcttagaatatgtgctcttttttgtctggcttgttttacttaaaataattattttgaaattcatccatatcatagtgtatatgagtagttgattccttttgttaatcagtatcccattccacgatttgtttatccatacatycrttgataggtatctgggtagtttccagttttttgctattatcagtaaagcgtctatgaacattcatggatcagtctttctgggtcgtacgttttcactcctcataaacataggtatatgtttaacttaaaaaaaaaaactgctaagctattatctgaagggttgcaccatctcgattcccaacagtagtctgaaaatgccagttgctgtacatcttcagcaacacttgatagggttagtcattttaattgtagccattctaacaggagtccagtggtatgtcaaatacacatttggcatttataaaggacttctccatataaacaaacagaaattgcaacttaagagaaaaatgggtgaacatgaaggtggcaaattatatatatatatatatatatatatatatataatgaccaataaatatatgaaaagatgcttgtctttattagtaatcagggaaaaacaaaaccacaaagagctttttcaaatgggaaataattttttaaatctaacattttaaatygttgacaaaggtgtagagaaatagagtatagcacaaagttctggccttaygcaggattcatggtcaccgttcttccagctgggacttcagtactcactgttcttgattcacctctattttttcatactccagatttcccctacttatgcctgaactcaaatatgtatttaaagagaatcttgttgtaatttattaagcctctcctgctctgttttagcaaggttttttagaatatcttgactgccatattgccaaacgcatagttcatgtaatatataagaaaccactagctaatcttctgtatttttaatataaatacattttcaaaaagtgcacatcaacttcaggataatgtttttctaggaagtgggaaatggtattagggaggggtggaaaccatgtttcaaatgkatttataatgtttttttttttaaactaaagttaaatatgacaaaatgttatggtttgataaaactgaataatgagtatatgggtggttgctattttctcttcctgtctctaggtttgatatatttcattaaaatggcrtaatataatagtgaaataggtttcaaatagaaattgctgatgtgaaaaacctatgatagccagcatctctttgctttcatgataaaagaaaggaattgtgatattttaaacatttatatcatctgtttaacacaaatgcagggagatggattgagctgttcaggccattttagaggcagggtgaggtagaagggattctagtattttaaggaggtagcattgtgtcttaacagaaagattcaggctcatctgaatttttccattgccaaactatggagagaattttttttagcatcctccttatttatgtcatcctacatatttctataatcaaatgatttgctgttggtgaggtttagaagctggatttgcaccctgttgcaggcatcacaatattgaataagctagccatactccctgtcttcaaagagccatggagccttggatcttgagctctctccttgggaaacataggatgttctccgagcacacaggcaaggcgcctcctcctgagcccagcctgtgctcctggaaggctcctgctgaggcacatgcacgctgacacctggtaagtgggaattagccttgggaaaggataagcaaggtgggggggcagaagaatggggtgaaaaatgacaaagcaggtgacacaagtacttgtggagagcaagcatgatgcagcacagtccacggaaagaaggaaagaagaggcaaggggaagaaaaatgattgacagtagactcttatgaccatggagaaacggtagtgtagaatcagaaaacttaaaatgaagctccygttcatccccttactctgaagtcctgaacaggtcacgtagcatttcaggtctcagttttctaacttttaaaagttgtgatgatacttgcttcactcaagaataaaacaagataacgtgaaagatgccttgtaagtaaaaaatatcagataaatatgtaaatatgaacaaacggaagaaggaaggaaggaaaggaaagttaagacaagacaataaaagcagggagcacatgacgaaagagtaatacgatcaaagagcaacggtcatggctgattcgcctttatcatgtctgagggaacaagaaggagctgtgtaccagactgtggcaccgtagccttattggtgctgatggtggctttcatatctgcaccaggagatattttaaaaagtaagccatgtgctggcctctgtatagattatrtaagctgtccaaggtgtttcaggatatatatctctctgaaaatatggtcctagactttcctttgtrttattttttatatttgtatttgcgtagctttcaaatgcagatgkcaggtttccttacaaaaaacaatttatgcaatatatgacttttctgactgtgatgcctgtcctgacatggtgggcatgatcctggccaagaattaagaatcttaaatttgggccaggcgcrgtggctcacacctgtaataccagcacttggggaggccgagttgggtagatcatgaggtcaggagatcaagacctcctgtctaacatggtgaaacccccatctctactaaaaatacaaaaaaattagctgggcgtggtggcacacgcctgtagtcccggctactcaggaggctgaggcaggagaatcgcttgaacctgagaggcggaggttgcagtgagccaagattgcaccaccgtactccagcctgggcaacagagcgagactctgactcaaaaaaaaaaagaaacttaaattttagaatagcagtgaasttgtagcttctttcatttcggcatatgttgctttattgttttaaaaatattgtcagcctagacttttggtagtcagcttttattacagatcgatgttgctattttataaatgttcaaattcactttttgtctgtaagactgagctggcagaattatggaatggaattaaagtttaaaaatccacctgcttggataatacatgttggttcacacgcatcagaatctatctgggaagaaagccttttctttttcttctttcctttgagccatggtcatttttaaccccatccacacagtggccaggcatcctgaaactgctgaaaggtgcctcattcacacacccttgccatgccctggtgtgtttctgccggttgtgttgccacgagctgttgttgtagaggtgtgtgagcttgtccccgaccgtgtttgcygtgtttgtgacgtccgctgtattgcctctcaggggagatgtgaagtgaagtgggaaggtgactggaacctgggcccatctgatgaactagaagagtgagagggtctgtatcacagaacacagacagtgctgtgtgcttccttcatgctcacactgaatgttaacaatgctttcaggattctcagctgtttcttctgaactctgaagaaaagtgctttgttcgtttttgtgtttttttgtttttttttttttgagatggagtctcactctgtcatccaagctaaagtgcagtggygtgatctcagttcactgcaaactctgcctcctgggttcccgcgattctcatgcctcagcctcccacgtagctgggattacaggcgtgcgccaccacacctggctacttttttgtattttgtatttttagtagagacggggtttcaccatgttgtccacactggtctcgaactcctgacctcaggtgattcacccactttggacacccaaagtgctgggattacaggcgtgagccactgcacctggccgcgttgttctatttcaggcatttcagaagcactaattagttatgggttttgggttcttgctgttggttggtttattaattaagtaattttgctagcttctgaaaaatgtcttggtaaacctatctaggtgccatcaacctggattaaatttacattaataatagcaataataatggtaataatggtgacgatagagataatagttaacagtgtgaaaccctgtgctaagcacgttgacaaggagttttttcttttgacgtgcatctatgatatgggtgttacaatctctgtttttcagatgttgtattgagagtaaaaattaggtttataattaattgttagtgctacattcttcttaaatggaatcacatcaaaaattttaagtgtgtatcactttaaaaatttttaaaccatctctatgatatgggtgttacaatctccgtttttcagatgcaggaacctagacacagagaaaaagtgccatgtaaaaatcacagggctggtaagtatttgaggcagttcgagcccacaggctgacttctaaggccataccagaagttagcttttggataggatacaaagaaatcttattagtaatatttcagagactgtgaggcctataaaagccatgatgtccccctggccaaacaacaacaacaacaaaaatcagggccaggcccaatggctcacgcctgtagtcccagctacttaggaggctgaggcaggaggattgcttaagcccaggagtccaaggctgcagtgagatatgatcatgcccctgcactccagcctggccaacagactgagatcctgtctctttaaaacaaaacaaaacaaaacaaaacaaaaaatcgtcttctctctaggtgctgcctctgattctgcctctgattctttcctttaccttctcttcccattcagtgcctcctggtagctagcttgtggtaaagyctccatttactacatcatatccaattacattctgggtagcaaagaccatttaaaaacttaaggttcactctttctataattagtgatgaatgggaactgcctctacaggcctcagaaatattgagcaactctttttatatttgtttttatggtccaggcttttcaccttttattattattattggattcctttgttcttgaaaagcaaaattaaaaattagaacacactatttccttgtggcagtatgttattacagctgctttagtttcaggtttttttcctgtccaaatgtggtttattattttctgctaacatttcaattgtaccagcatcctaaggctattataagaaaggttatcattttagaattagaaagaaataaaataactctttagactatttttatgcttgtggattttgttgtcatttttaatatttctcgagtgttttctgtatattttgtactgtgcttagtagatcatttctttcagagtaaccaaggtggggatttaggatttctaacttttaaatttctctttctgtccttgagtttccagcctttctttggcacagtttctttgctaaacattgscatttccctttctaaaggattggccttgtagcacagtttagattaattagtgtgaaggagagatggattgggacccttgggggagtcatgtcttgtctttgcttgttaaaagacctgtggtggtcattgaaatgcacctcccagcatgccctccgagggtccaggctgatgggattgccgatcgcctgcagctgtcagcttcttggggaattgcctcagctgcagggagcctccttgcccaaagacatgcccttcctggggcagcccacatccgaagactgaatgtggcaagaatacaaaggccctccatgggccattctgatgggctgtctgctccagacctctggcaaggtaaaggcttcattggcctgactgtagttcgttgacttctccctctgcccagtttgctgccactgtcttcatccacacgtgttgattcccttcagataacgtgcttgccagcccaacctgcatagggacctatacatggtcccatccagcagaaacattctagggccctgtgttgtgagtgatgtcctggtcagragtgaaatcacttgatcatgtgtaataaggaatcacgtcttccataccttttcatatttttttatccatgaggctctattagtataaatgaagtgaaagggatcaagagtaagaattagatttataattaattgttagtgctacattcttcctaaatggaatcacatcaaaaattgtaagtgtrtatcactttattaatttttaaatcagctcttttgggctggctgctgttgcctggcttggggagtgttatccttctcagagtactcctagacagcgaagtagccaaggcagttgttgcattcaagcaattttgacttgtctgtactcgcctcgccgtagcttagatgtagtctagagcaggttgctctttccgataaaaacgggccaacaccttcaacctctgagacttgggatcattaactgtgaaaagtgaagtgcctcgctttaagccagtggagggactcagtggaaataagacaccaccctaggaatcaggtggagagaggcctaagacacacttttccttagatgtctagtgaagtgggaaaatatatactagggttgatctgttggggctaaggaattggtacaagggaacctctttagagaaaggttgagatagcaatagttgagctgaactataatacttttaaggagcccagaaaccttcctgattctatggcagttgggcagaggataacagagaggttcactaatctagggaaataataaattgaaattgtttggggttttatgttaattaaaataaaattattggatcttaaggtacagagaaaaaggcactgaaaattttagggctgctgtaatgaaaaccatcagtgtgcctggaactacacccattgcaaactatttttactggtactaataactctcaggtggttggtatacaggtgacctagaaaccattaagatttagggagagagggaagattctccttctactctttaggttcatagaaagctcaatttcctgattgatttcagccacttctcttctggcctgtcttctagctctactaaggaattgatcatcagcataaagttagttatcagaactctgttatcaaccactttaactccttcactcctttgacttgcactggacacttgatgaaaacctagccttgaatatgtgcccaaatctctttatgcttccccctcctgtagcagctcagatttgccaccttagccaggtcaaggttggtggctctcttctttcttattttggtcagctcactgtacaaatccctttttttctgttattccacaccattttttcagtctccatttttctattctttgtcagaggataagctgtattttactgagaaaatctaggtgactggctgtggattttgtgcttagttggactgctgattaccagcccatcggtttctctagaattttgtttcatcagctttaaatataccctaaatgatgtmatctcacaataaaacaaacaactaccattatttgatgatccatctttctctggaaacttactgtccttttcagctacagtttatgaaatataccttccaattgctgcccgacagaggcagcagtggttagttcattctaatggtttctgttgaggtcacgattgatttccaaattataaaattcaacagattggggaaaacacttattatgctgaatctttctgcttactcttttgtttattgaattataatgggcttccaataaactaaagtgtacaatttgataacttttgacataattatacacacactaaaccatcaccacaatcaagatatactcatcaccccaaaacgtttccttgtgctccytcaccgtccctctaccacctcttctgcccactctccctacccaccaggcctaggtaactagtgatctgctttctgttactataggttggttaccattttctagatttatgttcaaggaaatcctattgtatgtattctctggcttctttcactcagcataattattttgagattcatgcattttgtagcgtgttatcaatacttcattcctttttgttactaagtagggtattacattgtattgatattccacaatatgtgtattcatccacctattgttggctatttgggttgtttccaggttttggctattgcaaatgaagcttctataaatatttgtggacaagtctttatatggacatcgcttttttttttcttgagtaaatagctacaaatggaatggctgcatggtaggtatatgactgttttttttttttttttttttttgagacagagtctcactctgtcacccaggcttgagtgcagcatcgcgatctcggctcactgcaacctccgtctcctgggttcaagcaattctttgcctcagccccgcgagtagctgagattacaggcacccgccaccatgcctgggtaatttttttttgtatttttagtagagaccgggtttcaccaacttggccaggctggtcttgaactcctgacctcatgatgcacctgccttggcctcccaaaatgctgggattacaggcgtgagccaccgcacccggccatgactaacttttaaagaaactgtcgaactgttcaactgcttgtaccatgttacatttccactagcagtgcctaggagtggaagttgctcctcatttttgctagcacttgttatagtcattgtaattttagccattctgataggagtgtagtggtatctgattatgattttaatttgtattttcttttcttttttttttttttttttttgagacagagtcttgctctgtcgccaaggctggagtgcagtggtgtgatctcagctcactgcaacctccacctcctgggttcaagcagttctctcccacctcagcctcccaagtagctgggattacaggtgcacgccaccacgcctaggtaatttttgtatttttagtagagacagagtttcgctatgttagctaggctggcctggaactcctgacctcaggtgattcacccacctcggcctcccaaagtgttgggattacaggcgtgagccaccgctccctgcctaatttgtgttttcttagttgatratgatgctgaatattatgtacttatttgcattcatataactatttggcaaagtattcaaatattttgcccatttgttttctttcttttttttggtcttgctcttttgcccaggctggagtgaagtggcatgatctcagctcactgcatccttgacctcccaggtcaagcgatgcrcccacttcagcctcccaagtaatggggattacaggtgctcatcacaatgccagttaattttgtttatattttgtagagatggggtctcactatattgtccaggctggtcttgaactcctgggctcaagcagtctgcccacattggcctcccaaagtgctgggattacaggtgtgagctattgcgcctggccctattatctttttattgatttttgaaactgtgaattttggatatgattcttttgtgggatgtgggatttgcaatattttcactcagtcttttcattagtgttgttcctcaaaaggcagaagttctttaactttgatgaaacccagttaaccaatttttttcttttatggattatgcttttgatattgtttctcggacatctttcctaacccaaggtcacaaagatttttctactatgttttcttgtagaagttttatagttttcagttttatatttagatttgtgattcctttgaagaattttatggatgatctgaggtacggattgaaattttgttttccatattgatatccagttgttccadcatcgtttgttgaaatgacctttccttctgcactgcaaagtcttcgtaccattgtctggaatcaattaaccatgtatgtctggggctatttctggactctctattctgttccatgcatctgttatttgtctatcttgacacaatacttcactgtctttatcacagtagctttataatgccttaaaatcggttaaattcttgtaactttgttcttttttcaaagttattttaattagattgtttacatttgatgttattattgatgttgttggattgaaatgatcattttgctatttgctttctatgagtaacattttttttctttgttctcttactttgtttggattaattgtattttttattattccattttatttcctttgtcttatgaggggtaactttttgttttgttattgtagcagttgctttaggatttacagttatcacagtctcacttcactttgagtgctgttaccccacttctgtatagcgtaagaacagcagacttccctgtttcccatcttggcctttgtgccgtcacatattttaattcttatgtatactatcaactcctaaatacgttatgattgtttttgctttgaatagttgatcagcttttaaagatatttaaatagtaagaaaagtctttatatctcctaggtccttaccatcttcagtgctcttcatctgggttcccaactgatattttccttctgcacagcagaaggtctgcttctgctagtgatgaattcttttgcatttgtatgtccataaagcttttattttgcctttatttttgagatattttcactgggaaaagaattctagattaatagttttttttacctctgtgtatttatttttgagatagggtcttgctctgtcacttaggctggagtgcaatggcgtgatcatggcccactgcagcctccaagtcctgggctcaaaggatccttttacttcagcctcctgaggagctgggactacaggtgtgcaccaccacaccccgctaacttttaaaataaaaaaaaaattgtagagagatggggtgtcaccatgttgcccaggctggtcttgaactcctggcctcaagtgattctccttcctcggcctcccagactgctgggattacaggtatgagccactgtgccctggcccttttagttttttagaggtgatattcctagatctcttctcacttgccctgtttcctgtgagaaatctgctcttaactttgcttttgtctttgtttttctgtacataatgtgtctcttctctctgagtcgttttgcaatgttttctttgtcactggttttaagcagtttgattatgatgtacatagatacagttttcttcagatttcttatgtttggaattggttgagcttcttggatttatatttttcgtgaaatctggaaaattgtggtcaattatttcttcagatactttctgttactctcctcctttaggtactccacttgcatgtgtatgtggccacttaaaacttttccactactggtgctctgttcatttttctttcagtgatttttttttccttctatattgcattttggataatttctattgctttatcttcaagtttaccaatatttcttctacagtgtctaattttctgttaactccttcctgtgtatttttcatctcattcatttgcttcagtttggatctttttaatatcatccctgtttctacttaacgtgtttagtctttcttctagctttttgaacataacgaatatataatacatattttaacacattttttcctactaattctgacatctgtcattccttggtgaattgcttttgattcttctgtactttgtattatgtattttgtttctattttgcatgcctggtaatttactataggatattgccaaacattgttaattttaccttctgatgcattggatattttttaccttcctaatatccgcgagctttattctgggattacttagaaacactttgatccatttaggtcttctttttaagccttactaggcaggaccagtatagagtttcgtctggggatagttttgcccactacctatgcgagacctgtcttagctctgtaaccgataacccgtgaattatgaggttttccccttggctgttgagaactgrcactattcctggtcctgtgtgagctccaactttattccctctaatccttttgtgtggtttgttccctgacctcaggtagatttttcaacacacatgatsagtgttcagttgaatgctgaaggggttcttctgcagatctccagagttcttcgcgcagctctcttctctccttyactctgccctgagaattctagctatcctgacttgtccagactcccggctctgtctcctcaaatcaaggagactnttgggctctcccatgttctccttaggtctcacccctctggggggtctgtgtccttggtcacctggtgtcctctgttttgagtggtgtgattttatatatttgtctttttattattattattattattattagtttttcatatggaagggtaaaactggtttattattccatcctgtccagatgtggaagtttctctttttcatttgaatcgtttggctactccttctggaccttccttcctgcaattttctattacatctcattcccctcttcgccttcattatattcttacatctctctcatcacttactctctgtgtcttttttggtcttcttttctgatgcagcttaatgtttgtgacaggaactctttgaaagggtggctggtgttttccttctcagagaagaatttgactgggagatggatacaatcctaaagatgcatttttagatctgttttacaaaaccagaatttttatgaattttattttctagaacacatcagtgaattgtgctttcatgtatctcttaagatatctaaaacacacttattttaaagtctcagattgtttcataaaaataatctcaactgagktaagttaatgtttgattatttgttctgctggctgtattacttagcattagatttgtccatatgttttagaattttgggttgcagggtcatattcagaggaaggtttttttgttctttwccgtttctctgttttcttcgttcctgtccttctcccccatcccccgtctcttactattcaccctataagtggatttgcaggtgattccacccaattctctaggcttgaaatccagagtgagatttcccagggatccatcagatgtctagcacccatacaatgaggggatggagctgatcctaggcctatggcttggatccctaatcttaaagctccttagatctacagccccatgctgcatttgggtgacagtatttgacttccttctggcaccgtcatggagcttatcccatcccagcctctgacttgaagctttttgcctccctcctgccccaagcccacagtgtrccatcctgcaggaggcaggctcctggttcttcttggttgtggacyccaagcccagcaggctcactttawcctctcttcctgttttgcttctggcctgtggaggtttacattttgtattagtccattttcacattgctgataaagacatacccgagactggaaagaaaaacaggtttaatggagttacagttccacctggctggggaggccttacaatcgtggcagaaggcgaaagacacgtctcacaaggcagcaggcaagaaaagagagcttgtgcagggaaactcccatttttaaaaccatcaactcttgtgagacttattcactgcaacaagaacagcatgrgaaagacctacccccatgattcaattacttcccactgtgcccctcccacaacacatgggaattcaagatgagatttgggtggggacacagccaaaccatatcattccatccctggcccctcccaaatctcatgtcctcacatttcaaaaccaatcatgccttctcaacagtgccccaaagtcttaactcatttcagtgttaactcaaaagttcacagtctcaaatctcatctgagayagggcaagtcatttttgtctatgaccctgtaaaatccaaagcaagttagttacttcctagatacaatgggggtactggcattgggtaaatacagcctttccaaatgggagaaattggccaaaacaaaggagctaccaggccccatgcaagtgtgaaatccagtggggcagtaaaatcttaaagctccagaatgatctccttcaacgccatgtctcacatacaggtcctgctgatgcaagaggtatgttcccatggttttgggcagctctgcccctgtggctttgcagggtacagcctccttccaagctgcttccataggctggtgttgagtgtctgcggcttttctaggtgcctggtgcaagctgttgacttccttctggcaccgtcatggagcttatcccatcccagactctgacttgaagctttttgcctccctcctgccgcaagcccacagtgtgccatcctgcaggaggcaggctcctggttcttcttggttgtggaccccagacccattctggggtctggaggggtctggaggacggcgtcyttctcacagctccactaagtggtgccccagcagggattctgtgtgggggctcctacccaaaatttcccttctgcactgccctagcagaggttctccatgagaactccacccctacagcaaacttctgcctgggcatccaggcatttccatgcatcttgtgaaatctaggtggaggttcccaaacctcaattcttgacttctgtgtactcacaggctccacaccacatggaagctgctaaggtttgaggcctgcaccctccgaagccacagcccgagctctacattgacccctttcagccacataacaactgggacacagggcaccaagtccctaggctgcacacagcatggggaccctgggcctggctcatgaaaccactttttccttgtaggcctccaggcctgtgatgagaagggctgccacaaagacctctgacatgtcccagagacattttccccattgtcttggggattaactttcaccttcttgttacttatgccaatttctgcagccagtttgaatttctcctcagaaaatgggattttcttttctatcgcattgtcagcctacagattttccaaacttttatgctctgctttccttataaagccaaatgcctttaacagcacccaagtcacctcttgaatgctttgctgcttagatatttcttctgccagatactctaaatcatgtctctcaagttcaaagttccacaaatctctaaaacagaggcaaaatgctgccagtctctttgctaaaacataacaaaagttactttgctccatttccgaacaagttcctcatctccatctgagaccatctcagcctggacttcattgtccatatcactatcagcttttggtcaaagccattcaacaagtctctagggaatttcaaactttcccacatttttctgttttcttctgagctctycaaactattctaacctcttcctgttacccagtttcaaagtcacttccacatttttggatgtcttttcagcagcgccccactctgctggcaccaatttactgtattagtttgttttcacactggtgataaaaacatacctgagactgggaggaaaaataggcttaatggactcacagtttcatatggctggggaggcctcacaatcatggcagaaggtgaaaggcccatctgacatggtggcagacaagagaagagagcttgtgcagggaaactccygtttttaaacccgtcagatctcatgagacttattcactatcacgagaacagcatgggaaaacctgcccccatgattcagttacctcccactgggccccttccacaatgcgtgggaattcaagatgagatttgggtggggacacagccaaaccatatcaccttttatctttcaacttagactatgcctgtttggttctctctctctctctctcttttttttttaaatcataaatgtcactgttgtgtgttaggagaacaaggacacagaccgtgccttcttggtctcatgagtgtgctttgtgttggaagctgagttaatgtggtgttgcactgtctgctccagtggagggcagcatggggctgtgctgtcccacacacctggttctgatcctggcatttactctctactgtaaactgagattagatacgtgakctgttgcagtcacatttccctcatctgcaaagtgggaatgagagtaacgattgttcagtgtatatgccagcctcacatcagcgtaagcatgaagtgagagcaggcatgggacgtgtttagcacagtgcccagcatatagtaaatgaacagtaaatgtcagttacccaggaacacaatttagacatgcttattttttcatattttattaaaaagtgagatgtttcagattatgagctgaatttcatgacattcaatgaaaaaaaatacccactgagtgttaatgagctgctaggtactgtgttaggctttttacacacttccccatgctgaattgtcacagaaactctgtgagatattcttatttttgacaaaattgaagcagtgcgaggttaagtaactggcctgaggtcactcagctgcaagtgataaagctgggatttgcttctagatctgtgctggctcttagatccaggctgtcccccacccgaccagctttgtggaggctggtgtgtgagccttctgtttacaatgcctctctgtgtagcctgcagggatctgaagatagtttccttcgagaacaggttgacgaggaggatcgaggaccaaagggctgtgctgtggctctgcctgaggccgggatgctattggactgtcccctctgctgcttgatagagagcacgggagtgatcacttaccctggtgcctctgaacccatacccagatttcagaatgaggggcccattaaattgtgccatactccatttctcatttcattgtgaggtagagaaacgatcatatcatcttacgatccaagcactagtcaaaaggatccctgtgtagaggagtcccaggggaacagtgtgaaactgcacttgcacacattggtctttctgccaagcagaagaataatagctgtgggaccagttataccattgccaatggtggaggaaatcgcctgccttttatttttcccctattgctttgtgtttgtcttagcaggagtcattgtggctgaaatagtgttaatatcttctgtatgcttgggaggtcccacactggaggattttattaccctctgtgagagggaagaggtggtatttaccattaactttgtagtaggaatggttttattccacttggcactctgcagcgctggactccagggtacatggttgtgtggacgcataggatatatatggcgctcttaaagagtcacagtggtggcattgccaggtttgtaaggccctagatagggatgaagtgtaggtcatgaatgacttcatgctgcgtgtgaggtgggctttggaaacagaatcagtatttgtattcccacatggatgcttcaggccttaaaagtgcctcctcttccttatgactgccagccacatttactgagtccagaagacactcttttcttctcttaggggagagacgagatgtaaacagcaagggcaaggaaggcagccctgggaatcgtgtctgtgggtactcaactgttgctttatctaagtgggagctgcgtaagagggtcgagctggtgttcttttatcagcaaagccctggatctttgtctgggacctacactctcattgtattcttccaccagttagttctatggccttggcgcctgtggaaagtattgagctaatgttagtgcaaaatattatacaacacctatcgagggcgttttggcaatatttattaaaatcataaaagcatttactcttcaactcaacagggtatttagtcacagcattgctttcagtagcacaacactgaatattctccaagtgtgtatcagtaagacttcttatatgaatgtgggccacatgcaggaatctttggtaggagtaagaaaaggactgagggcgtgctctatgcattcatgtggagaggcctccagacacatcattcagtgaaaaaagcgtgrtgccgaataaagtacacactatgctgcttgttatataacaaaggaaggaaaatagaaacagatatttgtattggcttaacatctggcagtaaaaaggaaaccctgagagtttaccgtaagggtccaggagattggggtaagatgggaaagggaggtaagtgagacttctttgtcatgccctattacataatgagatggatcctgttatagtattttgattttgaaccttgtgaacatatttcctattcaaaacaaaacaatttataaaagaatgctgttagagcactattgaaacatcatgaaaaaatgggctctatcaaaaggttgcgggtcttcaacagaagcagaatagatggaatcatcagatgtctttgacagtggcggctgcacgatttcccgtggttagattgtggttatcgaggatgatcccagctctttaagaatttgtttccagccagagagtcccctccttcctttttctttccacgttcctttccttccttggatactagctgttcagaaagtgtgagtggcaaccctgatattagaccactatattctactatttttctggtgtcaactgagggaaaatctattttgaaaataatgccaaacaccagtggttaatggcatatttgttcagttaattttaaaaaattattcatggagggtacccctggtttggtgtagaaaatcactggtatatgctctagtttgggccactgatctttcaaaatttagattctaccatctgtggaaggcagttctgataggaaagtcccatctttaaatacaaacggtatgggaaacagcagaagaatctctttaatgagtcaataaatcagggaaatggaacgtgatgtttattcagaatgagatccttaacgaaggtgggatggaatggaatgacgtctacttaaatgtttatagtatgtcagacagagtgctcaggcccttcagggattggtgggaagagaccaaacacacacacacacacacccgccctgcamgtgtccctggctggtcttgccaaaggtgcagaagtcgggaggctggtacacagagcaggcgaggtacagtgctgccttccccatccctgtggcaggtaatgtcctgctggagttgagacaggcttagaattctygctatacctcttccatttgggctcatgtcactgtcctggaggwatttctacttatttctgaagtcccacttgagtgattgcttctggactttgggctctcctcattcttgaacaaactcaacatccttattcagaggagaaatttgagtcagtgtccagatctccaaagaggattgctgcctcttgagaaaacctgggctcccacagggtcttttcttgaaaccactgggtgagggcaatcattatccacggtgtagagaagaggcaggtggggctcaaagaggataagtaagcttcccgcggtttcacaggaaaaatggtagaaggctgaggcttgaacccaggtgtggttttttttcctaaagtatactttcttttatgtggctctaggctgaaaattgaggtgtataatttttgacagttgctgtaatctcagagttctgaagccgttaaaaaagctctgagcttcatctgtgtggtttaggaaattaaaagacacaaggaaataggaaaaaaaaccttggcattattttccactagatatatagttcatatatgcacttaattttcctctatagccccaataagaagttagtcttatgcataatgaatccatatgatttggatatgcttactgaaaattctcctctattaatatataacacaaaatacgtaatttttagtaaatattctgacttctaatacttgacatgtgaaataagtcacactcaacatagttttgagctagttatttggcattgtatcttttaatacaagaagcatgtcaagatgctttttcaactagatataataatacctacagtaattttgagatcatagattgaaaaacaagaagaaagtgtattttgggggtaatatcaaagtattcaagaaataatttcactaccaatgatttttttaaaaatctctgttaatgtgtcaatgtaacaattaattaatttatttatttgagactgaaccttactctstcacccaggctggagtgcagtggcgcaatcttggctcaccgcaacctccacctcccaggttcaagcaattttcgtgactcagcctcccaagtagctggtactacaggcatgtgccatcacacccgactaatttttgtatttttagtagagatggggtttcaccatgttggcaaggctggtctcgaactcctgatcttaactaatctgtccgcctcagcctcctgaagtactgggattacaggcatgagccactgtgtccagccctcaatgtcacaaatttaaattgttaaaatgtgtaagaaaatatggtatattgggaaaaagttcacattaatataatttactttcaaataattactatttatgtttgaagtagagacacagtgtactcaaaaatagtgctttgcaaattttggccttttttatttttagttgacacatcattgtacacatttatggggtacagagtgacattttaatacatgtatacaatgtgtgatgatcgaatcagggaaattagcatatccatcatgatattctcttcaataaatgattctgggcaagtsctgtctttctcaccgtatacaaacccaactcaaaatggtttgaagacttaaatgtaagacccgaaaccataaaactactagaagaaaacagatgaattacttcaggacattggtgtaggcaaaggttttatggataagacttcaaaagcacagattttgacttttgtctatttatgtgaaagaggcaaatcttaaaaactgaagaagtccttaaagtagcagaacaaaggaaatgaatggtgtatagatttggcattctttgtggggtcatgtagattttaaaacgaaactgagcagaggatctcagggggtaaaaaggattaaaaacttcctggtctcattagacacaacttttaccagtctgtgttttctgttttagttactatggtagtatcaatagattctgctccattaaatygttcgtgtttatcatcttggtggattctgaaaaacatcggctaacgtccctgcttttcttgctttgctatctgtagttttcactgtggagcagttacccacgttgttaccaaaaaagacacctgcaggatgattgaggaagaagaaactgagggcttgtggtggctgagatcttaaaccaaaaaaagagcaagggttgataaaacatattttatcttaagaatttgttcaacattacagaaattttcaatccaaagctataattgttttttctcattatagaagtggtaaaccaaaagcccttcagtgaaggaaggttcctggagaagggagagccatcacatcacttctcagttctatccttgtgttgtgctgacgccatcagcaccagcagctctagtgggtgtgtgtaaacagggacctgtctctgcggagacgcggcttcctatgagaccatatgcagtagacatttagttagggtttaataaacattgattatggaatgactttaatcaacacttgtaattgttttcagtgcttattaatgtcttgaaatgtcttcctcttggactagggagaacctaagatattacagttgtgagagatggagttgtataactgaactcttccatatttatttaacctatccaaaatgatttttttaacagaacctaagagcaaactgagaaagtaaacttgtgtagcacttactttaccactgtgttccaagcatttaggtaatgtttaattacataaaattaattatatttaattatatgaaatcatgatgttaaccctgagtcctgttcctgcttttggtaaaattcaggccaaatatccaaagccatgtacacaaaatatattgttccaaactgttgtcataaaatgttttccgcttacgtgccaagagttataaaaaaagaaagatagaaattattttgtctgtcagtccttctgcactcacttccatgtcccaagacctcacayatttctgtttgttagcaggattgtctctggtgctttttacaaaaatattgatagggaattgttggtcccaaagatgggcagggatacaggtgtataaatcccttcttctcagaatacagtcccaaataagcagtggctctgygtgtctgagcttccacacagaaaagtcgactactcaggggacgtggggacagttctccaacggcctgcaacaagaccagcttttttttcccagttagaaaaagtgttgatgcgatctcggcaataaaaaggaatgaactattgataggtgcaacaacacaggtgaatcttaaaataaccctgatgaaagaagcaagaaaaaaaggagtacattctgtatgttttcatttttataaaattctaggaaatgcaaactcatctatagtggcagaacaaatcagtggttgcctacagatgtggggggtcaggagaagagtggggcagtgggcaggtgggtaggattacaaaggggcatgagaaagctgggaggtgatgtttatgttcattgtcttgattgtggtgacagtatcatgggtgcatatctgtgtsaacatttgtcacattatacactttatatctgtgcactttaatgtttgtctatttaacacagagaaaataagagggggaaatattgtattactgttgtaaacagaaatcagttgacacttgtcatagacagcagctaagaaggaaaataaatgcaattaaaacaaatcaattaaagaaaaatctgccttctcctgtggaatctgggccataggaaagcctcsctgtgtttgataattacactcttgtctaatgtttgactctcaaaatatcttttttgatgggcaggcaattatgttttaactgtcaagagctgggttttggggccgagtgccgtggctcctgcctataatcccagcactttgggagtttgagtcaggaggattgmttgaggccagaagttcaasaccagcctggtcaacacagcgagacctcatctctaaagtaaaaaaagtagagaaattagccaggcatgatgacgcgtgcttgtagtcccagctactcagaggctgagccaggaggattgcttgagcccaggagtttgcagttacaatgaactatgaytggggagccactgcagtccagcctgggtgacagtgtgagatcctatcaaacaacacaaaacaaaaaaacaacaagagcaagagcaggggttttggagttgggcagacctgggtttggcacagtggcccagtcacctgctagctgtgggactttgggcaagacaattgccttttttttttttcccgaatctatgaaatgggttggtagaagcatagtaagtcctcaatagatagaagccatttttgtcattatttttatttgcttcacattttgattcccacaagatttaacatgcaggtagtttggggtgagaacatatggtatttkaaattcacaagagggcatgttcatattaccatggagaatcgagtcctttagcaaagtgttgcctaaaaaaagaagaggtcggcacaggaagggaaagggacacagggacaggaacacaggatttgtcaaaatgcccacttttttctgtgttcttctcagtgggcatcaagctcctaggtgaccctctgatatggtttctctgcttttagtgacctctgctctttgcaggctttaattgttttgaattcattagtcttttcccttgttaaatagtaaggccattgcttaaattacagcactttttctcaaaagtgctgtatttatgtttgcttatttagaaattcattctggcatttagcatgtgctttttaatcattcatctgtaggaaaaatgttggactttaaaaatgttttacttaagattgactgatagatttggtttaatctgactttttattagctttataaacttaaaaataatatatatatttatatatacttatggaagtaaaagttgatcagtttatcttgaattggtcatattgttgatatgtaagtttggaggaaaatatagtaaaaatatactctctttaactctgaaataatgtcattttcatgtatagaaactaacagaattacttgctttcccatgatcttggcctagtgttttcttctgccagctggtggcagggatttgacaagtgattgatttggttgcagagggtcctggaattacgcaaagtgttttttatattggagaagacatgcccagtttttcacaagttttaagatttattgcctcaccctaacatgttgcaaattagtttatttgctatttattttactcagaatgtagtaattggtgtcattagtagaagggaaaatttgatcacaagaaagggcagacagctatttaacactacttatttgtttctttggcaactttgcagagctggagataagatgggtagactgctacttcccttttacacatccttcctttgagatggagatcarctttcatggagaatggctggaagttcttggctgcggggtgatggaacaacaactggtcaattcaggtaaaaaagaatcccacattttatttacacgtgctctaaaggaaccctcccttctcaggcagccccgttgcacacttgtagatatttacatacttctatgcgggcagcggcatcactggtctctcttcagattcccctctagatttgtctttgatactaagccctrgaaaaacttatttctcacatccgtatttgcaaaggctctttgtctttggagatccaccttgtcagcacttggctgctggatttgtactttgtgatttcgtatttgttgatacgttgctttgtaattgccccaaagacatttgctgcatgtcacaggagtgtagtttgtctttcagactatttaagaacaaagacaatgcataatccatttttgttcttactgcacttagtatagtgtcccaaattcagcaagtattttataaatacactaaaacgcagtgtaaaaacacttaggcccctaatgcttaatccatcacctccctctgcataggcggcgccacctgactgagagaaaatggaaacacgaggttgctgattgaattctacgcatatctataggcatttcagaaagatctgtctggctcttttctgtaagaccattgcttaataaaaatgatggcttctaaatgtaatttcagagctgtgaggtttctttttaagtcactatctgaattgagtaatttttaagtcactatctgaattgagtaatttttaagtcactatctgaattgggtattttttttaagtcactatctgaatttgattttttaagtcactgtctgaatgtaatacttttttgaagttactatctgaatttaattaaaaaatttaatataatttaattaattaaaaaatattacaggctcgtgcactttaggaggccgtcccagcactttgggaggctgaggtgggtggatcacctggggtcagaagtttgagaccagcctggccaacatggtgaaaccctgtctctactgaaaatacaaaaattagctgggtgtggtggtgcgcctataatcccagctactcgggaggctgaggcaggagaatcacttgaacccaggaggcggaggttgcagtgagccgagatcgctatactgcagccagcctgggcgaaagagcaacactcagtcttaaaaaaaaawatatatatatatatatatatatatattatatatatataatatattatatatttatatattatacattatatatattatgtattatatataatatataatatattataaatataatatataaaatatatattatatattatatatattttttatatataatatatattatatatattttttatatcccaatcatatatatatatatwttttttttcagagtataaatcctccaaaaaaaaaagggaaagttggtttggattgggcatttgagctcactacataagcagtgagcaccaaattggataggaactgatgtggattgttcaggaaacctttccggctctgctcccttagaaggacatttgctgcttggccttggagggcagctctgagtcagggttcaccgcccagcctcctgtagcagaatgaagagaggtccttcttggtaactaagaaatgtgaatagaccatgggtaaggatatgatatctggtcatgggcttggaaaatgaggatgagcagagagtgacgagacagggtgcatgaagtgcaggagcttgtgttacctcggctgggagactggaggcctggccttcccttcttacttttaggtactctccatctgcaggggcctggactccacaagctcccagattcttcttcatcctgctgaggaagcctcaggagaaagcccagcacagggctggaagcttcgtgggcagttttaaaataggtgaagagctgtcctagaggagagggagcacagaggttgacatcaggacctgggaggagaagttgtgaggcctgggcttgggtgtctggaaacccagggtttctgttaattaacagctgtgtctctttaggcagggttcatcaccccacgagccttggctttctcatgcttaagatgggtgcaaggatacaccctcagagttccattatggggatagattgaggggattcctctcaagtgcttagcaaagggtctggcacacagcaagcattcagtaaaaattaactgctgatgttgttgtacttaaaatttttctaatggctagagccatgtgtcaacagagggtccccttagtaggaaatatttaaacagaagttgttcctgcctgtgatagaaacaatttctaaccaagtgtaatttgttacctctttgacctgtagtcatgtctgtgtctgccattttatgctgagtgagtgattttacagggaaaaagaaaagtaagagtaataaacaggaagaaaaggaaaatcagcctaacagttgtatgtgcatctcaacagaaaacataaaatactgggcgtgaatatgaaagatttaatctctccttgagtaggagctgacttcaaatacctctgtgatgatttgatagttttgttttttagaaaaagacttcaatgactactaggcttcctcccaggagtgcctggtgtcagggggctgaagctcagaaagcaaatcagggatgatcagcttacacatcagttgttgcttggaattgcgcttccttgcacggtttccaatatccttgatgggtttttatgaggtttattcacacagtaattggctgaatattgttatctgaaacagatttccaagtcattattgcacgttaatgaggctgctgttctgcaattagatcagccacgttagatattcttgaatggaatggcaaagtgaaaaagacacctaagtcgtaaatatgtttcagagattcgcagtgatggtaggatgtgctttgagttttggggaaactgtacacataaaaatgaattaattaattaattaatttttgagacagagtctcgctctgttgcccaggctggagtgaagtggcgtgatctcagcccactgcaacctctgcccccgctgggttcaagcgattcttgtgcctcagcctcctgagtagctgggattacatgcaccctccaccacacctggctaatttttgtatttttagtrgggattggagttcaccatgttggccaggctggtctcgaactcttgacctcaggtgatccacccaccttggcctcccaaaattctaggattacaggcatgagccactgcgcccagccataatatttaaattaaatatttcacaagagaaggaaactaaggaaatggaagaagagacaattttatagaacggattctgtgtagactttgctatttgaatttgaagttattatgacaaagttctgctctgtgttctcaaattcgaaggtgtttggatgtctgtagttaaaatctgtaaactgcctggcagtcactaaccacagacatttgtaagtgcagctaaattttctgttttttgagttcttatggcgtggagaaagaccgaataggtatactttatcccactcgtgcagttccgctrttctttccatctcttcttctatatttgctcccctgctctcccttccttyttcctccctgcaccctgctcttcccctctctttacttttcttcattcccttctcttttaaaagagaacttccaagaaacaatrtaattgatgactcccctttaaggttcttatagagaatcaggtgagtgctaaaataaccagaaaacaaagaaactgatggagcaatgatagtggcagacatcagttgagcccttcctgtatgccagcatcccataaagcatgctgtatatgctttctttcatttaaccatgataacaaggttcccaggtagatgctgttataacccgtgttttacagagccggagaaaggtaattcagatcaaatagctagacagtgctagtgaaacttgccaagtctttctgacaacagttaactaataagctatgctccccaaatagtaaattgcatgattttgaagttgctaaaaattcatttcaaataaatcattctgcctaacrtagaatgaaagaactgaaacaaaatgaaacaaatacatagcaaacaaaactttatttgttctgtagttacctctaaggaagggctatgccaccatgtgtgttctctccctgtgatagagtgtatttaattaaagcatgaaattagattgctaatttgaaaagtcagtgaagacattttattacacatttaagcaactgtggcatatatgtgtttttatgtgtggaacacagctcttttaartggcttgtagcattttactttatttcttcttccttaagtcgtagtgtcttcaccgttgmtttctggatccttagactgagtgattgtgatgtgagtggtgaccgttttcaggctgacttggttgttttttccttagggaggtattttgaggacagtactgagtcacgtccccaaatactacacacttgcctcccactgggttgactcaggctgctgtgtcttttcacatagtaaatggagcaccgcgtccaaaaccatcactgggacaactatgagccgtgatcatgccaggaaggaatttaccattccttgcccctgtgaagtttagaagattttacatgggccaagagggagaagaagcttgatagttgaaaatatctttttaaaagtgaaattaccttccttacctttttgtcaaaatttaaaaatyggctctttggggaaaaccttataaataggtacrtgaacagcttccggttttgaaggatcattattggcttgcttatcaaatatttcttcaaagtccttctaaggctatagcgaagtgaatcagcattgctcctgcttttgaaaatatcacagcatacaatacacagacatacaaacaaatgattacagtaccatgtggtaagtattcataacaggggtaccgtgggcacaatgtgtggggaagagaaggattagagaaggtggtgccaggcctttccctggttacaatcaggatggaatattgatgcgatagatatttgaaatgtgcatcccagagttagttaggttcttgtttgcaaggagggatatactttctctttgcttttcctatatyagcatgaatctatttccagtctgtccctgtctctggtagttgatctctatagcctctacacatacttaacatggttcactgttgttgatctcagytggtgaatctgtaatagcatggaccaaggctgtactggtaataaacatgccttttatataattagtgtcttttgtgtgcaaggcactgtgctggacagaggaaattaggaaaatggatgaaacacaccttctccctgtgaaaacttgtagttctgtgtagtagggcagataagattatatcgttagaacatagtcatgcatataaatgcattttgtgagaacgagctttgtgagatgagaaaagggaactatgtctgtcagttggatcagtagagacttcataaaggagatggtctttgaattgggccttaagtggtcattctcagatgtgtgactagtaattacttggagaggttatttaaaatgtctrttcatagagcatcagagtctggaggtctgggatggagatcaagatatgcatattaaacaaataccctagataattcttacgaatgactcacattcagaccatactttgaaaaccctatctatagcataggttgaatatttttcccaatttttttgggatataattgaagtgtaatgaactgcagatatttaaagtgtccagtttgatcagttattgacatacgtatacaccagtgaaaccatcaccacaatcaagatgataaatgttttcattcccaactgtttctcatgccctttttgtaatctgttcctccacccatccctgtcttcaggcaaccactgatctacctgctgtcattatagattagtttggattttctactattttatataaatggaattgtacagtgtgtattcattatacctggcttctttcactcagcatataatgattttgagatttatccatgttgtgtgtactgtgtatcaatttattcctttttatttggagtagtgttttattgtaaaattctttgtgtggacatatatttccattctctagaagcaaaaagcctatgagtggagtgttctataaatgtcagttacatcaaggtaattgaatagtgtttagctcttctttctatgtttactgattttttggtcttagtactctatcagttgctcagaaaagagtaagattttctactatgattatggacttggctattttacccttttatctgtcaayttttctttatgtttttttgaagccatattattaggtgcatatattttcatagtagttatgttttcacgaggaattgttccttttatcattgtgaaatgtctttctttatctctggtaattttccttggactctgtttcatttatattacaatatccattcctgtcttgtcttccttcctccccagttacctttatattgttatagttacatatattacatctacatacattgaaaacctcgtgattcaatgttacacttttcctttaaggagtcatatgcattttttaaaaaattaagaggaaagtagttttcttttatatttacttagctgtttcccatttctcttgctgttcctttattcctgaaaatacatgtttccttctggttattcttttttccttcaataagaaaaactttccttagcattttttatagaccacgtcaagtggtgataatttcttagcgttattttatgtgagaatgtttttatttcccctttagtttgaaggatgtttttattgaatatagaattccggattgatggatttttattttttttctcagcaacttaaagatgttgatccattgtcttctgcctctatagttctaaagagacatccataatcttttcagtcattcttcacttgtaaatactagtatctttcctttttttwwaaaaaaattattaactataattttttactgtgctgtctttagttactttcaaggcttctacccaccccccgccccccccccatttttgtttttcagccatgtgattttgatatgtctaggtatggttttcttttatctcacacttatgatagatcttttgattttgtcccaggagaccctgagactctgcttactttttttttttwaatctttgtctttctgtttttcagattggataatttccacagatccatcttcatgttaattgattttgttctctgtcatctccattctgctgccttgatcaccaaatatatttttatttcagtgctttttttttgttttaaaatttgcatttggttttgttttatagttcctatttttcttctgagaattcctgtattttcatttctatcaagtttgtttttctttacctcatagagcaaagtgacagtggttgctttaaatacatgttgaatatccattatccaaaatgcttggaatgagaagtgtttcagatttttggattttggaatatttgcattatacttactgtttcagcatccctaactcaaaaatcccaaattcaaaatgctccaatgtgcatctcttaatgggcatcatgtccatgctcaaaaagtttcatattttggagcattttggattttggatttttggattagggatactgaacctgcatctgatagttccaatgtctggatcgtcctgtgattgacttttgttaagaattggtgatattttcctggttgtttgtaaacaaattttggattktatattgcactttctgaatggcatcctgtcatctgtggtgactgttgctgttttagtagggtgatcaacctggtgagctctaggctttgagtgggacctgcttcctaggggcagcgattcagttctcagtgtaagtctttgttgtgcttatttttgtccatcctgtacttaaggggttagtctgcaacttgtgtgagtggttcagatctcagttcagttttctcagccttttctgtgctggttggagtctgtgctgtgcgtgtgtcactccagtgtcaggctgatatctgtgcaggtttccacatagaattcgggcatcctttcctgggctttctctaccccaagatcataccctcagactcctcaactcgcagaatccctttatctgcagacacacagacaggcttctctttgagtttagttgcctgtgttgttttgcagctatgcaactggggctcacctttggggcaaaatcatgtgagaagaaaacaaagcaggaacttcaccctgtgtgggttgcctttccaagtgttgactctcctgtataatttttctgtttttttacttttcagagtcctctgttagttgtttagagattttggtcgtaatcagagagagggatagactggtgggctcatgcccccatagtggacctgaactgtagtttgggttgtgaatgcactccaggtgaaaggataattgcgtgacacacatatgtggtactggaaacgtggtggtattggctcyacttgtctatttactctgtcaactttattaatcagaattaagcctggtacatttttgaggccagttagttgagattgtctaagatctgtgaaactctggctcgcttccttcctcctgccctcccttccttctccgttcctttctttcaccttcttaactttcctctcttcctttaagtcagtcttgccccttttagtgcccattcagaaaagcaaacaaatacacgtcagccttatgtgtaggttttgcctcaagttcctcctagtgacatattttcaagctgccagaatggagatgtctgttcaaatatttacttagcctttttcccttttcaaaacagctaagatggtgagactttttttctgatataaaagcaatctgtaatcattgaaaaattaagaaaataaaatataaaaatgaaaatgaaagtaattccatgatcctacataaaatagattctttataaaatttaattcctatataaaactgtaaatctttatgcatatttataattgtcagatatacctacatatagaagttatatatatattttataaaaagtagaatcatactttgaatattttttgtattaattttttctgcaagaaatgtgacacaagtgtcctttgatgttaccaaatatttatctacatcatcattgtcagtggctgcacagccactgtggatggatctttctggccacccccatgttgatgggttgttgacaataacatttttatccatgtgtcctgtgcacttgtcttaatattttcctgggataagtttataaaagtggaattactggttttttcctccctaggtttatgatgcatattcataggcacactggaaaaaaagtacctgcagtatttgaaagagttgatttttccacacccttaccaatattgaacattatcaatctctttactctttacatttaacaggaaaaaaatgtatactggtgttttgttgttattgttttttagaagtggagggggggtgtctcactgtsttgcccaggctggacttgagctcctggcctcgagtgatcctcccacctcaacctcccaagtagctgggagtacaggcatgtgccacagtatccagtttatactggtggtgttttaattccctttctttttttctggtcactagtgtcactgaacatgttcccagaagctgttggctcagtccattttctttctttttttttttttcttttttgagacagagtctctctctgttgcccaggctggagtgcagtggcacaatcttggctccttgcaacctgcatctcccggcttcaggtgattctcctgcctcagccttctgagtagctgggactacaggtgtgcgccaccacaaccggctaatttttgtatttttagtagagaccggatttcaccattttggccaggctggtctcgaactcctgacctcaagtgatctgcctgccttggcctcccaaagtgttgggattacaggcatgagccactgcgcccagccactcagtccattttctaatgagactagaaaggatgctagaatatattctgcaagtttttctttttattctttcactccaaatgataaccttattctcatctttgttgaagtcctctgtgtatccctccctgtcagtttcttcactccttccctctctccctcccttctataagcaatcacattctgaattttgtattattaccttgattttcattagagttttactatttatattgtaaaacaagttgactttcatgtgcttttatgttttaacaaatgaaatcacagtatagctcctttcatgactttaggttttcatgcattagtgtgaagttcatctgtgttgtcataagtagagttttagttcttttgttttttgcagcttatattctactggatgaatgttccatagttcattcatccattctttaatgaatatttgcttggttacgattttctttttgctattacaaatgctactgctgaacattcttgcacctctgaatgtataggtgtaagagtctcactgagctatgttttacctagcggtagaattgctaaaagtcagcacttacgagcatctttgggtatcatcaaattgtttcccaaagtggttggcccaatttatattgtcttgagcctttctaaagttccctggtgttttacatcctctttaacacttgacgttgttcaacttattttggcagtctgatacgtttaaaatagtatctctagctgagcttggtggtgcacctgtagtcctagcctagaggctgaagtgggaggatcacttgagcccaggagatcagggctgcactgagccatagagtagccgccactccactccagcctgggtggtagagtgagaccctctctcaaaaattaaataaataaataataaattaaatcaaatggtatattgtggtttttatttgaatttacctggttattactgttaagtttgaacacaattttatatatttatttaacatttatwgtttttcttttgttcatttttgggtgaggctcatttctgtcttctaaaactggcaggaattctacatttatatcggttactaatcatttgtcatttctatgtattgcaattatattcttcaggtttgtggcttttctttttctgttctttttttaagttgctctttcataaatggaatgtgtatatatatatatatacacacacacacacatttcttttttttgagtagctttaggtttctttatataacatcattctccaaaaaagtcacttcaccggggattgtgtgtgggtgtaagttggcaagtttcatgaagataacccttttgcttgtcatgcttgattctgtagtttaagtctctcatgttactgccttatcattcatattttcagcattgggattctaaatatttaatgactttcaagcatttaccctctctttcctagtgttctgtcagatttagtcccaccctcggtgacagtttcccttggctgggaagtcgtactctaggatgtgcttctttgactaggaaatgtagctcagagcttgcctgggagccccagtgatgcccttttcactgaattggatttatgtcctcctrtgttttttagttttccctaatcctgcttctcatccacaccaggcctctggtatttccattactgtaataaaaataaaggctttggcaacttctctcaagctgtggtatctgtctacatttctgatgtttttgcaactgttgtgttaggtgttgtgtactgtctgtggcatgatttctagatataagaaacatctggaaagccgagattctgtcctgtatgttcatttcaatgtctaaggtcttgtaygcttgccagatatataaagcactttccatttaactttccagtttccccccatcaatgtggacttaattttccattttaaactgttatcctttttcctgttgtcttctcccattcatgaaacagtaacgccaaaaacacagtctaaccattagctttttacatgtagaagctgttggcacagtttgtgagtgagcaaataaaaggtgtggatggaaaagaaatggaatttggcaaagttggtattgatgcaagtggttccttcttttatcagactgtagtattgttccaagttcttcacccctccctgtatctgtgcacttggttccctgactttgaagcrctgtctgctatgagaagaatatacttctctgccctgttgatttggagcttgcccctgtaactgctttggctaaagggaaattagcagatgtgacaggaaaagaggcttgaaatgtacttggcagttgtttttttgccctttttagcttctgccattatgaggtgaacatgccctrtgtagcttgctggttccagaacagtaagaagcatgtggagtggacccgaaccaacctcagggcctggagcccagccagtctggaccagctgagccccagccccgcagacaggtggtggttgttgcatgccactgagattttgtagtgatttgttgatcagctgtagctggctgataaaacatacaytgtagttgtcatattctttttcagcttaccgagggctcatagaatgcttaagagtctctcttccaaaatcatttcacagaaaattcagctcatttatttctctcaagtatttcctcttcacctccctttctaacttagcaggaaggatatttggaaagaacttgacttttttacttccctccctctgcagagaagccactgaaatagtttctcagtattttagtgggctgtggtggtggttctgaaaaccagacagggattggtggtgggaatgtcctctacatgggaggtttttgaaaagccactgatatatggaagatcctcgtgtgtgtgtgtgtgtgtgtgtgtgtgtgtgtgtgtgtatgtgtgcatgcacgcacgtgcatatgttcgcaatatmatctttttaaaattttagcgcaggctgggtgcaatggctcaagcctgtaatcygagcactttgggaggycaakgtgggcggatcacaaggtcaggagttcgcgaccagcctgaccaacatggtgaagccccgtctctactaaaaatacaaaaattagctgggcatggtgtcaggtgcctgtaatcccagctacttgggaggctgaggcaggagaatcgcttgaatccgggaggcagaggttgcagtgagccgagattgcgccattgcactccagcctgggtgacaaggcgtgactttgtctcaaaaaaaaaaaaaaaaaaaaaagararagagagagagagagaaaaaatcttagtgccaggtgtctgwatttaattagtctcaggtcgaagactctggaatcagtggaatgtaagcttcattagggcagggaatttttttggttttgatcactatggtattcccagttcctagaacaatgcctagcacatagaagacactcaatatccatatataaattagatggatggctgtgygggtgggtggaccccccactcctcatcccaatgttcgttattctttcttcaggctcatggaaacagtaaaatggkgvggggggaactgacctaatttttgaagcttgctcgtggctctttctgccctcagctgctcagtacaattcccagtttccaaggatgggcagtgggaagcacattggcctcagagtgaagacctggctccagtcaggcctggccaccagctgggctggagatcttgggcaagtcctgtgggtctcagtttcttcatctgtaagatgaggggcctaaattatataattttcagatttcattttarctctcaaatcttcaacagcctagagtttcttaataaaacccatagaggattgtgttttgttgtatagcaccacatagaaaattgcmtagcagcaggacttgggtgtatatggttggttaatcagggtttttcttcctcttaaagaaattcttagagacctttaaaaaaaaaagagagaaaaagaggatgctcatataattggattttatttaaactatttatgaaactcttgcttcatgggatcactgcagctttgcaggcaggtagtgatgtgctctcagtggctcagttttattttctcccctgcaaaaaggcaatttagaagtttaggaattatttatggtactgtggggataaacacaatctgctaagttatttttcttatatcattttttttcaaggttcattcctgtattttaggctggaagcaatgtcttcatgaaatggccatgttgttatgtccgtgaacaaaatgaggyaatgtcatcactaggcaaaatttatgccaggttttaaaattgtgattcttaattggtataattcaagaattggatattactgggtgattctcagaaataaagacttgatagtcacctaagtatggcaaatgatggtctgaaaaagtttgagttttctttactggagagtgtctccaagctcggaagaagtagctctgtttgagggagggagtgtgccgtattttccagacttctttgaccagagaatcccttcatgaaaagatttcttctatggatcctgtcccaagaaggacacatggggacatgcccatccattggctgctgggattgacagtaacctaggaggctgaaggaagtgttttctggggaagcagggacaaactacagtaagatactctttaaaaattttgtggccaggtgcggtggctcacgcctgtaatcccagcacttggggaggccgaggcaggcagatcacgaggtcaggagatcaagaccatcctggctaacatggtgaaaccccgtctctactaaaagaaatacaaaaaaattagccgggcgtgggggcgggcacctgtagtcccagctactcaggaggctgaggcaggagaatgccgtgaatctgggagatggagcttgcagtgagctgagatcgtgccactgcactccagcctgggcgacagagtgagactccatcttaaaaaaaaaaaaaaagaaatttttttttacctcgaggcatgccttcaatacaaagggaagtagctgatactaacataagtaattcagaacatccatttatcattttagattatttktctgtggagccctggaaaccaagggtttgtgggcttcaaaggcattaggaagaaaaaaagctctcaaaatccattatrtgtatttgatactccatttagtagaatcagccttccctcttttcttccatccctgaagcaaacttttaagtatctgtgtggtaggaaccatacccacatcatatggatgtagagaggtggtttctgcctttgggggacttccagtccagtggtagaggctgatgggtaaactgctctgtccaaggtgctatggtaacagttgaaggaggaaatagttccctgagagcttgtgcaaagcttcatacttggatgtgatgcttgagctgacagatgaagtctgagtagtttagacgacaggggctgagggaagaggaggtttttaaagtacattttattgtgtatatttaaggtatacaacatgatgttataagatatatatatatagtaatatggttactctaggggaatgaattaacacagccatcatctcacttagtcacccatttcccccgctgtgtcatgaccagctgttggctactcatctgctggtgcagagacrcagggagggagaggcggcactgtgtgtttgggaagactgacgcatggatgtctggattacaccatgaaacatgttacttaggtggaggaggttggaacctagatagggtcagttccggaagggctacgaatgcaaaatcgaagaccttacatctcatccttctggtagtagtgaggcattgaaatatttaaagtaggaaaataatgtgaccagattgatatttgggtatctggcattactgtggagtgtgagtggaagaaatgcaagttcaaagacaaggagaacaggcgaattgtctaggcgctaaatgatgagggcaggagctgaagcagcagtagcagtgggcagagagggggccagattgtgtgccttttaagagttatcaccaggctttgtgtgcaaggggaccaccttcttggcatgaggaaaaggtcatggattgaaggagcagattagttctgattgcagctttcctaagcataattgacacacagaacctttgagcaatactctgccactgataccctccaaagaattgtaggtgaattccacagcatgctttttacccccattctctaccttaagctgcctaaatcataatcactagtataacctcttcctcatgrtggagacatttttaaagaacattatccagggaagtggaaactgttaggtgaaggcttttgttacctaagaaggcaaaatgtacaaatgctactcatcatccctwccttatcctcaataaatgtttattgtgtttttgacccacatttggttgaaaacagtccatgtagaagtgaacctgtgtagtttattgaggataaaacaataaatgtttactgaggataaggtagggaggctgagtagcatttgtaagaaaggtagatgcttggcaagtgaagatgaacaaggcacaactgcccttaaggattgaatggtttgatgagggatgcagtctcacaaatagccccataagcagatatgktatcaggcttggaggcaagtggcctgcagaatcagggaggttatcccagaagaattaccttgaagagtgttcttttaccttcgtcttgaagaatgcataggcctttgccagcacaataggaaggcagggccttctaggcagatgggatagcacattcaaagatacagagtttcgaaagatccagaatgtttatttgaggacaaagaatcgcagtgtggttggggtagcctaggggacagtgagagtgctggtgggaggtagatccagagaatcctggcatgtgaggctttatacacaaagctaaaggagtgtggactctgtgctgttgttattgcagccagtagagacgtatttgggaagggaaggcgatgagaaagtggaagaagggagtccgcctcttcatgtattgtatacaattattttataggtcatgcatttatttggggtgtgagtgtgcctgtgagtgtgtacactctccctcccactgctttcatgtctgtttttctgtatcctttaagttttttaatgcaaatacaaatatgtattctttttctttcttcttaaaaaccaaagcagcacacattttttctgtttttttttttttcacttacagtgtattttagagatgtttgcacgttagaaagcattcccatttctattcacagctgcatggtattgcattgtgtgtatgaaccataatgtatttaatcagtgctcccttgatgggcattttgtgtgtttccctcttttgctattaaaaacaatgtttcagtgaataactatgtacatgtgtcacattttgcgtgcaagtacatttataggatttatttcttgaagtggaattgctaaatcacacagtatatgcatttataattcttatagacatcatgcctattaagtagacctggggtgaagcagtcatatctgatatgtggattgaatgagggtaagcagtgagcaaaatggaggatggtgctaagttagccttggtgactcatgatgccatttcacaagatggagacagagaagctatgtaggttgcacccaagcttttgaactcttaagtctgaagtgtctataagacatctaggtaggaacatctaggagatagttgcacgtgaaagatcrgagagcgtaagagagctctgtaagagattttgaattcatcagtgaagttaaaagtcactggccgggtgccgtggctcacgcctgtaatcctagcattttgggaggccgaggcgggcagatcacttgaggtcaggagttccagaccaacctggccaacatggtgaaaccccatctttactacaaatgcaaaaattagctgggtgtgttggtgggcacctgtaataccagctactcgggaggctgaggcaggagaatcgcttgaacctgggaggcagaggttgcagtgagccaagactttgccactgcactccagcctggctgacagagtgagtaagactccatctcaaaaaaaaaaaaaaaagaaaaaaaagaaaaagaaaactcatagacttaagattttttatatatgtgtatatatgaaaattattataaagaaagaagagaaaggccaaaaagtataaggtttcagaaaaataaatattctcctgggttcctttatctattaaatttactagaattcattggcataaggcaaaagttctcatgtggttcaggtctttatttgacttattcattcattgttcatgcattcattcatttcaatatttgctgaatacctggtagtacagattgcatatctcttatgttaaatgcttgggacaagaaatgttttaggttttggattttgtgtgtrtgtgttttggaatatttgcattatacttactgatttagcattcgtaatccgaaaactcgaaatcagaaatgttccaatgagcatttcctttgagcatcatgtgggccctcaaaaagttttggattttggagcatttaagatttcagrtttttcagatttgagatactcaagctgtaccaattaatgacgaaaatatggtcatcccttggtatacatgtgggattgattccaggactcctgagtataccaaaatctgcacatactcaagtcctgcacttccctgaggaacctgtgtgtatgaaaagttggccctctgtatacatgggttttgcatcctgcaaatactgtatttttgacccacagttggttaaaaacaatccgtgtagaagtgaacctgtgtagttccaatctttgttgttcaagggtcaactgtatgaggctacagatggcccctgccctcctgcagctcacagtcaggtgggaaatatggtgaggtaaatgtgtaatgtcagtgtgtgctgacacctgctgtgaggagagcagtacattgcactgtgggaagagtaggaggtggcatctagtgtgacttggggaagctttcagaaaggcctcctactctgagatgtgaggaatgagtaagggttggtggtaacagggagtgggggaggggaagcgtgatgtgggctgcaggggcaaactagtttggtaaggggccaagtggtaggcatttgggtttggggcggccttggtctcctgctccagctcccccatgccgttgtagtgtgaaggtcgcggtggccatcggtgaagtgtggccgggttccaataactccttatttacggatacagaaaatttcccctgatttccatgcatcatgaatagtattcttcttttgatgtttttcaaccatttaaaaaggtaaaattcattcctagcttgtaggccttacaaaaaccagagggttagggatccagacttggcgtgtgcctgttagtccaggcacaagggacagcctgttcaaaggttgaggcgggagaagcacacaggggcttctctgagaacctcttcttaggggtctccttgcctccagggtttccctcctccagtctgccctgcttggaatccctggatacatgccttgggctgtctctttcattattgccgtgcctctctggaaaatcttccgtgattctccatgaaggtattcagggtcctcccctcatcttctgctttgtttgcctcagcctcctttcatgaagatttgggaaaaatcctgctccactgacaggaatctagtattttagatacgattggaggtgctgtaaacacttcagggttttctaggccactgctcattcctatgtatgcacacatagtttgctttcattctgaactttttgtatatttcctggaaaagttactttgggattaatttacatataaaagtcctatattttcatcttatttttatcctgccacttcaggtatagggaaataaatgaaaaagtcttcaaatgttgacttctaaggctttattacctcagacagcttcattaggtttgtggaaatctagtgtgctttgaaggaattaatctagccttacttgcaatctgtatgtgtttacatagaatgaacaaacattgcattacgtttcatgaaaattcaattattcttgtctccaggaaacatgttctgcttagtatttaattctcaagtatgtcaaggtgatggttcttgaactgtcgtaagaattggggagctggggctcactgctcatttccataatcaatggagaaatagccagtggagactttttaatcactaaggtcctcatgtaacccatgtctgaggttacaggggacattggggacatcagtctcagtggcataaggctaatataaaatcctctctagatttttgttagaatgaagagaagtaacattaaggatgatactctacataattaatactttcttttggagtttattatgcatatgtatggtttattcagcaggcattttttgagattctattgttaaygaggtacagcaagagatggaaaggtaacaatcagctggtattagtgtctgttgtgattggttggaccctatttaactggcaaggatcagtttaaatgcttttattcttgaaacattccttgcaaagtccgacaactcatttcccactgtattgttactacagtgaagtgattttttggaaacacctatcacatatcatcaccatgtcttttatagttacacratagttaactaaacttatccttttcttccacaagagtctaacctccttgaaggtaggaccatgcttaattcctactggttagtggctgcagtattatactgaagaaacggtaagtcckgtttcagcaggccgagatgtggaggagacggtttggggtccagagtggcctaagggaattatttgaatcaggccaagagcatgagtttacttcgagtctttgaggagtgaggtgtagatgggtgtagcacagtactaggagttgagaatggatcagaaatgtagcttgggggctacaccaggacgcacagaggccatacttaagggtttggaatggggcaccattgaaagtttctaaacagaaatcacgtggtgaggtccacatggccttttggggccttcctgccctggcctttgcctgcctyctcgctttctctcccactcttgcccrtgggtactccatgctccaaggaactgttgaatgtgccatgcacactctgttcagcatttcccaaagggaccctgggcagtcctcatgctcatttttcaaaccatgccatggtttgcactgttcactagctgtttgagggaagaggtcgggtctgtttatttctttgccaccagggcttcacgcacacctaacctttagtgggtacttagtagatatttattgaatgtttggatgggtgaatgcattttggcacaaaaccttcacttctggactggaagatagattggatggagcagagacgggaggcagtgagaccaagtggagcrtcatacctggaagagaaacattgagcctgtgaattacagctatagcagtagaaattcaaggggggaaatagattctggagacctgggcaagtagwactgacgggacccagagatcagcggataaaatggatgctgtgaagggctaagggaagtggaaaggttgaagacaggcacctgaagcccrcctaatcatatcactagatgttttgcagggtgtgcggtgggcaaaagtaggggtacgggatgggagtggaaaccgttctgtgtaggtccgtttgagaatcagcttaactgaggattaattgycttggtttggaaaactccactactgaagtttgcacaacatagtaaattgtggaggactaaagcatccttcgcttaactattcaatttatttacaaatttaactgcaacatcgttctgtaaaggatatgagatagtgacatctgtagatacagatatatctggagaaaacaaaaaccaaggggcaaaaggtaaagggaaaataagaatatgaaaataacaaagctagggtaagtttgcacgaagaaatatacatttctctcagttgccacaaaaaagcatagatttggatttcagctgcctagtggtaaaaggaaggagggaaacataattaattaatactatctacagtgtctgcaagataaaaacgtgctcatcctttttcagagaaagcacaatattcttgacmgagaaaactgagaaaaaatttcccctcatctatgaggcggaatgtgttccaaacagttgaatttcaaaatgagctttytgacattccttagtctcttcttactagtataataggatttgatttgctctgtttaacatatgatgaagttaattgtgaaagatctctagaatccaaatctgcaaattatttccaaaacyctgttttttatcttttacaccagtcgttctactggtgagtcaatacttgcagctcctgtgtgtgtggcaggttgccaggtgccccagatggtaccaaggtatgtaggaatttttgaaggmgctcacagtgccagtgggtagtctaggcataaacacatggaaagtatgttaaatgcaggagttgaataatgaggaaccgtacgggagagcccacgaagccgtgcctgatttactgctgtgcacctgcttagacatcaggtggggtctgtgaattcaaaagatgacaagaccagtgtgggctggaggagccgagggaggtttaacaaggagggatgcttttacttttaataatagcatcaatattattattattattgtttagcttatacactaaattaaaaaattgattattttgacaaatcttgaattttagtacaatctttagaaacatcatgtccctggtttgtttgtttttttcaaagcagtatgcctagtacttttatcagtgccatttggggttactaagttctccctccattttttttttttttttagacccatggacatgcctttctgctgtcacttgtgaatgctgtcaaataatccttacatcctaatttacatttgcttatttcaaactgtttgtactgttctgaaaatatcaacacttgtttttttaaaatttatttatttatttatttagagatggagtctcactctgtcgcccaggctggagtgcagtggcgtgatctcggctcactgcaacctccacctcccaggttcaagcgattctcctgcctcagcctccccccgagtagctgggattacaggtgcatgctaccatgcccggctaattttttgtatttttagtagatatggggtttcaccgtgttagccaggatggtctcaatctcctgaccttgtgacccacccacctcagcctctcaaagtgctgggattgcaggcgtgagccactgagcctggccttgttttttaaggaataatcttttaacagttaactctcggtcccgataatctccgtataatctttggattctcattgctctgagggtaaaggtccaaatctgtagtgaatgtgtcctccaaggcaatgcctactctgctttgctctgaccagctctctggccatgcggwcccrccttcaccgtcattccagctgagcaagcctttyggttctcccttcctttgctgggactgcctgggcacatctgatgaccctgtgacccactccagtagcacctgcatgtctygttcacagcaggcatcaccactgtagtaaaccaattgtgattatgtctttatttaatgtcattgattctagcttccccttcccaagactgcaagtgccctgaggacaaggaccttgttgrycatagactgctgacccaccagcatctagcacgatacctggcacagagcgggtggtcacgtgtacttgtttttgatgtcattgtgaggagatttccttttccggttttcattcaaaaccgtcttggttattgcttatttgtttcttaccctgcagatggttaccaagcagctttttgatttttaaatctttgcagaagattccaaaaagcccctccaaagatgacacaagcctctattttattgcctttcaaaatatatacacttttattgccaagggaaaatttttgaagcttgggtatgtgttagtctccagggaagcagcagggacggccagattgtgagagtgttagtggagtaatgtctgatgtagtttactgagcaatttcaaagcagagtaatggaggtaatctcagaaattctaagcagcagcrttgtaaatgcacagagagagagtgttgctttcatttcattgacctgaaatcagcttgtttcccccatcctacttctaatttgtttttattaccttaatatcctgtgtcatggaggttctaaacatctttagaatamaattctttggagatctataaactgctgctttctaatttcattgctcttaattataggtcattgaaaatgcaaaaaacagaagtaatgtaggatagtagaaagagctttatactcagcatcaggaggcctggacaatagttttttaactaactgattactgtctggctgactgtttgccctagaggaatcctttgacatctctgagcctcagtttctcatctataaaaggaagctattagaaatggtatttaagattatttattatctcagtttatactccctccatgcatcaagcttcatttgttcacttaacaaacaaggctgggcgcrgtagcttatgcctgtaatcccagcactttgagaggccaagtcaagcaaattgcttgagcccaggagtacaagaccagccagggaaacrtggtgaaaccctgtctctccaaaattacaaaaattagccaggcacrttagcgtgcatctgtagtccagctacttggagggctgaggcaggaggattgcttgagcctggaggtcgaggctgcagtgagctgtgattgtgccactgcattccagcctgggtgacagagcaagaccctgtctcaaaaaaaaacaaaaagcaaaaaataaacaaatatttattgtatgcctactatgtgccaggtactctcccaggtgcttgagatacagcagagtacaaacaaagccgtgttcttgtcctcctacagcttgcattcacgcagcatttgaagggcttactatttagtcccaatttatgaaaggttctgtgtgattaaaggctgtggctggagaatatgttgaataaagagatgggcagggttggccaggcacggtggctcacgcctgtaatcccaacactttgggaggccraggcaggcggatcacgaggtcaggagttcgaggccagcctggccaayatggtgaaaccccacctctactaaaagcacaaaaaattaaccaggcktggtggtgcgtgcctgtaagctcagcctcatgaggctgaggcaggagaattgcttgaacctgggaggcggaggttgcagtgagccgagatggcattattgcactccagcctgggcaacacagcragactccatctcaaaaaaaaaaaaaaaaaaaaaagagatgggcagggtcattagcaggcaggattgaaaagattggaaagtgaggctccatcttaccttggctggtgaaaatggctccctcagggcattgctcatgacccccaaaccrtccacagaaggaaaggatattcctgtccctagccctgtccagctaccaaaacaacagcagggaaagggaggccgagggtagcccacttacctcgccttggtaagggtctcccctgctgttggatttagcttccagttgtgtcatttcaaatgcccgtgatcctctactgtgtgcaagacaaaagtacgaatacttgcttgtccagccaggccccgagccaccctcctccctttcccctacatatgtccacgtcagtgggcaagctggcagcccggtgtctccagcacatggggtgyaccctgtctcatctgcaggccattgtgtgtgtgttcacagttcagaagctgactcactatctctgcctgccaacatcctccaccacacccacctcccacccctatggtcagggggcatgggtattgaatggcagtgccatcagagcttgccagcaccctgtcacccaattctcggccactgggatcagagattatttcttcctccctgaatctctcagtccctgctgcaccatccacagctgcgggggaagggctggccgacgtttttgatcttgttttccgtgcctatcacaatgcctgtcacataccagatcccctgaaattgtttgttgagcagactgttatcataatctcctgtgatatttaccacattttaccttttgacatggttatttgagaatatttttaaactttctaggtctgagctctttgatagcagggcctgtgttttatttattttttaatctcctaaagcacctggttcttggactccatgaatatttaatagcctgaaataaacagaatttaattcctggatagttgaatttgagaggtggaaataaacatagggtttttatttctgtttctctcaggggaaactgagtcaaagaaaaataagtaactcacaagctgatgtgtcaaccaaggctataaatccagggagaaattcagcaatagaagagcattgtaatattagaaagcttccagatctccccactcaggagtatttcctacctgtaacacacagatccgtcrtacaaattatgctttgtttgctgaaaagcctcctgaagctgaatgggtttactttggcatcagcggaggccatgwttgagggcggagatgagacattggatcgctcttgtgtggcttccgcatggccgtcgtggttcctctgcccagccctctcctgcgagggactcgatcagctccagggcgcagcttgtgtgtctgctcccatggccaagtccccttggctcccttccccttggctctggtttggcttgactctgccttctgctcctcaggtctgtctaggtttagtcctgtgtaatcatttgcagcaaagcctgcccatgactggaaatgcagtcctggcttggcaggaaaggggtttgtgcaagagctggctgtacctgtgtctgaaacacctgaggcccttccagggctagggatgcaagaagcctrggctggcaaagctggccttcctgccagggctgaggagcactggagccctagaaggggactgctgtccagccccttggccagccagagcaagggccactgtagtcaaacatgaattcacaaatgggaagagcaggaggtgactcagatccacctcccccataactgctaatcatagtgaattattaagagcataaaatcaggatcttgtttcccacatagagatcaggcccatcagccctgagcagttatataatccacctcatacacgtggataatattgagactggcacttccaagcagaagcctgctaaataaggacatgtttgttgtttcttctacctcatcaaaatgtctgtttcttattcctaagaatggcagggagtaaaggattatttatttcccttgatatttttcatttcaagaatcaacatgggcaggtttacagtgttcacaaacatgctggtagcaatttgattgcaggaagaatgaaattttgccaggcaagtgcagatttgtctgttgtggtgagaagggccatccatgactgtacaaatggtgccattctaccctgaagatacattttaacaaggatggtggtagtagtttttattcttttgttctctcagatgcattccattaaaattaaagcatgaaatatattaatttgatgaaatggatttgtttccacttgatgtgttgctttgtgaaacgttaacattgtctcttaatgttcaacagaactgatgacactggtccatgtggccagcatggagggaaacatgattcctctgagagcagtctaataatccgtgtcttggacctgcattacttctaagaaaaacaaattagtttaacrtatttctagaaatggaaactcttggatacatcagaaacaaatttgaatttaggcaatctaattaacctttagctaaaaatgttggtattttcacaactcttttggacagagttcgttgttagtggttgcttcaaactttttttccagatcttttatctctaaaaagcaatttatgatttttttttttgaccctagtatactgggatgtcttttcgatttgattttcttatattattctggctccacttttgtgggaacttctttcctttcctcttttgtgctgttggctcagtgacccagccacctttgtgggcggtggtggaatgtgctccggttgcctgctgcccatgtcggtgtgcccagagcgggagggacatcattttgaccacagcactttggccttagaatgatgcagagactccatgtcactgcctgttcctcttgctttactctttttaaaaaaagacttctattctttccattaaagtttactccctttctagcttaaggagtcaaatcattctgcaaagtttagtgccaagccccagcagtctcctgtatgcctttcccttttccccacctccctccaccttcctatttcttcctccttagaggctgccagtttcractgtttgacatctgagtctttgsaatcattctctgtatctctaagtaacatgttcgtattgctgctccttgatttctttccgctttaaatattctcctttgaccatgcaacgtgaaatatgaggacttagccatgtcttccctaccctaacaccaaaccaaccaaaaggcagccttttcattcatctaacttctctgcagttagagcgtgttttgggatagatcggtgctctgcattaggttattttgactgatgctatccacaggtaaaatatttagtaaactgtaattaccttttctctttcacataactttttcttcagtctttttttgtctgcttagttttctgtatgcttttcaataatgcaaacacatactctctgcaaattgcctgaaytgactctcaatacattcacatacatcgctctttttgtttgatcttttggagatgtctgtcccagagcctctgacctgcccctgcctaggcaggctgttcttttatcgtataggtatactgcttcctgtgtcttcctgtgtattatgtttttcaggcgttcagttggagggccagaaaccacactagctattttaaacagaaagagacttaaaacagatattaggtgctttctaaattattggaagggctggaggagtgggcttgagactaggtttccagcaatgctccagaaccacacagctgccctggcctgccaggggtgttgctttatctgccactttgggatgggagggagtcaggaggccgcctctgtgactattcacttcaagaacattctgctgtagctgcagtccaaggatcagaaccttacattgcagctactgcctcttgatacccatgaagctggtgactgactgctggagtacttatagaacaatccagtagccctctacatgccgaccaggagaacgagccaagctgcagaatgatggcctccaccttcacttctcaagtcttacttgagtacatctaattggagaaacctaatttactcaaggaactcagttgtcaggaaggccaggaaatgtggtgtttagctttgtggattctgtagtacagaaaggcagatgggagtggaaatgaatgctgagtgccattccaccatacacaccacaccagggctgtgtgtgtgtgtgtgtgtttgtgtatgtgtgtgtgtttatgggcttgttttgatggactgcagacattttaaagtctttttttttttttgagtcacggtatcactctgtcatttaagttggagtgcagtggcatgatctcagctcactggaacctttgcctcccaggctcaagcagtcctcccacctcagcctcccgagtagctggtactaccggcatgcaccatcacgcctggctaattttttgtatttttaatagagacaaagtttcactacattgcctaggctggtcttgaacaccggagctcaggtgatccacccaccttggcctcccaaagtgcggagattacaggcatgagccaccacgcctggcccagatattttaatttctgatcatttatttgtagccagtttttctccctgggacttaacatttttttaatagcttattgaggaaaactttaggtaattattcaaggattatttagtaaatttatagagttttccagccaccatcacaatcaaccccaaaaagtttcctcatgcccatgtgcagccagtcctgactctctgccagccccaggcagccacctgttctacttcctttttttgagaggggggtctcactgctgttgcccagacaggagtgcagtggtgcgatccactattctactttctatagatttgtcttttcttgacatttttggtaaatggaatcatacaatatgtagtctttggcatgtggcttttttcacttagcacagtgttttgyggttcatcctattagcatgtctcagtagtttgttctttactattgttgaatagtattgtacacattttatttatctatttaccagtcagtgggcgtttagatcctttacagtttttgtctgtaatgaataaagatgctataaacagtcacatacaggtctttatgtggccatatgatttcatttctttggggtaggcacccaggagtagaattgctgggttgtatggtaagcttatgattgacttttaaagaaactgctgaactttttctaaagtgaccgtacatgagcaatacatgagggttctagtttctctacatcttcaccaacactttgtattatctgactttttgaaaataggcatcccagtgagtttgtatctcgttagttttactttacattttcctcttgaataatcatgttaagcatcttttcatatgcttagtagccatttgtatatattttctgattaaatacctattcaaatattgygcccatttttaattggattatttgtcttattattcagttgtaagagttctttatatattctagatataagatctttattatatgtatgattgcttatattttcttctagtctgtggcttgtctttttattttcttagtggtatcttttgaaattttaaattttaatgaaatctaattcatccatttttttaatggattatgatttttgtgttgtacctaagaactatttgactaacccaagtcacatagattctcccatatattttcttctagaagtttattattttatctcctgcattgtgctatattttccattttgatttaaattttgtgtgtgacataaggaaatgttctaaattcatctttttgaatgtgtatatccatttgtttagaaccatttgttgagaaaattagtccttccccattgaattgccttggtatctttgttgaaaatctgtatatagaactgtgcagtcttgactattgaagctttagaatctatttaaaattggttagtgttaagttctcaaactgttcttctttcaaaattcttttggctattctactgcctttgtattagaataccaattttgtcaatctcacaaaaatgtctgttggaattttgataggaatttcatcgaatctttagatcatttagagaaaatcgccatctcaatagtattgagttaggatggaatttatatttatatcagagcttggcaaacttttttctgaaagggctaggtagtgaagaattatttttgtaagccctgcagtctctgccacagctattcawctcggctattgtggtgagaaagtagtgtggacaatgggctgtgttccagtaactatttacgaaagctggaggccggaccctgggcctctgacttgatcatctttaattcctttcagcagtgttttatagtttttagagtacaagtcttgcacttctttaatgaaatttatttctaagtattttattcttcttaacgatattgtgaatgggattgctttttaaatttcattttcagattgtttattcctagtacatataaatatgattgattttcatatgacgatcttgtatcttgtggccttgctaaagttgtttattagttctagaaggctttcaggaacctttcctttgtccttgtgcgttctgaaacctcacattgtgtaccttggtgtggatctactttcatccattgcatgggctgactttcttgtcatctgtaaaaaaactaacagtaaaattcctttcttgagtttagggcatttgttttgtggcctcgtctttgtaaggaaggagaaagagcattgttatgttattatacctgtattgaaactatcataggaaaaattttcaacaataataggtgtgttaaaactttaataatacaaattatctgtggatttcatttcttatgcctgtggcataaatatatcaacagcattatgagcagatttgttttcttaaaaaaaaaaaagtgggattaaagcacatagcacatgtcatttttctgttgccctgtgcatgaaaattgcttggtggattctgcatagtgagtcccttaacagcatgtttcaaccctgcatttctttcattttccttctggtttacattactgatttcctctctccccttctcccagtaatagccagctgggaaaggccttgttaaagtgaaggaatggaagagtctttagtaaggtaatgtagtcgtgctaataacttcaggcacagcaggtttcataaggggttgttctagtgtcgggattcatggcaggtgctgtggagtaaaccacgattcaacctctggacttaagtatgtacatttggttgcacttctccatcttatttttttattaaccagtttattcatttctaagcagcatttattgaacacctgctgtgtgctgtttcctagaaatgcaaaggaaagttagtccctgttaaggggccagcattacattttggatagacagaaatagtttcttatgttgccacccagctgagcttgaggaacaggctgcgactcggcagagcagctggyttgatcagcagctggttccaccatatgtgcaggcttcacactcccacartggacagtcctgacctggactggccctcaggccagtgtcctccaagtccatcagagcattctgggtggagtcattgggaatcttgggctgtcttctagcttattccaggtcttcctcactattggggatatgttaggggagaaagagctgctgcccgagtcaggccttgctgaacctataagattgctttgtcactttttcccttctctgtttcgaatgctctccttacctttactcaattgccaggaatgagaacattccttagtagtgtttaggttttcctcaacctattagatacctattttcctctttcatttataagctcgtatagtactgggaccacatacagtattttcctataactgtgaaatcagcagcagaccagcattccgtacatttttataatacatgaaaatttttcaaaccacaaaccagagaaaagtatctcttacagggttaaagaaagaaagaaagaaagaaattggcctccttggagaggtcaacaatttattaatgaaatcacatcttaacatgaaaataacaaaatgaacatctttctacaaagaggatgaattatctttttcagtgtccttgaagagaacaactagaggagtcgtgcgggctgcagcatgggggccttagataagatataaggaagaccctctagctggtggagagtgcggaagcttgaactgagttatgaagagtatgttagagttttgaaatttactgagtagattttcatttcttggaggcattttaaatacagtcctcttgaaaggaatagatatgtggaacatccttggaaaagtccattttaatctcaagtactagtcaaatctatttaaaagcaaaaagaggagaaaaaaatctgcttttaatagttaatttttgtgtagttgtattaggatgcaaactgaacttgtgctcttcatcttcarcaactgtctgttaagcctacatcatttgaaaaagtaaaaacagaattctgagagcacggttagcaaggtggttggttggtgatgtgcatactttttatttgtttcttcattttatgttaatactagtttaaagttaacttagtccgggcactatactagtcttacytgcgtattataatttacttgctattttgctcattggcttctaactaaaactagaccagctcagcaccttgcttcagactatatctccaatcgattttctgttctgactttttaaagaccccctggtctttccatttatctgtttcatccccattaacactgatggacacacctctaattctcaacccagtgttaccttctatagccatgtctctctaagtactcctgtgaaaaccagtcctataacctttggtatttgtcagaaattatttgataagcactaggagatatctttttttctttcaataaatggaggcattaaaagtccattcattggaagttttttttttaatgtaagcatcattagctttttttatttatttaatttgaacttatataacataaagacctcttcatagccatactttttttraaaaaaagaattttttttcaaaaatagtttatcaacctctgtctggattcttcccatgtctataatgcttccactgtaggagaatcaattttatccttatttttaacatacctcaataactctgtggtgtgtggcccttagcaggacagacctgcctcttttttctgatctttgcagacttctgaagctcatttcttacacacaacacctgtgtagttctttcttttcaacggcgatgggtaatgcgtagctctctgaatgctccttctctctttgccttggtaactttacacatgccactcctggctgtagtgccttccccattcccttaatttctactcatccttgaagatttaatttgcttctcatctgcaaagtcttcacagatcctgcctctgcccctccttttccattcctatccccaactccaggccaacatgaaacctttatttgtatttctgaaatgctctgtgtacctctctccggtgccattgtcatgcctgtgtcatttcttggtctccttcctgttgcccccactagatgctgagctcctyaaaggcaagagccrtgtcttagtcagctctatattcccaggcttagctctgaaaacataataaatgtttagtggaagaagataaggaaatatgttgtatacctcattggaagttttgtttgtttgttattccctaggcttgtttcagtttcacatcaacccagaggatatgagacttcataatggtcctgatggcacccagccatccactgagagctcattctcaggcatgctggcaaagtgactcagtgattttcaaacctggggagctggataaaaatgcctgtttccttccagagagtcgaatgcaaggctgtgtgtggtgcctgggatctgtagactgaagcagcacccctggtgattctggtgcaggaagttgttacccacctctgagaagcactgagttgggaatggagcccatttggagtcagcagcccatgctggctcttctatggattccttgaacccatgagcacatgggcacctcggccttatgctgcagtgacttctctctttactagcacagcctgtgcaggaatgataagaggcacatattcttcagttcgtgcaacagatgtcctcctgagacattgaatacaaattaaagttttatagatggaccatgggataccagcagtgaattattctgtaagttgaatagtcacttcccgatttattggttgttgagccctccatttttaagaattagtttgtttaaattagattaaatgtttctatctgtggtttacattttytgactgtatgaatttaataatttattttttatttttatttatttatttattgccacaggtggttacccattcttaaccaatccttaaatgggcattttaaggtttcagtaacaacattttactgcagttggagaatgactttcaaagcttcagaagccctaatctaggggccatttcatttctaaggaggttcatgatcattgcccaagtaatttctcattgtaatatctagagtcctacaagcttatgagctaacaacatttgcccatgaggttttagatgctgaaataagatacaataggtctgaaatgttaataaaatattcttcagtgatctcctttcttagtcaacnttgctatatcctcttcctgtgtcaactcctcagaatgtgggctttccatactgacagtacccccaccatgctacatgttataggtgaacaatctaattttttccagtagcttccactctcttctgtggataaatgttagtttgatgatgataatgatagtcataagttttattatcatcattactgttcttattcttcttctctggacctctgtgtttcctatcagtaaaataaatgtggtcagaccaaaagatgatttctaagatgacttatgccttaccattttatggttctrtgattctagatatacattttgatgattatagatgctcattaccttaagaaagttatcagaagggaatgatgaactatgtttcaaaacatttattttcttaataacatggctaacttcagaatgtcattaaatagaatatatattggtgcaacgtttattattcattttcctgactgagaggctgaggccagtagtaaaaactkatagccaccaaatatcagagttggaagggacctgagagagcatcttgtctgtccctgctttcagaaagtggtgatattctcaacccaagagttatggtgacatgttatatacatcaagataaactcttttaagagcttcagtgtcatggaaactctttgtgtcagcaacatcaaagcccatgattttctaagtggcatttctcattctacgatgcactgcaaaataatattgccaaaccgtgaaagattacacatctgtagtaccagggttagctcaagatttcagagcatgccaattagatattttttcccttggctggtaaaagtaaaaaaaaaaaaaagaaagaaaaaaasttagccatataatgaaagaaaaggagaatttgtgtgacggtgatgttgtatcttattacaataatygaattccctttaatattttcatcaagtgcttcatatttagggaaagaattatttaaggataatccataatattatagaaagaatacttatgttttaaaatataattcgaccagaaatctttgaatctgtttcaaagagggccatttcattcataaaaggtaatgacactattctaatgccagtgtttgattgttcatttttttcctgtgtctgcagaatggattacagattccttgcataatcagcaatccattttgttttctaacaattagccggttattcatactttcacaagaatgcgatgctagcatgctgtggtctgtttctgatcttacacaggaaaatgacagtgagataagagtagaaagatgatttcatttgtctttacagggtaatgtatgggagatgttcctggatagtcatatccttttggaatgatgaagtttaaggatttccgtatctggaatttgtatccatataacacagatgtgtatatgacttggcataccataactcccttttccagctgttatgtgacgggtaaattttgaaaatgtatcttcctgccaatctcagtttaccggattctggtcatttcaagcctgatgagakttgggttcttgaaaagggctcgagactgacatgaatcccttacacagatgtcttcacagaaaccagtgtttagccattgccacttccagcgactgtttcttgggaccacttggtggcaggcccacagtcagcctcccagctcgcacttcctgctgttttccctcatgcagctatcatcactcaccacttgcttggtccaccgaggttcctgtcctgtgcgttgctgcactgccttgaccccactcggttctcactacctcacagcagaaccggcctgtctcccattgtgcggagccccgccccacacttcatatccctgctgtgtgtccttcagcgggtgacagtagctaatccctccgctggataccttcttgattttctctctaaacagctgcagagagctgagaaaactccttctcccactgcagcatgtcatgatccagtacttagctgttagttgccaccccagcaagtctcagaccctctgccaggctctggaatttagttgtgtagaatgttctgtacactgccctcggcatctcttaaaggaactgggtttctgtcagtcaggatgactcgcttcaagtgtcaatggataatgtctcatgaaaaaattaaaggcgatggaaaaatatgcggtcattgcttctaaaaagataaggtttggatttggagtaggaaatatataagaatgaacagagcttttacaacttttctttttcctttaagggagctagatttctaatcagtgtttttcaatatagtttaatggcttactttgtgggtttaggattttgaggttctgcatctgaattctagttttgtcatttgtcatttgtgtgcccttacacaagatacttacctctctgagtctcattcttctcatctcaaaaataggaataatactggtactgaccttgaagagttgtaaaaattaaaaagtgatggatgcagagcacttagaatagtttctgacacaataaaacttcaatgagtagtagacttcattattatctattttattattaatattattgttcacaacaccattccaaaaggagttaatttttgataaagaagcagaatttctttaatacagttggccctccatacctgcaggttctgcatccgcagactcaaccaagtgtggatcaaaaatattcaggaaaaaaaatgcaagtaaaaaacaatacagtatagcaactatttacatagcatttacatggtattatgttttataagtagacgtagagatgatttaaagtgtacaagagaatgcgcatagattatatgcaaatactatgccattttatatgagggacttgagcatcttcaggttttggtatttgcagggtgtcctggaaccagtcccctgcagatattgagggatgactatacactacccaatttcagctctacaccaaactcgtatttccagatgtatacatgttaagtatcatcattacataatggaaaaaagaataagagtaatattcagatcattttattttctcctctgtaattttttattagaataactagtaactatatgtaaggctcaaagtggatttgttccgtatagtttgtgtagttctgtatagcgcatgggactgggtttgttgctactaaactgaaaaacaaagttggaatctaagtcctgtgtttattaaaaattccaagaaaaacaaggctttctttttcatctaacttttctagaaaatagacaaatcaatgagatcctataagtatcattgtcctggaagaaggtgagtggaaagtaaagagactcaatttttttatctttttaatatgtgttcatgatacaaaattgagcactctgaattttcgcagacctttctccctttgctgtattaacctcaagtacctttgaatagtcttggtacaggtatattctatttataacagccagtctattatctggttctcttcctcttcctgtgttcctttcttcctgctcttactgatcagaaaaggctttctaagctagagtgtgagagttacatgttaacaataagtgaaccccactgaggggtttcagccactgagagactgacccagaagcagcagtagagggcgctcggcccctcatttcataatagtggagcctgcaccaaacgtctttcatttgaggagctaaaaatgaattgcacgtattaattaagtcttgccgaggccttgttagtgatccggtgctaagcgcctaaaataagtagatcttattttaatcttggggaaactgggtataagagggaatttcctgagactccatagcaagagtcagaatttcagcaaaaacccaggaatccttctcttaccttttcttgctctggctaatatcccaactagcccttcatttacgaagaaccaaagggaaactccaggacttttaatttcctcttgaataattcctttaatgaaggacatatgagatttttgcttgaagtaaatgttaccagcaacactgtaccacctattttaaaattaatcccttttgttagatagctattctagtggctctttgcttttaaccaacaaaggcccttaagaaaaggaaaatgaaaaataaatagcagtcctggaatcctattgcctagtgtaggcagatcatattctgtatgatcttgttggctcatattatgtggtgattagagctgggcttcaatcagctggatgattccccaaggcagggtcttgtcccaccagtgcacatggtgcgccccrtctgacaccagggcgacttgagaattgagcccagggaagctgcagtgtggtgcagcagatgcgtactggtggttgccatggagatcgctaatactgctgaaacccaaagaaagggcatttgccacagctcaggagcctgcctgaaaatgaatgagaaacaagtggaattcagaatagtcccccagctccttatcccacatggagttttaatttccttttctcctcctcttmctcttcctttttcaaagaatagattgaaaacaaggctgtgttataaagcatgctcagccccctccgacctcattgctgcctgacatatccctggaatagatgtatattaatgacgacgcatgactaataggattggggctgggggctggtgtagtggtgcttctggagcctgtgggccgcatgtcactggggtttagcaggcacgctgggatttgtctgcagcatatgcgctgctgttaatgattgaaaaattaccacaacaattagtcatggatcgctgaaggcagggcccccaaatgtgatggacaatgtgattaaatccatgtatgtgacaattaactctcctgcaggtttatccaccaaggagggtgccctaggggtgagagcaaaggrgaatgagaaggaggaaaaatgggaaaacaaaaaggagcaggagagaataatgctgcagaatggatcagatacagctggcactattggttttaatctgatcctgaattaatcacggtttgattaatcctggttttattgcacctttctgttgcccatttatttatatcttccttaattttatagaagcatgactgattaaattctgcccattctgtgttttttaaattttaaaatcaggtctctccatttaatgtgatgtcctaggtggtccaaggtgcaattatctcgtaagagcttagcaggcaccagacatagcatgtcatgaatccccttatgtatcacagctgagtaacccagaataaatatttgtttgctcaatattctgcctaagtaaaaagaagccttgtgatgtcagtctgcttgtttatttgggtggaagaaataagaatacacacccccgcaactttgttaaatacagagagcacacattcagtatatgtcacacacaaaattttgtgcataaagaaaaagtgtgttaatatttggatgaagtatctgcaaatatatattcatggcctaaaagggtaatgtttgcagtccatagatatgttcatacgtggaattatttttaaccagtttgtattgttcttgttttgttctcgtttagatgttacttttggtgttatctatatttgcataccaaacactacatttaaataatgccaaggaggttgtgacacgaatcagcacaagcaaaacctcatgctttgtaactcacgcatgttggatacactgtgtgcattaagaataccctgctcctggccaggcgcrgtggctcatgcctgtaatcccagcactttgggaggccgaggtgggtggatcacgaggtcaggagattgagaccatcctggctaacacagcgaaaccccgtctctactaaaaatacaaaaaaattagccgggaatggtggcgtgtgcctgtagtccccgctacttgggaggctgaggcaggagaatggtgtgaacccgggagatggagcttgcagtgagctgagattgtgccactgcactccagcctgggygacagagcgagactctgtctcaaaaamcaaaaaaaaammaaaaaaaaaaaacaaaagaataccctgctcctgattcaggagagggcatctaaagctttagaaaacattgaattatatttacatacattgtttttcttcttacagcattcctgagggttrttccattgttcttgtttagggtgaatttggtagaagactcagttttttatttgcaggctaaattgrattatctttgttacttgcatttttacctgatctacccaggcatataaggatagatttgtttgtgatgtaggcagcggtgtctttcaatatagtagaaaaagaaaataatcagcataagcaaagatctcagtgcacaggccacacagaatggacgccgccctgctggatacctttacacccttgcatccctagctgctgatatcactgtgtttttagaacaccactccagaaacccagtctatccatgaatgatttaggaacctcaggatccctcctgttaccaaatttgtgctctccatgtagcctcccaataaccagcccttcagttctgtgaaggcaggaaaacacatcattcatgaatgtccttcatacccatcaaactaaaggactgcatacttctcgagccatcatcacatttccgttatctccaatggcacatgccgctgtctacatgtattaatttctgctggggcttcagtaaccagggccagccagcacggtttgttcatttgtttgttcattaatgcattatttcatttatttattattgacatatgttgggcagtgtaccgggtacttgaagtggagatgaaggtgggacacagggagactcacagtcccaaattttatgctgaaggtgtgttgtagagataagatatacagtcatgcatcacttaacaacagggatgcattctgagaaacatgttgttaggcaattttgtcgttgtgtgaacatcatagagtgtatttacacaaacctagattgtgtagcctactacacacctaggctgtatggtatggtctgttgctcctaggctacaaacatgtacagcactttactgaataccgtaggcaattgtaatgtgacggtacatttttgtatatctgagcatatctaaacatagaaaaggtacaataaaaatacagtactrtttttttttttttttttgagacagtctcactctgtcgccccggctggagtgcagtggcatgatctctgttcactgcaacctcttcctcctggattaaagcagttctctacctcagcctcctgggtagctgggattacaggcacccgccaccacgcccagctaatttttrtatttttagtagagatgggatttcaccatgctggccaggctggtcttgaactcctgacctcgtgatccacccacctcggcctcccaaagtactgggattacaggcatgagccaccacgccggtgcccagcccagtactgtcatcttacaggaccactgtcatatataagtagtctgccatttaccaaaacattgttacttggtgaacgacagtgtacaggaagaaccatatacaaggtggaaattgacaagtaccacaagaggaaaactaaatgaaaggatatgattgtttgcagataggagaaatgacttctccgtgggtactggggaaggttttgtggcatctgacttagtctttgaagaggttcccaattcactcatagccaatggttgaaagactagatttcttggacagttctcraaaagagttggatatgcaggcttgaagagaagtatattttaggcacgtgcaagaatgtgggcgtagtactactttggacataacaaagaaacaacttgatttgaatgtatgatgtagaaagagccttttggagccagattacggaggaccttaaatgctcagccaaggagtttagacttccttttatagtcagtgagttgagggataataaaagaggacagatgagaagacgttgcatgaagcatgtgcgtttcagactaggactctcccctgaccacagtcctccaaaaacttcccatgcagcttcaggtagaatctcggctctagctcatggccttcaaggctctgcatcatgggcacctgcctcctatttggacatcatagacccctctttacttccctcactcctgtagtcacactgtttactgtttccagctgagtctctgctcttactggtctctgtagctgaaatactcctaccccagggctttgcatggatgccgccttctcattactcaggtgcagctcagagagtccctcttccactctttgcctgtctcccaacctccaattcccctctctrtgtcccagtctcaagtggcttgctgtcatggaygccggtcgttgctcccctgatgttgttttctcccatgattttgctccattagccattctgtaactcagggaaggtgtgcctatccgttggccaggggctaacctgatcatagtaattctcttattatcagtgattggttcattcatggcatgtgacccagtgagggaccaatgagacatgatgggggaaaagtgtcttcccttctgagaaaatgtcactaaagagatgttgcctcttccttccctccaagttgaagatcaggaggtgaggtctgggtctgctgagtaaggacagttgacactcagaagaaggcagcccccggcgaacgggagagaaccaggatatggatggaacatgcccacacctagacttcttgttttgtgagatgttatctccttctcaagtccctttgagtcrygttttctattacctgagtgggaagcatactaattgatgttttcttttatatcactctgctttattttcttcatggcatttgtcagttggtgaattatcctgtttatttattctcatgtttattgcctgtcttccttactatcagtgaagcttcatttggacaggaacttacctgtcttgttaactgaattcacaactcctagaactgtgtgaagagtatcggtaggtgaccaataaatagttattggatgaatgaatgaatgaatgaatggagtgagggagggatgaacaaatgaaagaatgaagtgagggagggagattaatgttgcccttgtatattttataaaatatcatggggaggggttggagagggcttatggaaggccgttgccatgccgaggagttcacagctaggtattgagagcctgccccttggttgttgcagtgcagtggggaagggccagacaaaagggatgtgacaaacctaacaggacttggaactgcggccagagtggaaatggggagaggtgggcttaactcctgaggctgcaccagggggttattgggaggaataggatgtaggaggaatagcagttgcaatactggaaaacaaggaagtgtattttggaagtgtaggatattaagtgccagttaggcatcagtgtggagctctagctggtagttgagaatgtagaaatgaagacagactacttttataatcagaagaaaatatccctctttctttataaagataatcaggcctggcaattggtacttctctttcctagttattatgcctgactcaaaagcagactccatgtccaattcaatttatgtggccagagcccctgttttatgtgcctatcataataatttgtgtataattcctttattagaacaaaaccaaaaccaagtaaagaccttgactgtccttgggtctaacagggctaaacagagctagttctaagaatacttagatggtcagagattagccaggaactagtttctgagcagtgtctcagctcacaacagacctccttcaggtattccctatctcattaccctagcttattgtcttcctgccgacacttcctgctttcctgaaataccacttttatttgtttgacccatgagaacagggttgattaatgccaattgtgactattataaggcctagttgacttgagttagagaatgctacaatgttttcacttgtcttgtctcactgcggcatctccaggacatataacatagtgattaggaacactggctctgaagtcagactgcctgtgtttgtatccagtcttactagctgggtgaccttgggcaaattacttaatgtctctgggcctcagtttacaaattattgtaaattaattaattttgtgtgtgtaattaactgatatcttttgaggagtaagcaaataaatccatatcaaatacttaggcaaggctgggtgtggtggctcatgcctgtagccccagcagtttgggaggccaagatgggaggatggcttgagaccaggaggtgaagaccagcctgggcaagatagtgagacctcatctctacaaaaaataaaaaaaatgagctgggcgtggtggtgtgtacctgtagtcccagctacttgtgaggctgaggtgggaggatcacttgagcccaggaggtcgaggctgcagtgagccatgattgcaccactgaactccagcctgggtgaaagagsgagaccctgtctcagaaaacaaacaaacaaacaaaaaacaaaccagtaacaatgacccgcccccaccaacacacatacaataaaacacttagtgcttggcacatattaaacgtgatgtcagtattaacctggcacacgaagacactcagtcaatatgtgtggaatccaactgaaagagcgcagattgatgtggctgtaacaggggctccagataatttcattagcctaacctgtgaccagttactatttaacctggctgtctattggtagctttttccaattctagataaaatcctagtatggtacagacagataggtggtgatcatatatctttcacttgtatgatgcttttacagattattttcttactatctgatctcatcctgacagctaatcttgggaatagacaggaatatcatttccgttttatgaaacaggaagcttaggcacagagaggttaagtgtccttaataactcatggcagaagcatgagtagagcatgagcctcctgtttcccagaccctggctggagctccccatctgttcatcccartctatgctaccaatgaacatagaatacatgtccagatgcccaggcaagataagcgttcaaaccaccatgattctctcacatcgactgagtgcccctgtcttgcaagtgcggaacaaccagcaccaccaytaaaatggtggttcgtccagggtgcttccctggcttcccccaaattagtgctcttcgggctgtgtatacctagtctgagctgccatgagtggccagatggttgtggtttgttcattccctcttggtggccacaaagcagggcttcccaggattgcgttattctccctctgagccaaggagagagtgctcaggcctgcaggggagtgagacagagccccaaatacttgctgaaagtgccaatatttttagaagctccctatcttttcttgactataaaatatacaaattataaacaccatcatatattcacatttattttagtatgtaaaagcaattagtttgtttgttatgtagtaaaattatggcttctgggaattccatcggggtgaacccgtgaatctgtatcctggacatacttgcaatgcgtatcagcctgtagtcacttttgcttaggttaagggtctggccatctgagcacagttggttctctgtgtacggtcttttcacttgtcatcccttttttagggaaaccctccttggggttacaacatttaacatgctgcctacaaaatgtgttgggtgtgtgccctctttcttgttggcattgttagattctactcattgtattcaaaatgtcatattccattccaggagataccacagtgggagaggcaacatgacatagagtgcattttaggaggctgaagcaggaattgagttctactttgctttagtgttcatgcgtttgaccaggggacagtcttttcttgaaaacccaggacagcaaagtctccagatagtcatctagttttaactcccagcaggataaaagcatttctaatacacagttgtttatcttttaaattttgtcatctttctgatccataacttctacttttacattatatatccacagaagttataacttcttataacaaatgctgttacagctcaaatctctgcataataaagcaattgctaaagccctgtgcagtgacccagttcaggcggtatcgtgtatataaaattccacagcgatttaaaaaaatcattctggtttgaattattttattaactccacattacaacttaattgtatggttaggtaacaactttaaagyagttaagccaaaacccacacagccacacctgaatataccagtctcagggagayaccagctagctatattgatgcaccctgttctagcacaaccctctgctcctcaggagaaggagaagggcaggaccattggaagagttagggacctacggcccccttctgtcatgtctgtgtctgcacagatctttccaaagagtagattattggcttagtgttaacctggaggaatatttctagttggggtgatgcagagccctgtcctcagaactgtctggttcacgatttttatcaacgactttgatgaagacatgtttatcaaactggcagttgacgcaaggctgggaggatagctaatgtgattagtgacttgatcttgagtcaagaaaatcatgatcgtctaaacggatgcgccagaaataacagggtgaaaaatagtaaagttaaatatgaagccttcaaattaggtttaaaaaattaattgcacaactccagagtggaaagaagtggaggatgtaatttgtcacagattcaatatgagttaacttataataaggctgttgaaaaatgcaggcaatattatagaagtacatatacagctcaaaaaaagtaagaacatggcgcagaacgcatctggtttattgtatccggtgtttcttttctcttcctgacctgagatatactaaaattcaaagattacctaatggcatacctgttttagtaagttaagtgcaaatattctaactgcaagttgagataggttgagacatgtgacttttggataaactctttgaggtaagaatgacggtttcaagcacattttgggaaattgtcaaagatctggagtaagtcctgccctttgctatctccttcttgcctctctgccactctgtccccttccctcaaataaaaacttctgctaccactgtcacttaaagcaaagctaccaaataggtggcttcttttctgactgagttgcctgcaatcttttatccttcctccttcctcctaggtttaactgcatggtgaatttatagtgtcataatggatgtctctttaaagcaggattctgcaggatctatagaagactaaaaatgaaaacaacatcgagtgtgtatgagtgtgtgtatgtgcacacgcatacgtgcatttgtgcatgtgctagtctgttggtcgaagccattttgcaaaattaaaaatgaaagcactctttaaaacagtctttgcagttagcctgcagcacagtgttcactggcagcaggaaaaggcagtgagtcctttatgcacgtcttacacctccctttcaactccctgtctctccccgctggaaagagaaatattctggcacaagcatcttctcgtctcggttcagaacgggtaccacctgcctccagagcccaggggagccctccktgtgttcctgcccaggcacaccacatggaaatgtggacacagtgccaggcggacgtgttaataggcagggaagggggaggggatgtgtaaagcactgcaaagcttttagccacagccacctacttattagctagttaaggctgcccatggtgttgtgaagggagagtgaagacatggggcacattgcaagctgtccattggacacagggcaagttgtaattactaccacagtttcttttcttttgtcgtttttctggatctgcctcagttcattgttcttagacttgggaaggggagaagctgtctccagccatttgttacaagtagtctagaatctgtgcccattaagttgactctttgaaagaaaacaacaatttgatgccattttctatcccgaggcccttgtcctttagagtcacagtcctatttatttattgcttgcatttggcatgcacagcttcaagagaatttccttttaaatttctcactggtcgtttgagcttatccagccatttttccctgggaatttggggtgtcagyatgcattctgacagggatacttaggcggattggaatggcaggctgttaaaaagacccccccttacttccagatccactctcgtggtctgctctgtgatgctgtattttcacacgtggagacgcagctcttaggatggcttcttgctcctccctaagtatctgtggatatgcttgaggactgtcctcgtaagttccttctcagcatgaatcggttcatcagaggctttcttgaaggaaggtcgtaccagagtggggactgggtctcatgaaacggagaggaaagaagccgaggaaacatgcttcctctttcttagaaacctcaggtttttattggataagtaaatrgtaatatcyrtctcataggattgccagcttacatctttttttttttgaatcagatggaaaataaataaatgccacatttcaaaaagtctaggaagcacaatccctcctcacatttttatatttctggtatcagtatttgatatcagtacaatccatattatctttcaatyattttggcagaattmtttttttctagtggtaaattacacagcatcttattatctctgatttgatgcaatatggtttaartgaccaggactgttrctggattaaatgaagtaaggtgaggcatgcggaactctacaaatgcccacttaatgtttttgagagtgggccctttttcctgaggttcattaatggagagcataaacatggagagagacttggaatcctgacctcttagtggatttctagggatgctcttgtccttctttgcttcctccaggtattgaacactcgaatgccaggtggtgtgctaggtacaagcttcctggaagtgaaggacacccttatccccagggaggtgagagtctagtggagacagacagagcagcacccatttgaaaatcactgtgatgagcactgcaaggtgctggggaagcacagagaaaaaaacctcagctcagttgacgtggggctgggtaggaaaagcttcaaggagggggccactgggctgagtcctaaaggacaatgatggattagctaggaaagttcagagtcagcactttccagaaattacagttgggaaaatcgtgcatgttctcatttgtaaagaagcctgccttgggtgtacctgtgtttcctcctcatgacccagctctggtttctgccacagctgcattggaaggaattgctggagctctgactgaccactgctgccagggcccacaaggagccataygcacatctatccacctctgcctgggacttctccagctctgtaggcactccytgggtccatgtacaagagcattatggaatggcagccctcaaataaggagggatgggagctggtggatagataccccaaactgctgggttctccttcaagctgacaatttctaaaagtattcagtgcagtggatactattgctcacagtagcaatctcaaaacacacctttatcgtagcttttctccttttatcactccccctgctcctgcactctatctttatgtgatcaattcccaaaagacccacctacaacaaagtccttgtctttggctctgcttttggagcaacccaaagtaattcagtattgactttttttcacagtactaacttaaagcttatattaggccaggcctggtggctcatgsctataatcccaggccaaggcaggcgggtcacctgaggtcacgagktcaagatcagcctggccaacatgacaaaaccctgtcttactaaaaatacaaaaattarccaagcttgattgtacatacctgtagtcccagctactcaggaagctgaggcaagagcattscctgaacccaggaggcagaggttgcrgtgagccaaaattgagtcattgtactccagcctgggtgacagagtgagactctgtctcaaaaaataaataaataaataaataataaaaatgaataaataaagcttgtgttaaggagacttagaatatggtataaaactggctcaacaaaggtagcccaagagatggagatgaagaagaggatgagcaggtgagggggggcattaagacaaagacaaccagagcttgtggatagaaggtatagctgtacatgcatttctaagcctgaagtggttcatggagtaatttgaacggattcagggcctgccaccaacaccagaatactccaggggaaaaaggagacttggaagtttgaaatgcccagtaaaacttacaggcaatagctactgaggaggctgaggctagaggattgcttgaacccaggagtttgaggctgcagtgagctagaatcatgccactgcactccaccctgggcaacagaatgagtgagaccctgtctctaaaagtaaacaaaaacaaaagtgaaaaacgttcaggcaaacacataaataagtgattccattatttctggatgggccaagggggacatacagaaggcagtgttccaaaagtaatcataatggttgagttgaattcattatgctgtgaaggaattatctggtaatggttatgtggcattggtgcattaccaatcagaagttagaaggaaatcatgatcttcctcatcatgtatttgcgtctaatcagaatcgtgtgaatattaggttttaggtggcaacacagtccattagagcttgcagtgatgatgggaatgttccatatctgtgctgtccagtatggtagccactaaccacatgtgactggtgaacttgagttccaattgagtgtaactgaggaactgcgttttaagattacttagttttaattagtataaactgaaatagccactgactgctttattggacagtgaagtttagagcataaggaaaagatacaaaatactgaagtctcacgtgtaacctctgggaaacctggggacagtcagtggtcccagggtgaaaaagaaaaggatagtttgctttactctgcaagccccagaaggtcctcacatcccaggaatcacaggagtggcctggagggtgtgtcagagagaaacctcctagctggattgaagggcacagtgagtttccaaagggactctgttgttgctgagagaatggtatccttagtgcgtgcagctgaaggccaggcagacgggggcacagctgttcacctctctgagggggcctggactcctggggctgtgtttgtgctagttttcaggaacccctgtgaaaaagccasattagacactgtgggtgttctggagacctgaagaggccccggaggagccctccctgggcactcagttggtggagaggagagaggctcttcctcccaaagagggagaaagcccatggccttagctattctgcttgaattagttgaacttattggctactcctgtgaccctggtacatgcaccatttttttcagcttctacagaaattttgtttcatggccaagtcagtggactcggagctgcctctcctttgatgtagcattgagtgtggtgtctcacttttctcctttgtaaaatgggcatactttgctcatgagattgttttaaataagacatgagataatgaatgcaaatgcagtttgtaaatgttaagtgttgttttggaggctgactgtacaaaacttaatgagggcataccttggtcagcattttttgccttctcttaggcttgcttgatcccttaaatactctaatgggaaataggaaacttctcacatgatgcagttcttaacgttgtcttcatactgttaagatttaaagtrggggggactgggcttgaaatcctttttcctggggggcagtgactgtggggctaagagtatagctctcaggccgggggccgcagactttctctgtaaagagcctgatagtaaatactttaggcttcgtaggctttatactgtctctgttgtatctttgtctttttttagatcttttaacaaatgtaaaaaacatttttttgctcaagaccatccaaaacaagctactggacacatttgacctgcagcttcggtttgtcaactcctgctctagagtgccctgtcctgcagggtggccatgagccgcacatggctgtgtacatccaaatgaattagaattcggtaccactgagatttcagttccttggctggccacattccaagtgcccactagccacatgtggctggtgcctactgaactgggctgcacagacacagaacatttcccgcactcaggaagttccgtcgggcagccctgctccagaattaggtggaatccaactttgccactgctaaccttggggacttagactrgttattcattatttctgaacttcttttccctgcaactataacgtggaaattatagcattacctctctcaaggatatggcaaggatttaatgaatataaagtgcttagcacagggccattcacactcagtaaatgttagctattaatagagaaacagatgcatttctgttactactcattttagtaaagcttaactttttatatattatatatttttatatttggaaaagggattatcatcctcactacaggacacctgggaagtcagagatgaggttttggttttagtctcagtagttgaccagagaaagggaagtgtttccctgagccccaaaccctgtttccacgcagaacaggtctgttcttgttatgacttgtttttattttagccttctattcaggtgagttctcactctgtggtaatttcatgaaaaatttgtggtaaatctttgttcagcttagtggtggggttagagataaaagttatctcacaggggagaagkctccaccgtcagaacttctgagtaaatgattgctttccctttgcttgtgaggagggatagccagtgctgtattgataagcttctctttcaatactagtatattttgttgctgaacaacaggacttttaaaatatattgttaatgagccaaatgtgatgccaggaggtcagcatgttgaggtgtggacttaagctttgcattgctttccttcatcccccgtggtcagctgtcagccacgtttccatcatgggaatgcatgcacaggccacaaggagttaatccttctgtccttccaagcaaaatgatctacctctgtcttctgtgaagagagatcatggtttttaaaagctaatatgataatggcagtattattagcaatctcaaatgaatctttgatcagttgaattgtttgatttacctactcattcatcagattttttgtgccgtgaacatcacacagaatcctagaagggcaccgtcactgacagaaatgaagctggttggatattggctgctcatgtccaggggtattgatgattctttcaaataaatctcaaagtaaggtatgcataaaaagataacactcagctgatataacattgcttatacagagaaggtttttcatttgtttgtctttcartttccacatccaggtgttgtgctgtttccctggacctccgggttcatcacacagcctctggtgcacctacctgggtgccaacgttgtaggaagaagctgtctgcactgacaggcttgtggaggcgagctaaactccataaccccatgactgtacatcctgaagcagagttagggagaaccagtctccaatgaccactgacaaaaacagaatcaaagtgataatagaaccaaccrgcactacaattcctaacatatagtgtgcactcagcaaccatgtggcaggtaccaaggtcaaaaacatacctcaatgatatgtttttatgtttaatacctacaacagccgtgtgtatttggcactatcgttgctattcccatgttacccattacagagtggaggcctagagaagataatttgcctgaagtcgcaygtttcagtcagtggcagagccagattcaaccctagctggtctgagggcagattctgtggtctccccaacacgcatgggttctctttttgtctctgcactcactgacatctgatgtaggtacgtggctttaatactcagggcctcctctggaaaatgaatggtttgaccagactgctccaragacctttggtcrttgacataccgtggttttttyagatcctgcagtcatcagacccctcagtggctttacttgcttacgtcacctggtctccatgaggacacatgctccatgtgtgtggcatgtggaaaggctcagtaagcattgatgagcagactgacttccatattatcctgtgttgtaggggcatggaagctggactctggggcttattctggagaatattctctccttgaagcagtgttctttgcttgaagattatttcttttggattttactcttcatcagaaagtagatgttatgatcagctgtgtccttggataaatgtgttytctcctgtgccctggagttcatcttttgctttcgtgttaagcctagacccttttttacctctgtctctctgaatcttccctaacttgatcccaactttcccctaacagtagtgattggaatgctcaaacttcaaggaaaaaagtacagacatacattagtgataatgttcaaaaggctatcgttagtcagattgtaattctgttccttgtggagaactttttcactggttctatatatatgaagtactcaggcttccaccagttctatcagagctgaaggatttagtagggtcaatatctactattgcactgcctaaatatttctaatctaatgtacttatatttgattccatggacagaattatttgctctgtactaatatttggccatatatgaagtcatcattacaatgtgttcatattcacctgttcatgctcaaatgaataattttacagtacagtgctgaagaaaatattgtagatttttgtttatttgctgtagatctcttttgtgaaagagaatgggtttaatggagcataagagtttagttgggacttgttgaatttgaggtgcctcttagaaatctcgtgtctttgcagaacttcagccattatctttggtaaaatcacccacctaacttctctttcagtctctggcttttatttggcttttaaatacttcatactccgcatatctaaatctgaatccatcatttcttcctgctttcctcagacacacacatgtacatgcctgtttctttttcaggtgttcggatttcttttaatgttttcagtcaattcatgtagtaaatatttattgtgctcttactgtgtcccaggtacatttctaggcactgggtctatagcrgtgaataaaacaggccaaaattctacctttctggagcttacagtatggtgggggtaggcaatccacaaggaaaatgagtaaattatatatctagtgtcatcaggtcataaatgatagagtgaaaatgaatcagggaaggagamtaggaaattctgagtgtgggagtgggggcaggggtatttcagtttaaaataggacagtcaggctgggtgcggtggctcacacctataatctgagcactttgggaggctgaggtggacggatcacttgagatcaggagtttgagactagcatggccaacatagtgaaacgccgtctctgctaaaagtacaaaaaatagccaggcgtgatggtgcacgcctgtaggcccagctacttgggaggctgaggaactggaatcacttgaacctgggaggcagaggttgcagtgagctgagatggcaccactgcactccagcctgggtgacagaatgaaactccatctcaaaaaataaaataaaataagacaatcatcagatgcctcactgggaaggtgacatttgatgtttcaatgttatcatgacatttgaatttctcctttgattctctttcatctccagtcagttgacaaattcagtcagttcaacccttgtaatatgcttccatctctttccttctctctacgcacgacgccattacttcagttctgggctttatcactctttcctgtacaggcatattagtcttcagataggcctaccagtcactagtctcttttgaatttgatttttgattattaattgctggttattattatagaaagtttttgcattttatgtatartgaacttacgttggaataaataggttatgaaaattttataaaattktaataaattgccatagttttctttgaagttgaaaagcatataatgccatgcacataataatattttttattacggtattatttacgtaaaataaaagtctttcwtttcatgtgcaatttgatgaacttcagtaagtatatagagtcgcgtaggcacaatatcaagatacagagagttctctcaccctaaaaagcctccttgtggccctttcggttgacctttctcttcatccccaaacccaagcaatcactgattttcttttgtcattatggtttgccttttctagaatgtcatatatatggacttggataatacttagatgtttgtgtttgctttctttaactttacaaagtatttctgaggttcatccatgttgcatgtattaatattttgttctttgtaattgctaagtagcattctattgtgtagatatatcacagtttgtttatccattaatcagctgayggacgtttggattgcttccagtttggggctgttgtgtattaatgctgctgtgagcattcatggacacatctttgtctgcataatgtgttcatttctcttgtttcaatacttagaactgggagtgaagggtcatatagggctgtatatttacttttctaaaatattgttaatagtattttttaaagcaactgtaccattttgtattcccaccagcctgcaagatggcccccagtgatcgctgcttccttgggcttgtgccagtaatacagtctcttcccatattttgtcagcatgggtttgtgtgatcagtagagtatagcaaaagaggtggtacatcacttctgagcttaggttgtaaaatacactttagctttcatcttggttggttatttatgctctcttgaatcatttgctttgttggggaagccaggtgctgtattgtgagcagccttatgcagagacccacatagtgaggaactgagacctctggccaacagccagtgagaaactggtactgcctactcacagctatgtgagtgagcttggaagcagatatccaaccagttatacctccagatgcctgcagcctcaggggacctcttaattgcaacctcaagagagacctggaaagctactcaagtaaactgctcttggattcctgagcatcagaaactgtgtgagataattaatgtttgttgttttaagcttcaaagtttggggataatttgtttacacatcaatagataaggaatacaaggagagttccatcttctccwtaccctcagcaacattttatattgttggttctctttagcgattctagtagttatgtgatggcacttactgtgtttttgttttgcatttctctgttgactcatgatgttgagcctatattcatgtktttgatggctatttgtgtatcttctcttgtgaagggtttgtccaaatcttttgcccatttaaaaaattgagtcatttttatgttttcattttgtgttttcttccctgaaaatttgttgcccccatctctataagagatgagaatccttaccagatgcagctaccataattgttgctgtgcagaattaagtaagtcttgcggtaactttctagcagcatttcgatcatacttagctttaagttctccatcccctgcattttcctaaagtgacgtcgagttaagaatcaygcgccattgatggtaatcctccagcctgcactcaaaacgttttccgtatcattaatcrcttccctgtctcttgccagttactgagggttccataaacacagtgcttccccatgctgcaggagtccttccccgaaagatatgagcgyttcttcttctgcayatgccatagcacattcgtcattttcttacatgttcataytttatagtcattgctaatttttgtttccattgtaatcttaccctctttctcgctagtccctttaacacccactgcttctgtactcaccagatatcacaggctactgccactcttgtgacacctcacatgtaagtataaagcacaatgaattccatgaaaatcatatccagtcaaattagcagaattttcataacacctacctcacggtgctattgtaaagattttttttttttcctggtatgtacattctttttgaggttagagatctccttttacaggacttagtatctaacaaattcagtaaccaaacttcttgacctccccaatattagatcactaaatgtgcaaaagaactaccgttatctaggtcaataaaaactactcattttctatgaaacggtatgtgcatagattttaaagctgtgaaaatgcaataaagagcacaacacattttggtcacttaattaaatgacttttaataaagtagtagtagtttaagtttcaactaccaaacaacactttgaatggtgaaaacacagatagtatattgtcatatttgaacgcttttctttaaaaacataattctaatttgtgtatatattacaaaacagccttacagaaagaagtgagatctttctacagcacttaagataactcaatacaggactgatttattaagatagtgtatattcgacttttctagctcaagagatgagttaaaggataaactctgaaaaagtaaaatgtattatgtaaacattgataaaatattactatttattgctggttttatttaaatgggcatttcttcacagctttatcttaagtacagatttaaaattctaccagcaatataatcatgtcagcaaatatttattgagtatctgctatgtattaagcattgtactaggtctgtaaatgccaatgttggcagttggcatattttctatgaactttattttgtattcaacaagtatttatcgagcccctaccatgttctgggcctagtattggcagtgaatatatgaaaatgagtaagctgagaatctcatattccagggagtcccagttgcagaggctgatgtggagatgcaccactgtgcccggctttccctgcaatcttttgtttatggaatttgcagagtggctagagtgtatatagccttacactctgcagaccttgctcctgccctgccacccaccactttagggtttccaatgttataagcatgcccttgcgggctggagctgatgtttgcctctgcttttcctgtaatatggtctccatggctcacagaggcatctacacatttttttcctttggattgattttttctgctatggccctgtattctgtgtacttatttaggaatgagccgcttattggccggtgcctgtaatcccagctacttgggaggctgaggcaggagaattgcttgaacctggaaggtggaggttgtagtgagccgagatcatgccattgcactccagcctgggtgacaagagggagactgtgtctcaaaaaaaaaaaaaaaaaaagaaaaagaaagaaatgagccacatattgcactatgttgctctctcattacttaactgttggacagttgcttttcattctcatttattcctcttttctccacttagaatttaacattctagaaggtagggatcacatgtctcttagtacagtgctcagtgcagagcaacacttaagaaatactgctttaaatgaaagaagggtctgacaaaacattgatagaacaaatgtcttttgatgtgtggctagatgaagactgcagtgtatcgacctccaagaggaatggaaagtcaaagtcgcagtctctataggggaccttatgtctrccccggaccaccaagctgggactggagatctaacttctagctgtattgccaactagctctgcgacattggacaggtgacttgatggctcttagactgtttcctcatttataaaatgggagcagtagtattagctattcacggagttgttttgaggattgaaagacatgatgcacagaaagcacccggaatgaatgaaggtctcttacatagtaggtgctcacaaacgtttaacaaattatttatgtttttctcataaagcactacagatgtaatgacagttcaatgactttataaagtacaacatgctgcacaaatattttactgtcatttgcttttattttgtctcttgtgttaatggcatacccctctatattatgaaaataccagtttggtttaaagacacagtggacagtgtcatgtgatacaatgacagtgagtgccagcgctatttcagcagcaagaattattggagttcctgtcagaagttcatcttgggccactattggggcctttcaatactccttacgttgtttttctctagctcttgttttctgtttcctccttttttttttctttttttttttttgtggtgtcaagtaggctttgtgaggatggtttaaaatgtagggtatatactcagagtttaaatagtcagtgactacttgtttgagtcaggtttggttttaaaaagtaaaattctatgttttagaaccataataccttcaaagaaagcagcagccctggtgatcataccatccacccatcctttagttcacaaagaaggcggagaacgctcaggaggcctgccaagctcctgtagccgcaggactggaatccgggtctgtactggctgcggcttcacactgcctcgcttctcagcgggctttgaaactctgcgtgtttaggtgtccttgataggttcttattctttttgtatctttctattgctartaagagcaaattttctgtttgcactgtagagacttatttcctacattttgggaaggtggtcctcctgtggaagggcaaactccattattaggttcatgcccactaattctcttctctctcttcctactacccatcctttccacttggagtattctcttctgttgtttccttcacatctcatccttctttatcattcccatgtctcccttgctgtattgcctgcacaagttcacatgtttgaggaacgaaacttcaaacatagtctgtaccaagaggctttattattttctttttcctctctcccccttttcccctagagctagttcaaggtgtcctaatggtctaaaatgtcaaaagaaaactagatgaggaaaaagcaatcgaaaataactctattacaagcttccttatagttcagattcatccctttctttttgacccctttaaacaaatgaacatgttggcctatttcaggggtaattgctcttctcttcagaatacacctcctaaaatgactgctgtgtgaggttgaacattgtgggtgacgaatgtctgccagagcagagaactttgttgttttccctccttccctctcattgccttcattttcttcccttttagrtaataaaatccttttccaattatrgaaactgtagaggtcaaaatgtgactcaggttaaaccctgtgaaaactgtagccgcctgaaattataatgcacatttttgcttttgagccaaggtagtgtgccagctggaagatgtaaatttgtcatcattttctgcctttgtttcatcttttctttccttttctacatcgtcgtaattctcaaactttattgtttttctctgttattctctccccttggtaaacccctgtgctcccagtggagccagaagaaattgtacatggggctttgatattttgccaactgttttctataattaaaagtgaattggaaatgggaacacttcctctgttccaccgatgcttctggggtctagtctaatagaaacatggaaaggtgcaaaaaaagaatctggagctaggaagggaaaatggaagcttgcaactcaggctaaggagttcctaatggaacatcagccctttaagccttcgggttttctgttctaaatttgctcttttctttgtgtcagatcattagaaagttttatccaaaattaaaccagtaatactgaggtggtagctcatagagcttgtgattggcttgatccatgctaattatcttctcagttgaagtaatcaaaggcagagaccataacagaacaatgtggactctgagagactggtatttaaattctcatgatttaagcagaaatagtaaatagattacaatttgtgtatcaggcctaattagtccctagtgcagggctgatggaccatgatcctataaaatattcagtatcacgatgccctgcctgagcagctaaccagcccttcactgtctgaatatggaagaaagcttgtcttgttaaaatcatctcaaattactatgacctgcttttcccctaggatccctgcacaactctccctgactccccacccccagctaattcttctactttcttcccgattactacggccatataaaacaatatatgcccttttcttcttatcttttttttggttgggggtggaaggagggtaatactccattgagtactctgcttttgaatccgttgaatgtctctctagttgctctgcacagagcacattgcttaagtgcgccatttgtcacttctgtgtttttagttgatgactctagtgttgatactataggaatcagtataagattayttaaaatgaagccttacaaggtgttcagcattcagaatattttgtcatcgagagggaggagctttgggaaattagtgaatttgctctacctaaaagcttgacatctgtgtagagcatacaagagatgagggtgtgcgtgcattaacttgctacgggtgccataacaaatactgcagagtggagtgtttaagtggcagaaatttattttctcatagttctggaggctacaaatctgacatcaaagtgttagtagggctggtttctcctgaggcctctttccttggcttgtagatggttactttctccctgtgtcctcacatggtctttccctctgtgtgtatctgtgtcctaatctcttcttcttgtaaggacatccaagtcaaattggattagggcccatcttatgacctcattttaactaattacctcttaattacctctttaaaggctgtatcacgttctgaggtcctgggggttaggactttcatatatgaagtttttgttgttgttgttgtttctttctttttatttaattttatttttttagaggtagaggtctcactatattgcctaggctggattcaaactcctgacctcaagcagtcctcccacctcagcctcctgagtagctgggcctgtgtgcatgcacctctgcacccagctgtgaatatatgttttgagggggcatgattcagccccaaatggggtgaagaagctctaatcctgttactgtgaacagcattcaatataaaagtaaggctaactcccttataggatggtactgagacttaaatgaaatctcgtgtatgatgattttgaaaactccaaatccctacttataagaatggtagcatcgttatcattattatataaaatacaacaatacatataatgatcattataatataaaaatgatcctgtttgaaatgactgagtccacatgaggaaagagtgagtttgaattgataactgttcccagagaaactagtccatgtagagaaggaaaccaagatgttaggagcaggccaggggccagcatcgttgcaactctgttgagtttggagctgttctaaaatagtgaatctttttgccaggcctgatgagaatgaaaatcttaatgtgggataaaggacaaactgaacagcacctacaatgattggctgtcatggattaaatgtcagaaaaatgagtaaaaggaacattgggtgttgatttcattaataatagaaataaaaatgtttcaacaaacatcatttcacaccttcagttaaaagcctgtattaactgttatcatggtaaataagatatttaacatggaaaatgaatgccaatggtatcattcaaacttcttatagttctctaaatatatgtaaaatattttcctcaatattgttctgactgagagcaataaatgtgggtaattttattattcttttattttaaatagaattttaggaaatgtttatttttaaaatgtaatcctttcatttattctcctctaccctaaataagtaattcattaacctttcattgtaataggagcgtgagcatctgaaggcaattaactgttttacattatcattcattgtgaataaacaaatagtttcaccctctttccccagagagctataatttagggattgtgtagctaattatacaactctagagccagttttgagagggatagctatcttctctgatcacatctgctttcacctactgtgctgggggccctggggaatggaagggactctctaggggtgtttaggacttacatatttgttgagttaggcgatttgatgttacttgtggtttcattgaatggaatctaggacagatcttaaaggataagaaatgattaaaattttttttcatcttttggtgttctaaattggaaacacatcctcctctgatggtaaaatagtcagttctggattatctcaaaagagaagattatttgagtggtagagttttcaggctccttattttttccttttattcgtgtcactaggcttttgcttgtttcgtttttaagagttatcgttcaagagcatcagcggggaaaggaaatgccagggtgaatcagatcggccaagttaaccatctgactgtctgatggagcttattttacttatcataaaacgtaagtgtttctcctctagagtttaagttgcttgagggaggaatctgttcatcaccgtgtctctaacaccagcggagtgactgcacgcaccaggtactcagtagatgttggctaagttcaattgttgaattagatttatgatccatgtattttttttttgtttttagtttacacaaaaagtagagttggctttatgtcacctatgactaactcctctatacctcctcaaagcagctgtcacttaccaccagcatttagtcacttttcagattgaattcctgtttctttacagcaggataggagcatgaagagaaggttaagatatctgagttaagacgagggagctccttaattgaattgggaaaacctacaacataaattaagcaggatgctagaaattgaaacaaggcagttgcatttccattgaagccagtagtgcctttttttttcttgagatggagtctcactctgtcacccaggctggagtgcagtggtgccatcttggctcactgcaacctccgcctcctgggttcaagcgattctcctgcctcagcctcctgagtagctgggattacaggcatgcaccaccacrcccagcaaatttttgtatctttagcagagatggggtttcaccatgttggccaggctggtcacgaagyggtgcccttttcttgttaaaagaatcttgggcgaggcgtgtatcgatgaaggctgcatctgacctttcactggcagttcactaacttggttctggccaacgtgtgcctaccccaaggaacctgggagagtggacatttttttctggatgaagtcttttgggagtagaaagaagggaagcaagtcagatagtgtggtgcttccctagtggttttattagggaggtccagacacatgtttccttcatgagacgcagactgcactttagttcccttcagtgcaggacatgagtgaattagggcaatgcaatgaaaaggaaagaatggttagaataaggtcagaaggtttgatttctgttttcagatttagcactgcttgggtctgtgagcttggagcaagtcatttaatctctctgggccctaacatgctcatccatgagtgagttaaatggattgacagctaatgattgctgctcctaattctatgcatttagaaaattcaaacttccctcaagttccccgtagagttcttaccgtttgctgtagtttgaacttcaggatcattgtctcccaatttgcttcctttggcttggtgatatcattgcctgcagaaatagaaaactggtacaaagccatttatctagttctgtgtgccagaatatctttgatgagatcataagtcgttcttttactttttaaaactaagtgactcaaatagtagtcactaactacttaaactttgggtacagcaatggcctacatttcctgtttcttttgtgttggttttcaactgtccctgtatggttgctgccttttcaatgccttctttcttctctctgcatacattaatacaaggggcatctgaaatttcagcagaagcaaatgtcaactgtaccaagctgaggtagcaattctaggggtrgtgtcctttccaaatgtgttgttttatgaagatataagttttacatgattcttcgtgtcagcagttttgccacttgccatcgtttaagaagtctattgggtatctgatcctgttctctattatttcattgtgctgcctccctctcgccctccctccctctctccctagaaaactttattttctctagcttgggaaaatgtgtgtggtacagtgagaaattctggtaacttgggtactgcgttttcttcagcttcttgagaaaaggctgctgtggaggctgggaaagtactcatagaaatgcagcttttctcccaggctgcaaagagctgcccatatggttctgtcgaagcagaatggagaccaaataagacttgaggaggaagacaccacattagtaagcatctctcctggatgactgaagggaaatcaaggccagccacaccagcggagggtggggcaaggccagrcgcctcagatgcagcttgcagaggagaggcctgtgcagttaccttcagtgtttttcatcagagcaggtaaactgcaggcctgtctggtaccaggtgctggctaaggaacataccagggtaccatggttaaggcacggactctggagttagacaaacctaggtttaattgctaagggagtcagagtgctttggttgtaagctgtagcaccaatttttgctaccttacattttttttttttaaaggagaggatgtattaaaatgacactggataattcacagaaccggtagaagagttgaaaggataaaggataagaagagggtagttctggtatttaggacagccacttgaaggtggtgccactggaatgacttggaacaaaacattttctgtccttgtgacattccagtcaagcttcaaatccccgagagagagagagagagagagagagagagagagagagatgccaggtctggtcttgttcttgttttgggagatggggctagaagagggaatgcagtgattaacaaacacaagattcattcacccagagaaaactggactgtgcttatcaaaagaaggggttagagttgctagacagaccaagccagcagatgtaaacatgatatgaatgaacattgccactcgccatctagtatctaaacctcaaagagtttaagtagtatcggtatacctcagccttgtactaaggtaaacaaaggacataaatctaatgaagaaataacacctatttcagagatrtgctcactgtgggcgtattgaaaaagatattgcctgtaaagctcttggcrtatgcttcatggtaagttctcaactcttagctgtgttaattacattttcttaacagagccattaactgataggtgactayacagctcagtttgcccaggacagtcccagttagtgcctttaaccttcctaattagcattgtcttggggttctcatttttttattttattttatttttatttatttatttatttttgagatggattcttgctctgttgcccaggctggagtgcagtggcgtgatctcagctcactgcaacctccacctcccggtctagcaatcctcatggctcagcctcctgagtagctgggactacaggcgtgagccaccacacccatctaatttttgtatttttagtagagatggggttttgccacgttggccaggctgatcttgaacttctgacctcaagtggtccgcccgcctcagcctcccaaagtgctgggattacaggtgtgagccaccacgcccagctggtttctcatkttttaaaataaagtatcattacgggttgcattaaaatatgccagaatgggcttgatagacctttgctttgtcctttgagcttgcctgcccctccagtcacatgtgagatgcgtgtgcagtgagcagagttctcagtgaaatctaaatctgtccagcaatgacgttcttctcttctcccaggcctttcacagtgcagctgagccaatacctccttgaatgaagcatgcaggtgctcttgataaaacagtgtgctgacacaccagtggctggggcagttaactcctcccagtccagcatggtgtgggagtagtatttgagactgctaccccagccagccttgtggtctctcagccagctgtgccgtggatcactccatagcttgcaaagtgcaggagccactggcctttagtcagatgaaacagtgagaattatagcaatttattcgttaaaatatgtgttggagagaggcttagccattatgtgttagaacctatagatgcagagaatagtttggcatgccctttctgcaagggtttgtcacattttatagggtatacatctgaagttattcatttattttactttttggtaatttttaaaattatttttcaataaacccttttggtcgcaattactctctccccaaaagcaccttttaaggaaaaatggattactggatttgtcaagaaagttgatattgaacgtgtaacctgtcaatatttaccattcacataaaagtcagaacagtatcactgaccagatttctaaaagaaagaaatctattgaagaaggcttcacaatttttaaaattttaaacatttcaaagatgagcatgtaagaaacacaatgcagcatttttgcatattgttttcaaagaatgacttttcatttaggtgagacaagtaactctcaagataatttcattctttctggagttcaggttttctcgcacacatgtaaaaatgtaggtatagcttttaatatcttggctcagttagcaaaagagctttacaaacagttaagtgatcctgccaattttatatcacagccatctcatcagatacttcaaatagaaaatcagttaattcgaatttttttttgtttttttccatgtgattcatgggataagaggaatgcttttggaagttcattttgtcaaaggtaacacacctgattgtgcgtgtgattgtaaatccattcaaaaagctcaatgtttatgatcaaattatttatttttgtagtgatgatatatgaaaacttttatggagaacaatgttttaataaaaacaacatcctcactaaattaagaaaagtgtagcagaaatatacctggattgatggtaagatacatgtgtatataattcataatttaaaaattaataaaatatataaaaatattttaagaaaatagtaaataaaagattttattaaaaatgggaagatgtaggtcaaaagacatgaagttgcagttatgaagtacaagtctagaaattacagcacaaggactgtggtcaataatattatatcatatactagaaattgctaagagtagattttaggtattcttaacacacacacacacacacacacacacacacasacagagagagagagagagagagagagataactgtgtgagatgatggctatattaatttgcctggctgtagtaatcacttcactatacatttgtatattaaaacatcttattgcataccgcaagtacatatgattttaaaagaaaataaattaattaaaatatttaaataaaatatacaagtatataatatgaaatgtattttgtaaaatcattgagtatagaatgtacatataattgataattgtatccaaacgagttgtgatattgtactcttagaattagaagctgccattgtaaaaatgtacagatatttatatctttacacagaatgattgaactacagatttttttcaatactgaagttaaatacaaaaacacacctcactgtgggaagaacacrcttgctctctttgcccccgtcattgatcagattttagaaatatgtcagcctttgaaaaacttctttgtatctcactgtaactatgctacactggtaatgagtgtatgaatcctttaaatcttgtctgcatttttgccccaaatcaagtggaaatcttaaaagtattcaattactggagtatcaggaaattcagcataggcaggttttagagacttgccattattaaaaccacagcctgccagctagaagatattgccgtatttcctcacaaaagcagagtagggagtgacaaattataggatgagggcccaatggtaggtacacaaaatttaattycaaaattgtataatttttccttagaacaactacgttatggaaataattttttcatgagacttctgtattttactggataaatttttattctatatcacaatggaatgaagttgaaaaggcttataatattgcatcatccacatttggtcagatattcaaaagaatcataaagagagacaattaatatgagagcttgatcttgctaaagttttcattaaagacctatacactgagtggaagcagaaagatagttcctttaaaaatattgggaatgaaatatttatgctttccagtaaaaaaaaaaaaaaaaaaagaattgagaacattttcctttggtaggatttgctctgagcttatcacttacccttaggtgttttcaaaaattaaagtagtgtggacttaacagaaacatccattgaagacgtcaacaacttcaagtcgcacaaaatgcaacattaaggaagagacaaaaattactgacaccaagctcgtatcaaacacaaatacttttagagaaataccaggacagaattcaaaacatacagttacaaaactgctcaaggtatgtaaatgtatgccaagaccaattactatttatattacttttaaatgtttataattaacataaagaatgtaaagaatataaagtttttatattttgccttaatgtatrtggacttttattttttcttttttgacatagggtctttctctctgttaccccggctggagggcagtggcacaatctcggctcactgcagtctttgccacctcagtctcccaagtagctgggaccacagatgcaagccatcacacctggcttggacgttttttaaagaaagattttagttttgaaaatagtttctgaataagagtgattatatagatccatgattatgagaaaaccagtttgtcagtcaataaatagacatttcaaaayaatataattttaattatttgtggtacctactttcactctcagaagtgtcttggtgtgaatgataaattatatggctattttattaatagcttttgtgaatctttaggtttaaaacatggtaraattcaaaacgctgagattagatggaaaaggcttggaggcccagcagctcagtccctgggagcttccttcgctcttccagattgatactttagttcctgttgtgccttagtggttttgctccaccatgaccccctttcttaattgagtagctccactccaacttggacagttgtctgtctggcaatggtcccctcactgtggaggcaatcacacttttagccagagaattttggatttaagagaagaaagagtactgtccacatggtcctgaagcgacatacatcctcctcagctgacaggattaagagattaaagtaaagacaggcataggaaattataaaagtattaatttggggaactaataaatgtccataaaatcttcacaatccacgttcttctgccatggcttcagctgatccctccgtttggggtccctgacttcccgcaacatactgtccctcttcaatggctgaagctataggatgcgatgcctgagagcattgaacaatcatgtttctyaactttgcacttgaggagcagaggtagccagtctgcaaacagaaaaggaagacagcagatgcagaatgaaaacagtatgtttgatatccagggtgtggtttttcctgagactccccttcagttccaccagctattataatattacaaacatttttataataaattaaccttttgctattgtaaatttaagtttacttgctgttggcagccagaagagtcttttcttttccacctgagttttaagcaaattaagacattgaaacaggtgaaggaaagagaatgtcagctttatttctcctcagctgatggaatcacatggctttgcatctgcatcaagaggacctgctctccctccctcccctccagcccaacctggagaatggtggggtctgcataacaagcatagtctctcagctgtcccagtggagagcagggcaagaaagcctattcccaacttcaaggtcttttagtagatcagctccgcctcatccagaaatatggaccagcaagtaacttgctcctcctagggagtactgagctcctagcgggactcagtaaagggcagggtgtggggtcaggagagtcactctaacggaagttttttagcagagagaaaacaaggccagcagaatagaggaaccccactgtgagttgaaactaaaacctgaaccttgactctcaagatttgtgaatgccccactgttggtccaacattcaaatgggcagctagagagagtggggctgggcacagcctcttaaccaccgaawtgtcttctgtttacaattctgcaggctccttccccatgttttggttgggatcagtgcagaagcttccctggtttgtctctagcacctcccaccactgcctaagattccagacgggtatcactctgtggacacccagcatatacaaaccttcataacattacacgaagatgcttggagcctgggaaggatctgctttgaggggaaagagcagatttagctaatagacatggcaactggtgagaaaggtcatctgcttcagtggttgatcactgaggcattcatgaaaacagctagatggagaatcgctctgaaagttcgtgaacaataagatagcaggggaaatctgactataacagtaaatcttcagtgttgctcttggcaatccagagtttttcacagagagaggctaagaggctaaccatatatttaaagactgccccctttcctggatacrtgtctactgtaaatggctttgatttttcaacataggatgactttttccagttttgcacatttgagtgcatgcacactgctgtttggagttttagatctttctaaaatccgattcacacagacacctaacctctttaacccctttctgccacctaccttctctgtgaatacagtgcttgcagcctttcagagacagaggtttcagaatttggcagcaaaaaaagtgatggcttctaacacatttacagtgtggttaacaatagcagttgctgaactctgccatggctgactagctttccactgttaagtgtggtcacactggtaacatttacttaggaactgggcacacgagttaaaatgttacatgcacaacccatttggggtttgaggtattctcttctacatacgttttacttgttcataaaaaggaagctctttaaaaaaaaaaaatctgatgtttagctcctgttgattcgtaatggctgagaaggagtttgaagcatgtttcttttcatctcctttcagcttttaatttttagtactttcacttatgtctgtaaaaagcagttaaaagtgaaagtcccctgacaggagtgtgtaattggcaggctggggtggaaggcaggggctcatgatggctttaagagaacgtgaagaggaagcagagctgttcattgtcaatggtaatagcttttaagagaggcagaacttatgatttgagcttaatttctaaatgaagctcattttccagtgtcccagcccacctctcagtggcctcccggctagtgggtcagactgcggacacgccatgatggcacacagagagaagaccggagggagcagagggacaagggagaagcagagagcaggggagaagaacttagaggtgtataagaatttgtttataagtgtgtagcctgttaaaacctgacgatccaaatgggatgggtggccagagcttatgccccgaggtaggagaaggtttcttttgcttctcaatttcagaatgtctggtaagcaagtgattgagagttctgggtttttataggcaaatagagaaagggaacaaggcatgaagttttattaaagcaaggtatgcttctatgtttcacaataagttattaagttcctctacttattttctagcactgcaatatatatgcatattctaatggggagttattaactctttgaagagatgaaaggcaaagatgtgaaatgtctgggaaaacaatcaagtcagtgatataaaccattaagtgcagtgtgcaccaagagaggaattttcaccaggaatgtaggtgatccccatgttgagacctagtatagttttggatgccacatctccgaggggatcatcccccacgtggattcctctcatcagaatctttcttgtagtctttgtcctaatttattttttgttaccattggaatctrtaagatgagcagataattcagcaagaaacaagctcaagtgagtgaacacatgacagcagggactgaaccagagggcagaatgcagagaggccaggagggaatctgtgaattagcaggagatcttcttggggaaaggggagcagagtgctggcaggtggggcgggggaggggctgaagccctcccagcagtggaggaaagcatgggtgtacccacagggagggcacaggcccaaagggtacaggacagaagtgagaccgaagtctgaattgaaggccctgaaaggtaaaattaggagattgcctctggtggcaactaagagcatgtatgttcttgggcatgggtttgagaggattcagcaagtgacaggatgacagccaggcagccgtacgcagggcggactggaatgggaagctatcccgcacggagaggtggacagaatttgaatcatagtactatcattggaaatgagggggcactgagaaatggagaagactttcggaggaagaaacgacagtatttagtgacaaatataaaggaaggagtcagcaaacattttctgtaaaggaccaaatagtaaacattttgagttttgcgggctggtctccagttgatttttgtcactattcggctctgccatggtagtgtgaaagcaaccagagaaatacatccatgcatgcgtgtggctgtgtttgccccaagggccacaccatagtttgccaatccctgatagaagggatgaaaaaacattttcaaccttagagaatagacgtagacattaggtaaaagctgttaaccttgtagccaagatttcatttcacccaatcagaattgctgagaacactgtcttcctgagatactaaacttccagctttgcccaggttctcctgcccagcattccttggcgtggagctcgagggtgacactgggtttgcgtatgcagataagagaaagggaacaagttacaaggtttgattaaagcagcggcccctccgtctggtgaatggctcctagtttacaccacgtagctgatgaaaatgtcacaaagaaatctcgtgagcacactggggaagtgagttgttcctggtaggacacagttggtcctggtttttacaattccagtgcagctcggcagacaaggggcagactcgatgggcatagtgcaggaaaatgggttcttaagggtaaggcgagaggtcccagctacttgtgagtggcttacttttccaaggagtcgataatgatggagaaaaggatgtccagagggtggtccatctagcttggcgccagagcgggagagctgtggaagctcagcaggaaagactgagcgtggggactgtggtctctgcagaaagtgggtggtttctttatggggatacctgctggagtgtgctggtttttaaaaaacaggttactgggaagagcattatccacaacacaacatctatatataccaacacatagcatatgcacactcctctacatgtttatatatacacatcgtttctggtttattttcctcttactcaaaatacattatgtcgcccaattttgttttctcatttaatgtggagctctttatggtggtgttaactgtaattttagctctacattttgtgaggcccgccagtgttgggctggggattaaggagagtrtcatctggatagatggcaagaaggcagcaccgctagatttttataggacaaccaaaggctggggtttggaggggttttttgtttgtttgtttggttggttggttggtttttgctcccttttctatttaaacaaagattttgcctcatttcaaatttttttttagttcagtgattctgtggatatctgcagagtgaaacgttacattatttttcctcaggggtggcagatgagttagtcgaccccttagggaagactctgcctgggtcgaccccttaggggagatgctgcctggtcccttcgccctctccctgcagggtgccatcctggcctgcctccttccaggcaaccccaacagaactgcggagctgaagcagcctctccccttcagacctcagagagcatttgtctgaccgtgagttccgccgcagcctggcctgtctttcgccctagttagtctttaagctcctgaatgcccgccgcacgcccagggctttgcacacggtgggcacacggtgccttttgagcgcgggagagggttgtgagctgtttgtgtgcggagcctgtgtctcactcatctttgcagcccctggacctgctagagagctagcacactcaccagcgctggccgcgtgagaagcgagtacgtgagtgctgacacagtgatgagcttgaccccatatgtagtagaacgggttcccagccttgtktctgagccccacccacccccctcttgtcctcttgtccttttggggattcactgtcagaggagatgacctcaggaagttaatgagccaatgagagatgagctggtatttattaatggcaggccgatgcctaggagtgcctgtctgtgctgggctttaccggtatgcagagatgcagccccccagtgggcttgatgtgagatctcctcctctccctccctcagcagggcttgcggggatcctgaggatcagagcctgagttgtctcccatgcttgagctcagaggggactgagcttcccttctctctcaagacacaggagggagaaggagaggccagatggcacaagtgtcccacactttcaccccagattggtycaacgtttagtcaaaccagcacatgaatggtagagggacagaagtaagaacaagaaagaatgatagrtgccaagatgaagattttgtacatgagaaggtatttaagggatcttgcaattttcctgcaggagaaaaagagaaaatgaggagaaggaaagcatttgtgctgtaagaactaacctataaattatacttaaataacttcctcaataagcataaatcatgcagttacataaaatcatattgatttcattatgttcrtattaatacattttaatttttaggtgcacatgcctgaaggcacaaggctcttaaacacataataatcaaaaagctaattaatcacaaatgggcaagtttcccaaataattccaggaataggtacaattaagaaataataccctgcgcacaaagtagaataaaaacacacaagcagacaagaaacttcattacaagccataaaaaccaaagagaaaaacagaagagtctcatttcctaagccaggtaatgcctaagccaggtaatgtattaggagggctattggaggaaaagggtcatttcgtagacctgtggccctaaccatgccttttctctgttttcctcattaaactggtgaatcttgactcatgcctctgttatattaatgatttcttctagctttgagggatctagaagtctcataagcaccccttttatttctctgagtggctgctgagaaccctaaatagaacagggacaggttcaggagtctgttagaggatacaagaaacctctttccatgtgtacacattcattaatcagaacttttcacatataaaggttcaacaagtttcagatccatctaaataaacagttgagtcctcttttctcttttgtgagtatattctagggacttcagccaagtgctttgctataatcagaatatgctttatttatggcattttttggcttacccgcccagtaaatgcaaccacaagagatgataagaatgggatgttagtcagcactcttttagttccaagagtcagaaacccaactaaagcaaaaaaaggaaattcaattgctcacataataggaggcccggggggtgggcttgcttctgattcagctgaattcaggccacacagctaattagagggagagccagttctggaattgacttcaggtcctccgactcccagggcaatgctctttccattacctggtgctacctctatgctacctcaatcaatagcagccaaattaaaaacaaaatgaaacaagaagggcatgtcttctccttggggtcactaataatttattctgattttacctctcaagacttgcattgttcatgttcctgaaggaaattagcaaaggcttttgggtgtctttatgaaggagaaatcattgctttctacctacttgtattccactttgtgtcctaagctaaggtagatggtttgcccgtcaattatttgtccatccatttagtctgaaaacattactcagcatttcctaggttacagatgctgtgccaggcacccgagattcaaatgtgataaagacattgataatttggtgacaaaggacaattcaagcagaaggcctagtaaatgtaaaaacacaaacactttcatgcattcattcttttcagcaaaaaatatgtattaagcacaaagtaggtgacaggaactgtgtgtgctaggtgtcattagtaggcataaaaaaaggagaacataggttggggactgcaaatagttcattatggcagaagcacaggtctcacatgggagaatatgggagtgagggaaaaatgtagactgatgtccagtcatcagacacactggggaccctggataggtttgacgcaagaaagtgtccttgtctgattttcatcctagacactccaattgcagatgcgtgggttgggttggagaggggtggatggcaggctggaaaacctgatggaggctatgggaatatttcctaggggagagggtggacrctatgaggtggcggtggttgggatggagagaaactaggttcacgaaggaatccagaggtcaaaatcagcaagtcctagtgactcatctcatgtgacaggtgagggagggaatggagttcagatagtcaggaaccttgtgaacagcgaggtcattacctgagactggaactctggggaaaggagctgagccgtgtttgtgttgtatccacgttaacttgagcagtgcctgacatgtaggagggactcagtcaatgtttttgagtgaatacctgaatattacaaaaaggaccataccagaaagtactgacaggggaagttatcctaattcagaaggccatgggaggccacctgaagaagtgatatttagccgaaggtctagaatgatttggaggcaatcagggaaaatagagaagtttgcactctttgtgttcgagtctcaaatgccatccagggcgcctgtgtcttttcgttctggctgctgcctctacctttttctactcctggcattgccttgtggccttctgttcctgagcctcttctgtgtgtgcagggaggcagcaggttgtccagggtgataagaatggtaacgtcatagtaactactgtttattaagcgtttagtttcctgatctcattcagcagccctcagtcacagaaaatgaatgctgagttctcagagtttattgctgtctaagtgggcacgtaggccctagtcagggccctgccaggttcccagggtggggaaggctttctgtaccattacagatcacaagagttcaagaaaaaatgactttatgaggtatctttaggttatctaaaaaaaaaaaatttaacaactattgatccagccaaatgcactgttgtatctcttcattggggatttgtgttctcccatggtatacaggaggtttgaggatacttaaggagagtatacaatgcagtaaagtagggaaaaaatagaaaattaacataaaaatctggacatatatatatatatatatatgataaagtgaatctaggaatgtgccagatgtgttgtagtttaaagaaatattgtgtgtattacagattcacaaatatgcagccaaacccttaaatgaagcataagtaatctgccagccacctagttaaagcaagttttgtgaattataatgaaattctctccaagtacacatttctaatggaaggaaatttactttagaggaacattaaaaagacaaaattcttgatcgtctcagaaatgtgggtagccttgtcttgcatagtcattctgtaatagtaattgggacttgcctaattgcatttattatttagagaggcttggctgcatttaaaagtctaaacattcatgaaaatctgttctaaatgtctaaaagtttttcagtatgaatttaaagttgggacattctggccttagggaattcaccccacaattggctgaactatttttgttgaaacacaaagtaatcatggtttcagtttgtaaattagctattgctgtgagctgctgtacctggtgaagagaattttctctgaaattgacaactctctttccaaatgttccactacagtcttatactgacatcccttgacatccctatgggtacagtcatgagattcaaattgtacattcttaatcttcccccaaaatgacatctgtggctttttttttttttaagagatggagtctcactgtgttgcctaggctggagtgcagtggcatgaacatggctcaactgcagcctcaacctcctgggctcaagtgatcatcttgtctcagcctcccaagaagctgggagtacaggtgcatgccatgcctggctaaatgttttttgttttttgttttttttttcaagagatgggrtcttactgttgcccagactggtcttgaattcctggtctcaagtggtcctcctggttcagcctcctgagtaactgggattacacggacaagccttcaagcgaaactccatctgtggcttttaattaaagatggacgtattgtaatctatgtggccatagggaaataatagcaaatagtaaaattgaaagaggtacatctgacagtaataataaaaacttttttgtaattctggaaataatgtgacaccgcactgctactcagagataacaaatgaagcttaattgaagttccatgaaactcttgccaataggaatttctcatggtgtatgattaccatgtggaacgaaaactctaggtcctagactcagacaatgactatgatatagtcatttcatggggatattgccattttagaaaaagtagtgcttgaaacctgattcagcgtttttttatttttatttttatttttattttttgagacagagtctccctctgtcacccaggctggagtgcagtgatgtgatctcagctcactacaacctccatctcctgggttcaagcatttcttgtgcctcagcttcccaagtagttgggattatagatgtgcaccagcacgcccaactaatttttgtatttttagtagagagggggttttgccatgttggccaggctggtcttgaactcctggcttcaagtgatctgcctgccttggcctcccaaagtgctgggattataggtgtgagtcactgtgcccagcccagcatttgattttgactgtgtgttttagacattgataattttataggactttaatcaggttttatacctgatacgtcttaaatttaatgtataatttagcatatcattttaaaacaaaaatagaaaaatattttaagtgggtttacgtttagtaatttatatcatattaattacatttgttacagtactcaacttcaagatgcacagccctatgtgtgtaatttagtttgctgtgttagggtaattaagcatgagctgctgcaacagaaaaaacatctcaaaacctcaatcacttagcacaacgaggttatgtcttgttcttgcaaatgctccgagtctgcagtggttgacccctccatgtggtaactcagcataagcagccagggcccttccagactgtggcagtgccagcccaatagtagttctggggtcagggaacagaagcatggaatcgtcacaccagctcttgaatgtctctgcccagaagggacacgtttcactttcacacatactttattggctagaatgagtcacgtagccccattagactatagaggggccagaaagtgtagcacaaggaatattcgtgtaacagtatgttctctsccgtgtcatcttggaagtaattgacagcagtagtaacagcaacaacaaccaaaagggtttgcaatagtataggttctctctaatttgtaaatggattttaattatacattttgtttgattaatgtgcatagttgacacagccacagaagcggagtgctgtaacgaaagctatagggacctaggaacctgggcacctttctgattacggtgctattctgtgttagctaatttttccaatttgtgtttgtcacttaaactcttccacctattttgtactcatttgcaaaataactagatcatgcctaagatcccttataactccaaagttttaaaatttctttattcaactcaagctctgaccataggtatcatgttataaggaggctctatattgaaagagaacctataaaagagctgtgtatctttgcaatataactttgcattttttaattaaccaaggatataatatgtttactcaggaacccccccaatttaagttttcaattccagcttcagtggtgtgcatgctactctgaatcttgtgaattcagtgaagacgtatctgtccactgctatgtataagcattttgcaagatgcttggggtataaaaatgagtagatctggtaggatgttgttctggagaaactagtcttctagcctgagagacaaaagtttagatagatgcattcattgtgccctgggaggtactgtggtggtatggaatatgagcatggaaggaagaagagtgtctgcgtttcgcacagtttgggagatgggaagggctgtctgagctgaatttcaaagaatgatatgagtaagtttggaaaaaagaacaaaggtgtaaaaaagcacagtctatgaggaagaacatcaagcattttattagtgctagagctacgttgtccatagccactggccacatgtggctagtgaacacttgaaatatggcttgttccaacagatatgtgctttaagtataaatatacactgaggtcaaggcatggtggctcattgcctgtaattccagcactttgggaggccgaggcaggcagatccacttgagttcaggagtttgaaaccagcctggccaatatggagaagccctgtctctactaaaaatacaaaaattagccttgtgtggtggcacacgcttgtaatcccagctaccgggaggctgaggcaggagaatcgcttgaacctgggaggtggaggttgcagggagccaagatcacaccactccactccagcctgggagacaagagtgagactcagtctcaaaaaaaaaaaaagtatagacatatatatacacacacatacacacatactgggtttcaaagacttagttcaaaaaaaggaatgtaaaatatctcataattttccaaattaaatacatggtgaaatgagtattttagatatataatattaggtaaaatgaaatatattaataaaatcaactttgcctgtttcttttcactttttaaatgtagctagaacatttaaaaaatttcctattcaagttacactctagcatagtccagcccaatagaaatataatgtaagtccccgccttggcctgggctgtgctagaacataactcatacaggaagatgtggtaggagttgacggttcagagagtggcagaaattagggcatggaaagtcttgggtgctgttctctaagcagattcagaataaggtgtttaaactggtgaattttaaatatgagagtcatgaggtcatgtttgcattttacttagctctaggctgtgtgggtgatggtgcaccaggctcyacagcagaggctggggtactggttggaaggctgttgttgctgcatccagggagaaaatatgaggggttgcataagggcagtggctataactgtggtgatcaggatttggagtttggagcaagtagtcaaacgtgactcttggattcctgttttgggtgacaggtgggcasttgtgtcacaaaactgagattttgaatttcagagaagtagactatgtattgggaagaataaagagagagttccattttggaaatgttgatataacttggatgtagcatattcaaaagaagttactgtagatgaatgaagttttggaaggatgtcagagctagagaaatatgtctggaagtgatcaggtggtggctaaaacagtgaaattctatgagaatatagagtgagaagtataggaagcagaaatagttgctggaagaacattgacttttaagaaaggaccagaggaaaatatatgaatatatatgactgtgagtgatcacatatatttaaaaacccatcattgattccatcaagggtcactaatttttattataattaatgttgaaagtatagtgtttctattattagtaatgtgagtgttggcatcatgcaagaaatacatttttttcataattacttcataattttaaataattatataacatttgtaactaataattcctaatgaaattgatttctgcttttgttaatattagcagcaaaactaattccttatgaaatctaagaatttctgaggcaaacagaagctttgtagtggttacagtagcagcacttgcaattttgttgaatgtttagaagattttcaaattagtgtgaactgatgtaatacttgaggttttaaggagccattttgcacaaaataggtgataattttgtggtaaaattttacctctaaaatattgatataatacttgatatggtgtataacatacagaattctagatagaatgcaaaattgtggttggaaaattttcccaaaagctctgaaaggatggtgaccaggctctaaccctgagtatatgagctgtggtttgtctgtgcaaacccaaaggaagggtgttgtttcccatgtcagaacagaaacttgctgtaagatagattggctttagaaggcagctttggcatcagaggctaggggctcttgtcaatgtcagtgaaaataatttaatagaatggtgtgatagaagccagatcacagctatatttagttgcattgaggagtaaatgagagttgaggaagtggaaaccatgaatgtagattactctttcaagaagcttgtccagaaaccaagaagtaaaagtatgctagaaggggtaccagtcaaggggggtttttttgtgataggagggttttaaacatgttgattggttgaagaaagaggtcatgattttagacagactgctgagtgaggattgagttagaacaaaaataaggctattaatttctgtactcccaacaaggccaacgaagaagatgtatctaataaaagagcagttctgtattccaagtatccattttcttaaactacactcttaaaggcagtatgactctgagtccagtcccctgtgcgattaaaataataataataaaataaaacaagtatctccttatgtcatcaaatttatttgtctggttgtagataccatcatgatgttggttccattgtgcctcactggatggcttgcggtgtgatcttaataacaagctatattgagaaagtggttgatgaatctattcgtaatattattatgttgctttgaatagccaaattagaagagagaattcaagctcagaagttttagcagtgacctttgatgacttccttaaaattcgactttgcttcatgtcaaatagactggggtctccctgctgaacagttctgaccagttccccacaatgctgtgctcttagcactttttcaggggaggtggacaatagtaccctctcttggcctggaactaaggaggaacctgccgcaccctagggtgagcaaaacctgaggatcataagtttagttcaaagattgagtttgaactgaatttgggttcatgtggggttgatttttttaaatttaataatgttattatttctaggttcctgaggcccccatgtgggcatttaaaaagaggctgtaattacacctggtgacgagataatcacaacttcccactggagtctcactcttgctgggaatagccacatgtagttcagagctgtccagttaggaaagtgcttgtgtcttgctttcttagacttgcatagttatttctttatatttggcagtgtgtgaacaamgtgacctgtcctgttacaggasatactctaaaaattcttattaagaaaaacttcaaacattgcacaaaatatagagaataatataagaaataccctgttcacatcaccagcttaagaaagaagacattatagatacaaatgaagcctgttgtctaccctccttcctctgtcatcagcgcatggaagtcttgtttgactacctttttgccaatgtttttcattgtcaaactgacacatttgccaatctgatgagtgaaaaatgatgaagccatatttttcaaattatccttggagttcctgagaaaaataacacatgaaggacacattctcaaagaaatatagccccaaaaggaagtaaaatattgattaaaaatcatgataaattcattaaaattgaaaatcagagaatattgacatgtatgtgtgttagtgaatcagaatatttttaatgtcctgttggatttcaattggttgctgaaatgatggatttggatgctacccccaaaagaatcagggtaggcttcttttgacaggtgttgtttaacaacaagagtgatagtcttgttcctgcctctttcctgataaaatcgcactacagatgagctctggttcttagaagcttttttgcacacttgtaggagttcttagaaatccttcgtttcccttttaaattattttttttatttatattttgtttctcttttttaactttcaaagaacacatttctgaaagaattgaatcctagggccttgaagaagatcctgatgatttcttttgaggttttatgtaagatttaggttttggtgctgccaggcagtgggaaattctgtactgacatttgataacattcagtattcagaataccagttggcagttgacactcaaattgagaagctgtgttcaatatatgatatttgtctttttctactaagaaaaaaaaaaaaaaagatgaggatagcccctaaagctgctggactgtgaatgtataaagggaaaggcaggggctctttatttcctgttgtgtccccatacgggtgcagtgttgatgcgtacatagatagcactcactaaatagctgtcagatgaatgcacaccagagttacctctgttttcttcctgtaatagaaagccactgcttgaacaaagaattataaagccgggaaagctcttctggccaagacccaagactctagctatgcaggaaactaactaaaatttggatacaggcaagactgtatatgattgtcagtcttaattatagggacttgcagaactcatggtgatacgacctccctgggtaacctgtttcagtgtgtaggtcctcagacattcaaggattttcttttttcatgttttaaccagtcttgcttattgaacctttgcactgttgaagaacattatcttctttataactgtttataagtggtcgagtctctgcaaagctcctcctctagagcttaagtgaaaagtatataattagtgagcaaaattatttttataggacaaggataaaatgtcattgaccttaagagtttggtcccattcagaggttatgtaactctttggtgactccagattcctcttgtgtaccagaatgttagggctgattaatagtcaggatagtctaggccgcttctgtgctaacagataaaccccttgaaatttaagtgacttaattcattgacactttatttctcagtcagagagagaccagtgtggagtccaccatgcacagtcataagctctggagcatatgaccaccaaggccctcacagcaagggaagggagagctgcagggtctcccaagcccagacctggaaggggctcacagtctgtctatctgtctgcttagatgccactagcaagaggaaggtcatgtggccccagtctgtctgcaagggggttaggccatgcagcttcctctgtgaccagggagaggagaatgtggttttcatacagcatcttctctcatgtaggtcattcttactggcccagatgtgacttgacaaagtttgttgatgaaagggacagcctgcatcattgttccacagatgaactataccaatttggtttgccccattagcacattttgttatagaagtttcatgtgctcggaccagcggaagtatgtttttggctttgccaaccaatatcttatttttatccatcgctattccaatgtccttttaagttcctcctccatctgttttctttcttatattccgtagccatggctaaaagatgcattggatttgcttgggaagagtggccattttcttgactaactggatgaattttctggcaagatttaacattggaaagaaaggaataaaaatagagaaattggacctatttaacccacatttatctctttcatttttctttcttcattatttctacttagtttaacatgatgtgctactctaatttgagccaggaataaagtatttacatatttcaagtatttgttagctagaggcataaggagacaaggccagatatgggatcgaaygaaatagaaaggagaagagaactgagtacagacatttgggatgaagggaggagagaaggaaggttgaagtaaaacatagtgataagcattgcattcaatgagctggactcagcggaagtaaacttctagaatagttttattttttacatcccactgccttcacagagttctgccagagtcttcctcattcagagtgaaatttcaagggatcttgtaactttcctcgtcattttcatgaccagtccagtctaatggcaaagcttccgtcttccgtctaatttaaagcttctttccctccttcagctcagaacacctgcacgggcatagaagcttgaggtatggtggtggtgagctgggaagggtcaggtagggagaagagaagtagggcaaggacaacagagggcttttttgactggtagagttggaatccaccagcatgggtgtgaccagtatayatatgctatcttttttttttttttttctcatgggagtgctttggtggatttcttggagattccccattagtgactttggattggaagcccgggcatgggcgatgtcatatctggctggtggttgggtccccgctcagggtctctgtattcagtggtatgcctgtgggctctttctgctgcggtcggctcagccgctgcatcagaccttatgcatagggcacttttcatggaggctcacagacagctgckgcgtgcttgggtgccaatctaggctacagcaaactcacaatttttctactgttacctagcacactttctgtgtgtgcctgtgtgtgtgttttctcagctgcactgctatagccttttccattttgtctttaccctttagggtttgtcaggtatggatgatggttagtctctaggtccctcaaatccaaggagacacatgcaaagttctccacgtggcttcccaaatccccctacttctttgatgggagagccactgtttcttttccctaggagtgagggaaaggcaattatctaatgataattcttcaaaggggtcatgtttccaagaacatgatgaattcttagtttttaccaatayagcataaaggagagtgatgagaagactggtctcactgtttcacagtctgcccagcctctattctttttagcctttggaacctctactgacaatagataatgaatgtaccacttgacattctactcctattcacatctttagagatarcagtgttacctatgggaaggaaatattaaggcgagcaatccataagacactaaaagtagtgagacccataggagagagggaacttggaagaggatgtgtgctgggtttcaaggatgaagggcatatgtgggaaagaggaactgtgagggcactgagtgcctgactacagagtgagctggtcatgtagaggcccttggtttcctgggcagaggaagctacagggaatcctagaatccctaagcagaataaaagctactgtgtgaacatgagaggatttagagaagatgtattaacgtaggatatgagtgatttgttcacagtgaagattcataagacaaatcccaagttaaaagcagagcatgttcattgctacttgacgtgttggcatctacacagagctgtctgatgataatacttrcaagtacctttgtaatccttcctttgcaccaggtcctcttctgagccctttccctgtaataactgatttaggccttacagtagctctaggaggtaagtactgccaattattcttgctttacacatggcgaagttgaatcagagagagattcaataacttgtccaagatcaccagccagtaaatggtgtagccaggattagtctggctgcagggtctgtgctcttaactcgtctactctttcgataggtgaatagtgtgtgattaagctaactgtatggctatgcttataggacaggaagaggctgcagcttagctagagcccagttttcctctgagaaggaaagcaaaccctggtgactctacagtagctttttgtcactggcctgagaccactgtgttctactttctactaaagagctggcattgcttcttggggaagctctgagcagggaatggccaataaataggcctctgtagaatgcaaaagggtggtgttccttctttcctcgggcactcgctttcctctgaaattcctggaaaagaaatggctgccgacgtacagcctctgcttcccatctctgcctggcttctgcattcttcccagcaagcagagctccccccataaaaaaactgttattttctatgttgatagaaagaaatccatttggtgtatttttaatattattagtgacttattgttatggttagattattattccatccctggctttcctgctgtgggaaatcagtagctggcattttgtagcattgccgactgttgcatatttcataacacagtgaatgaagagtgccccttcaggactgtgttgcgacatgattcatgcatttccaggttttattgtaagtagttgcacacagctgagaggctcaggccctggagaattccagcgtggcattgaccacatgcctctaatcaacctctgattaccgtagcttcataagggatgtgccctccagtagcaaacactttgttagagttaagtcttataaagaaaactgtgtgagtgtcaatgaggggaacagaaactagtagattaagatttaaaaataaggaggaaaaagcagttcaaagagcttgcctaggttttagttacttgcccttaagatacttgggaatagattggatcaagatgtttaactttctctcagaaattttgtgtattgataattaacttggcttcagccaaggagttatagaggccactgaattttgtgtttgggcaaatattaaaagatgccttttctgttggtgtagatagttggtaaaatagatgctctaacaggaagactacaaatgtgcaactcaataaattttacgctactgaagcaaactgagggagaaaacagacgtctttacaaggtaaccctattgatttgttttctttttggaaaggttgaagaatatttctgcagcagtgaaactactcaattagtatctatccaataagattcaatgataatattatccagtgtttcctgtattgatacgtgagattggtgctccagagccacagctgaagcacaaaagttagaagttagagatgggagtttctctcaaattcctctcagcgctcaagtggaaggaaagagttgtctctcagttgcttttcctttgggagtgagatgcagtttgattttctagtttgtttttaaatgtcatcttttaattatrttttggataatgatgaagagagatgcaatttggttatgagaataaatcttaaaaggctcaatgactcctttatctactgcttaaaacaactccctctagtaaaaagtatttcattaattgtcattacttgggaattatggaattagagcagctgacatcccttttatcattcatatatttaagtgacagtggcattacttactctaaattaagttcctttcctggttaaaaaattataacagtgtgacaagaaatagagcactattaacttttattttggaaagcaatttttctagtggagatatgaaagccactattatgcctggtttcttttttcttttttctttctttccttttttgttttttgagatggagtttcgctcttgttgcccagtggagtgaaatggcaggatctcggatcactgcaacctccacctcctaggttcaagcaattatctcacctcagtctcccgagtaactgggattacaggtgcccacccctacacccagttaatttttgtgtatttagtagagacaggatttcaccatattggccaggctggtctcaaactcctgacctcagatgatccgcccgcctcagcctcccaaagtgctgggattacaggtgtgagccgccacgtctggcctatgcctggtttcttaacagaaagaaacagataagtatatgtaccataatacttcaagaatttcatcaaggggtgaaagtgtttaaaaggtttatcagtgggttttcgtattctccacactcaggaaggaatcagtcttcttaatgtatacagtattatatagatatacataaaagttattcaactgctatatccactgtttttttctttctgtcaactcttcggttatattctcaccagtcagcaatgtgctgggccagtgcttctcccaagctggaactgaccctgtaagtctattttgtgagtggaatcacagcaataaagtctcatggcatttgtcagagggactgcgttgaccctgccgtccaacggcatatctcctacagtcatagtgtctccataattttggctcagaggatttattcaatttcctttcccttctgctctattctttccgaaagacttatttttactgtagtgaactcactaaactctagttagctttctacttgtggcctagttttgataactcttgttaataaggaatttaataatacagttgaagtaaatgaaaatatttcccaacactcacaactctgtacaatgtttcaacagtgtttcctcaaactcctcttatggatatgactcacattataaaaactgatatatgaagaatscacattaagttgaaagtgattatttgaataatgatcattttaatgcacttaaaatatcactcagatttttaaagtcttgcctataaatttgggggaatatattgttccctgaagctctgtatgcaattcaattcaagcaactaaaaacaaaccacaacaaacaatcaaacaaaaacaacttctatctgaaaaatggaaattgttcaagactggtaaactgttaggaaatgtatcttttgctgaatgaaaactgtttgttgcaatgatctgcttaacaatacttaattctgagttccaggaacttagattgaaatttgagggaaaaggatgaaagacataatgctgtactgggggctagtcaaagggagatgtaggaggtggtatgtgagtccttggtagatcatatgcaagtcagtatatttagcctttaactattaataaatgctaagcaaggcataactattccctttacgttttcaaaaggttctgcaataccctatcccaatttggtcaattcatcttcatttcacatttctatcttcgtatgtttgtgtttacttttccttcttgttggaagatctttaccttttttaaaatttgtatttaaaaaaaaaagagatggaggtttcactctgttgccaaggttggatttgaactcctgggctcaagtaatcctccccctttagcctcctgagtagctgggactacaggtacatatatgtcattgtgcctagttcaccttgaaaacccctacatgtcatttaagaccatacttgactgacttttccaaaacatccatgttcaggatgtttaaagtgacctcttcttcttctgtcaccccatagaacctaatttctaacactcatggcactgatttgcatatgtatttataggtctttctctctctgctttcaaagtaaacatcccttgaaagcttgaactatggagttacgcatacctgggttcacatcccagatcgagcacttgcttgctgttggttgactgactcagtggcagtcctagcaccacttgtccttacatacatccactccagagtttggaaaagccaggcacttatgctcttcacatcctttaaatctaagggtggtcaagcaaaccagtttggagcaatgaaatgtaagacagttggggacccttgggaaagcttgtgtttccctataaaagcaacaggtatgtaagtcatgcacactggaactgttcctgctttcctcctgactgatacgtggtgactggagatcgaccagccattttgtagttatgaaattaccataataataatggaagctgacctgctaaggatgttggagcagaaagataaaaagagcaagggtcttcagtggcatcctcttgctcctgtaccaaatctggaaatgcctatcttcagaatcctttttatggaaattaaatgtctcttatttagatcacttttaatagagttttctattgcttgcagccaaaattatttctagatagctgtataatctaggacaaattaaactctctaaactttagttttcttatctataaaatggagctagtgatagtgacctaacagagttgatgtggtaattaatgaggtcatattttctgactcgtgatgagcaagtcaatgtttctttctccttcctttatatggtattgtttgccagaaagcatctatcacattttttgtacaaaaacaagtcacagtaacttttttttcttttttgagacagagtctcactctgtcgcctggctgcagtgcagtggcacaatctcggcgcactgcaacctccgcctcctgggttcaatcgattctcctacctcagcctcccgagtagctggggctacaggcgcctgccaccacacccagctaatttttgtatttttagtagagacggggttttaccatgttggccaggatggtctcaatctcttgacctcgtgatccacctgcctcagcctctcaaagtgctgggattacaggtgtcagccgctgtgcccagcctaagtcrcagtaattatcatttgaatgagtaaatgaatattagagtaaagcagctgaacagactttgcaagataagccactctaatggcttctcacagcctttttaatggctgagtagacagtctttctctgcctcttgaatctgacttggctctgttacttgctttggcccatcaggggagtagcaaacatgatgaaaacagatgcatgaaaggtgattgcaccctggggcttgctctcttgatgcaattagaaccctgcaaccaccacataaataagcccaagctagctggttggatgatgtaagagaaccaaactgccccagccagcaggcagccaacaccagacatgtgagttcyggcaggccacatatgcatgagtaaacccagctgagagctgaagaactttccacctaagtccaaagggccagccaactttgagctaagtgaatagttgttgttttaaaccactaagttttggggtggttggttttacagcaaaaaataaatgatctagaggagctctgaagtgaataagtaagcatcggggtctccagatgtgtcacctggagaaggacatcatagcacttttgtagtgttacagctggggtccagaacctgaatccaatcatgaagaaatatcaggtaacctcacattgaggaacatttctataaaacaagcggccaggattctccaaaatgtcaatgtcttataagataaaggaaagctagggaatggtcctagattaataaagactaaagagacatgatatgtaagtacaatatgtgatcctcaactggatccttaatgggagggaaaaaatgctacaaggacatgattggcaaaaatgtcaaaatttgaatatggattgcagataaggtggggttattgcatccatgtgaaatatcctgaatttgataactgtactatggatatataagagaatatctttgttcttgggaagtatacacagaagtattcagtggtaaaggagcatgatgtatgtaacctactctcagatgacttaaattattgtaatatttaaaaatatatttatatatttatatttataaatataaaatatatataacaataacaatatctatatagctatatatttgtattaatatcaaatatataactatatatttatatataaatatttcatatattgtataatatagaactatatattgacaaatatatcaatatataaatggagatatatttataaatatatcaatagatatatatttatacttatatatcaatggatatatagttacaatctatgtataactatataatgtataaatatataattaaatatataatttatacatagattataaatattaataaatgtcaatataaatacagggctgctgatctccagctttttgstcctggtcacatgttagctactgcagctccaggcattatattcttgagtgatagcatctgatgtgggaagaaagaaggaagtagttcagaagggcctttttttctgaaaagaaactcttgcctatgagcatcctagcagattttcacgtatatcttatattttatatcactcacatctcattggccatgctctcccctcagccagtcactggaaaatggtggggagtgggagtcaagcccctgcagggggtggtgcatcactgtccaaactgcagagaaagagggaccaacactttctacacattccatgtaaggaggattctcactgcgcaggaccgttgggaattgcttcatgcactgctcattagcacgtgcttcagacactgcagttttctttattaaactycagagaaccaaaatctaggactcaggaaggaaaggggatggtccaaagtgagtttttttgagatggttgtgaaagttttttgcagtaagttgattagaatgccatccagctcagaccgtattaaagaacactgcttgtaagacccagagactctcatccacagtctgctctgtaccatgaaaagctttcttttaaaagagaggtctgcctttggattaggtgaagcactttttgacagagtgtttggggccaaggatatatacagctggagaaatgtttcaggcaggagattgatctttgggcagagcttggaaagtcaatcatccggtggcgagtctccgaggaagcagttcaagtatygtgactggaaagcaggggatgaaggactacatgcatggttggaagagaagaaatcggaatttacctagctgtgctgacctttctaggcctgcttctggatgtgcagtgtctcaacaggatactgcagtgcttttattcctgcatgtccatcattgtaactaacaatcaagggacgtggatgccttcattcaataccactgctaactactagacccatcagttcactcagtaggtttgtgtgtatattacagtcaaatctagcgtgaaagtcattttggaacgataaaacccaacattcagaagagaaatctactgttatgtgagcacctacctacacaaaccattttactggctttcgtggaataattatagtcaaccaggaaatcarcaatgacaacatagaaagcacacagatgtcagtagcacttcctgatgttttgaaataccttgaacatagccgtcctcagttaatgtttcagcatgaatctaggggaacatctactgggtgtaaacttaaagtcaaaacataaattcaagtcccaatgtttatgtgatcttgctcgaacactgtttatcttttcaacatagatgataccagtttgacatttcccataggaacattgtgaggataaaactcaagataatataggtgaagttctttgtcattggtgaagttctgtaatatatgaatgttggctgggcgcagtggctcacgcctgtaatcccagcactttgggaggccgaggcgggtggatcacarcgtcaggcgttccagaccagcctggccaacatagtgaaaccctgtctctaccaaaaatacaaaaaattagcagggtgtggtgatgggcacctgtaatcccagctactcgggaggctgaggcaggagaattgcttcaacctgggaggcagaggttgcagtgagccaagattgtgccattgcactccatcctgggcaacagtgtgagactctgtttcaaaagtagtagtagtaataataataataakaakaakaagaagaagaagaagaagaagaagaatgttaattgctaggttgttttagtgttccttgtagcagttgttttggaaacatgcgagttcattaaattgaagaattcctagaagtcaacccttttgacaaggaaggaaaaatatacttacaataatacaaaacttttttttttcaatatgtagtagttcaagcatttcacttgtctcttgtaacaaaacaacctatgaggagaaacctgaggatgcaggggctgtttgcatttccagagctcagtcattggggaggaaaataaaatagaaagacagaatgttgaagcagaagtggtgataagatcctgggcctcaggggacttgcgacgctgtgcctgctggtgccctgtatacagtagaactcagcgaatggtgaccaaggtaggggtcaatgaatagaatattcacttgtttctgttactttgtgtgttccaattctctcctttctgagatatcttttcagaaatggcacccccaatatcactactgttaaatatcactttataatatgatagataaaatctctcacagatacaaaattaaagaaagtcatcacttgtattgaaaacttaaagtatgaaattcttcggaatactatccatttaaattaagtaagtaaactaaaaagtgggaaaatcttgaaacctttcctaccatactattctgttgtttctttgcaaatatttactgagcacttgctatgtgccagtgttccagccactcgagatggatcagtgacgaaaaccagtgaagatgctgccctcatgcactgcaggctagcaggggagtctgaaggtcaacaataagtaaatgaaaaggctgtagcgtattagaagatattttctgaggaaaagagggcagagttgagggggtttgggagagtaggttgatggagaggtttacaattttcaagtggatggctgggagacctcactgagaaggggatgttgaaacagggacctgaaacagatggaagaccgttaccccggacatgactgccccaaaaggggtgtgacattgaatgtacctgtatgtctcaaggctttaaggggacccggtggcaagaggagagagagcagttggcagataccttttgttacgctgtgaaatgttaagcaaaattattctgcagtagtttgtatttccttaaggaagatttagaatagaaccttagttaactatttctaaactgagccaaatcatacactgttcagagctgggagggacttgagacaccctatcattgctgttcttcattttatgagagaaaaagctgaagtccattgaaatgattggtggtataatggctcaattagtgtatctcagtgttttcagagacagatgtggtgatgagaaaaaatatatgtatgttgttttcctttcagaaagtgacgaacacatgaaaactttcttcaaaattttaaatatctacatcctctgagattttatttttttgtgataaaatgttacataatataaaattagccagttaagccattttaagtgtacaattcagtggcattaataacatttacagtgttgtgcaaccatcaccactatctatctccaaaatattttcatcgcttccacgagaaactctgtacccattaagcattaactccccattccatgctccctccagtgcctagtaacctctaatctgcttactgttcaagatatttcacgtaagggaaagcttagatttttttttgcctggcttctttcacttagcctgttgtttttgaggttcatccatgctgtagcatgtatcagaacttcattcctttttagggctgaataatattccattgtgtgtaagtaacatattttgtttatccattcatctgttgacagacacttgagttgtttccaccttgggactattgtgaataatgctgttatgaacatcggtgtgcaagtgtctgagctcctttactcagttcttttagagatacacacacagaggcatatatacatatatagagacacacatatgtatacacacacatgcacgcacacacacgcacgcatacacacttgcacgcgcacacacacacacacagagactgagagagagaattgctgggtgatatggtcaaattcgtgtttaactttctgagaaactgccaaactgctttccacagcagccgcgctactttacattctcaacagcaatgcacagggtttcagtttctccacatccttctcaacactttttatgattattttcattattataaccaccctagtagatgtgaagtggtatctcattgtggtttgtatttatatttccctgatgactgataatgttgagtatcttttcatgagcttattggccatttgtctatctcctaaaattctgtcagtaacattttatagttttcaaggtacaaatattttgcctattgttccatttatttcgaagtactttatttttgatgcttttgtaaatgcaattgttttcttaatttccttttcagattgttcattgttagtgtatagaaatgtaaatatgtgcaacatttttatgtgtcgattttgtatcatgcaactttactgaatttgtctattagtttagacagctttttgtgtgtggattcttcagggctttctacatataaaattatgtcatctgcaaatagagataattttacttcttctttttcagttgggatgtcttttatttctttttcttgcctaatttctctggttacaacttttagtgctatactgactagtagcggtgactgtgagcatctttgtcttgttcccgatctaagtgaaatttatctaagtggaatgagtgaaaagttttcaactttcaccattgagtatgatgttggttgtgggtttttcacacattgtctttattttgttgagggcattcccttgtattcctggtttattgaatatttttatcatgaaagggtgttggactttgtcagatgcattcactgtatcaattgatatggttatgtgggttttatttcttttatcctattgttacagtatattacattgattgatttttatattttgagccattcttgcttgcactcctggggtaaatccatttgatcatggtatatgatccttttaatgtgctactaaatttggtttgctggtaatttcttgaggagtttacatctatgttcataagagatattggtatgtggctttcttgtagtgagcccctgtgaaactatctttactttaaacctctagttttaatttatctttttttttttttttttttgagayggagtctcactctgtcgcccaggctggagcacagtggcgcgatcttggctcactgcaagctccaccttccgggttcacaccattctcctgcctcagcctcccaagtagctgggactacaggctcccgccatgcctggctaattttttgtatttttagtagagatggagtttcactgtcgatctcctgacctcatgatctgcccacctcggcctcccaaagtgctgggaatacaggcgtgagccaccgtgcctggcctaatttatctctttaattttaatttatctctttggttttaattcatctttcttcattctcatgttataagttctgaaaaaataggagtgtctgctgggaatgtccttccttttttataagtaagtcaaaaataagctctgccacttattagtatggtgaagataaaaaagcagaaccctataaggaggtcaagaatgcagaatattaatatgttgatactctaatccctttacattctcattcatagccacaagtacaatgaaaatcaaaataaatattatatttcatctctgaaagattgatgtgtttggacctgaccaatgtagcctggtgwccatgtagcctggtgtaaattatgttctcaagtaaggattttactctgtctccaaaaggttaaataggtcactgattagaattatagataaaagagtacttgtctttscaggtttctcaggagagaatgagaaagatcttctcactgtagaagcttctttgaataggcacaagaagttacatctggcttcacttaaacaccacttgccttacaacttgttctaaatcttcagaaaggattagtctgaaaagctaattttgttggaagttgagagataatcatgtacatttcagacactgtttgaaacttaatttccccccacaattactcaccttctagcgttgactgatgaaagtataatggtataaaggtaccctttttttctgtggctcaggatcatcacacaccctgagctgaaggcatacaggctgcacttgccttgatacaacccaagtacactgctgcttgcatatagaccccagtttcatattccacacctggccattctcagctctttctccagttttgaagtgtacttttcctgcatgatgctgtacaggactaaggactctggggatagaggtttgagaagtatccctaccccttccccagtgccttccacagacagcacagacatcctgtgcctttgaagggatggcattgagcaataacatttatttttagtcttgccacagtgctctttgctccctctccaccccagaccctacacagagctgcgctcctgttggagatgtcccaggcctcctctcgagttggagatgtcccgggcctcctctcgagttggagatgtcccgggcctcctctcgagttggagatgtcccgggcctcctctcgagttggagatgtcccgggcttcctctcgagttggagatgtcccgggcttcctctcgagttggagatgtcccgggcttcctctcgagttggagatgcagacaagaggccacrtgcagaagcactgtgctttgggctttcctttgcaaatgcttccctctctgacgctgtagaggcagagcttgtagagccagctgctgcttagaagggtcrccctgtgggattagaatctttcaagttctaagataaattttgttactgtcctttcacactgataacttctcactgtcctcttttctattgccattctcctcctcctccactttctcctctcctttttttttaaagtttcccttctctggattcttctcttacatcttttgcttctgtgcataggctcgccctcttaggaagattttcaacaattataaatacaaaaaatgttcttgcatgggatgctcaatactgtacagactttcattagtcaaaatgcctaactgcttccaatcctgcatattctgtctaattgggaacattcctccacagtgagttctgtactctggtgactctagtttactggaactcactagttttggaatgaggcaaaaaaaaaaaaaaaaaatactgccttaaaaccctgtcagacctgggtacttggcaacaaattacagctgaggagtgccaaagacctgaaaattatacctaccttggttgacagtacctttaagtgtctatgtatttatgactcactttcttccataaagaatttgaagtgccttattaaagtacatacccgaggataaaataaatagttgagataatcagggcaaagaggaaatgcggataagaaaataaaactggagcaaaagtcacaaagagaaatgtaccctgaacagttgtgcagttgtagaggtggcctccaaggttgcctctaagctccgatggggccaaagtaaaaagtgaattttgaccgattatgtagcacatggcatccttaaaattaaaaaaatccagttgtcaagaaaaggaagccttttctgttcccaagatccgaagtcattttcttaaatctaagatcaatttatttcctgaagcctcctacagaaaactatatgatagagtggtcacgtccttcacaggagtcgccagtattgtcttactgatggaataggccaatgacacaatgcagrggtgcgattcagaagaaataaatcgaaagggaaccaaaacaaaatgttttaaaggtaaaatttgatgcaactcagcaaatggacaccgtatcctttcttgcaaccctccatgaaaattgattgtcacaggcaaactttttattaggatgattatgcgaatgaaaggttgtaggcagtggtaggcagctgaagtccagttgctctctgttccccatgagggtctggtccataagctttgacacacaggtggtgggattttatgtgcccgcgggaatgaccccctcagtcacctcagcactgggtcctctcaggtagagccagtctcctctctttagaagagggtgtccctactgacagccacatgggactgaggccctggagtcacgcatatccccagcacaaccatcagccttcctttcccccatcaacctttcagtgtggtcctgccaatcatccacttaggccagtgaacatttcttttttttttttgagacaggagtctygctctgtggcccagactggagtgcagtggcacgatctcggctcactgcaagctctgcctccctggttcacgccattctcctacctcagcctcccaagtagctgggactacaggtgcccgccaccatgcccacctaattttttttgtgtatatatatatatatatatatatatatatatatgtatatatttttttagtagagacggggtttcaccatgttagccaggatggtttcaatctcctgacctcgtgatctgcccgccttggcctcccaaagtgctaggattacaggtgtgagctaccgcactcggccaaccatttctacatttctaataaaccagctctagaacatctgacttttagcagtgtagctttgcagtgagccttctgagaaaagcaattggaagttgtatttgtgaaggtaactgtttttatcttttcagtgaattcttggatattagccaatgtgattaatgactttaattttaagactcattgatgttaagccattctgtatggcagtaatggaatggcaggagcaactatctcttgtggccatttcaaatgcgaaaaactgaattctcatcatcagcattactcccagtgtgcagcttacctcstcacacaggacagcccarcctcccctcgccgtgttctgcagatgtgatttccagctggcggtgctccctctgctccgtctcaccctgctccattcagaagacgtgccacatcagtctggaaaagcaagtcctcctttactctgagacatattacagtggagcctagactgccatcatcatggcaaccatggggctccctcttatgtgaagttcgttcgccctttacctgagccatgtttttcacctgtcccgcttggcagtgcatgcgtgggtccggcctcttcaggactgctgtgcttggcagctccctggctcagctgggaggaagatagcaaatgggaaatttctctgtttttccataactttatgataattcgattttggactcatacctttatttcttattgtttctgatatttctattttgacaaacataatagaatgtagatttaccttttagatggtatttattcccttcaatgctgttacttctgagcattttgtgatcatttccatttctcatctgtgaaactggtattcagtgtctagcaagcaatgaatgaagcatttagtgctttttttcttcttccgtacgcctttagcctcccaacccttaattgtgaacatcgtgtaaactttgcttttcagaacaccagcccttttttgcttttctctgagacatcattcattcgcactgtcgtgtcttcagctttgtgctgtgagagtgactcaaagaatccactgtgtgggaagcacatgttcttctcattagcacagatatatgtctaaaactcgtttatggagtagtcaatactgtgtatgacattgtgtagggactgttttctcagaactctcaggtttagatggggagagaaacttgtaaatgtgatagttgctaatagaaatatgtacagcgtgtttgtcacggggaaatgaaggtaaacttaatgcttcagggtcagaggaagaatctcacagtcagaatacttcaatgaagttttagaggaccatgacaggttactttaggagaggagcaagtgttaggaagatccgctatattatgacaaggacatatgatgtttagagaactgtggataatctgaggtggtgggcccagcaccaggtgtgaggggcctttggtgctgttgttaggggttatattttctttyccagtcataattctcagcttgcagtctgcagattcctagggggtctatggatcagcacttagaatatgtaagagtttgctatggaacgtcttaactttgtgggtttaaatatatatgtaagctatataggcatgttctatatcatttaaatcagtacacctcaaagtgtggtgctcagaatggtgctgatccacaaactatcagtttccagttcacaaggagataaccacagaggctgagagtaaccgttgagaaacttacagcaatttgacttggtactgccgtgtcattcaagtgtagtatgtttgaaatgccagtttgttgaagtagtattacacacaacagaattcatacttttaaaacatagctacatgagttttgaaggatatatacagtcatgtaaacaccccacaatcaagatagagaaaatttccatctcctggaaaagttctcttatgtcctaccaatctgttatctgtctctatagtttcgccttgtctagaatgtcatgagaattgaaytcatattgtagataatctttagtgactaatctctttttgttaaacataattcttttgagattcatgtattttgttctgtataggaataagttatttttattactaggtcatattctgctatcagaaaagggtcctgatccacaccccaagagagtgttcttggatctcgtgtgaaaaagaattccgggcaagtccgcagtgtaaagtgaaagcaagtttattaagaaagtaaagaaacaaaagaatggctactccatagacagagcagtggcaygggctgttccactgcataatacttagggttatctcttgattatatgctaaacaagaggtggattattcatgagttttccaggaaaggggcaggcaattcccagaagtgagggttcctcccccttttagagtatatrgggtagtttccagacattaccatggcatttgtaaactgtcattgtgctggtgggaatgtcttttagcatgctgatgcattaaaattagcatataaccagcaatgaggaggaccacaggccacttttgtcgccatcttggatttgrtgggttttggcctgcttctttaccatatcctgttttctcagcagggtttttgtgacctgtatcttgtgataccacccctgctgacctcctrtctcatcctgtgactcagaatgcctcacctcctgggaatgcagcccagcaggtctcatccttattttacccagctcctactcaaggtggagtcactctggttcagatgcctttgacaattctactatatggatataccacaatttctccattcactggttgatggacattttgggtgttttggggttgagctattctgaattaagctgcattggacttccagtgcacatgtttccatatcttaggtaaatacttaggaatggaattgctctgtcatatgctaagtgtctgtttaattcagggtttctctgtttcatgttttgggttggataattctttgtggtgggaaaccattccgtccattatgggatctttagcaacatctttggcctctacccactagatgtcaggatgctccccactcccagttttgatcaccaaaaatgtcttcagaccttaccaaatgtcccctggtggttaagatggcccccagttgagaaatattggtttattgtaaaaaactaccaaactgtttttgaaactaccaaagtggttttatcattcccacccaataatttacgagttctagtttcaatgtgtcatatcttaatttttattcatttaaatatattttctgatttcccttgtgatgacttctttggctcatgtgttacttagagaagtatgttgtttaatttcccaatatttgggagatttttcagatatttttctgttgatttctgatttatttgcatttggacatagaactttttttgtacaatttcaatccttttaaatatttgaaatgtattttgtgttccagaatatggtctgtggtggtggatgacccatgtacacttgaaaaaaatgtcaattatgttgttgttgagtggaatgtcatgtgcataattttatatgtgaccaaattatcagcctgtgatgtgctggaaatgtttaaaaagttctttgctaatgaccagtgcctctccatctgtctgtagcttatagcctgtgttcccatttgtcttgatgattgccttgatgccaagtgataaccgcaggtgctggtgtttcacttataatgaagccttttccctcctggactttgcacacctaatcctgaagctccatgaatgttctggttcagctagagcgaatggggatttgtgaaacaattataagggttttctgttgttggtggtggttttttttttttttttctcactctgtggaccaagctggagtgccatggcacaatttcagcttactgcaacctccacctcccaggttcaagcagttttcttgcctcagcctcccgagtagctgggattacaggcacacgccaccatgcctggctaaattttgtacttttggtagagacggggtttcactgttggccaggctggtcttgaactcctgacctygtgatctgccagccttgtcctcccaaagtgctgggattacaggcgtgagccaccgctcctggccaagttttttatgttttaggaaaacattaaatgcaaggtagaaatgagaacaaaatgtttcttgtggctcgttgagacgagtcctgcctgtatctccagaatccactcctcagccttcccgtgctgcatcccgtccctttgctactgaagaaactccttcagtctggaatttcctatcacttttctctacattttgaatctggattagttatgtttgtttgtttgcttttttttttttttctgggtaacaaattacacttagtggcctaacatagcacgaattgactatatcataatatccttgcatgaggagcctggctatggattgatagggtcccctgatcaggatcttaccaggttgaaatcaaggcagaggcagggctgtgtactctgaagctggggtgctatcatcagctcactccagctattgggagaatttgttccgtcccactgtagaagtgaagttcccattttctccctggctgctggtgcctctctgagctcctttaggacttctcaagggcccgagccatgtggcctcttcacagccaggaggtggatctctctccaatcggccaagatggagtcctagataaaaagtaaagcagtcacaggcttaaattcccattgtgttcctagatcccacccatactcaacgggaggagtttacacaaggcatgtgcatgcggggtgggagtctccgaggccatctcagcctaccacaggatcctactcatctgttagtgtccagttggaattatattcctttcatgagctcatttcataagctttcctgcagtgtgaactgctcctttgcctgccttcattctgcagtttctatcttcccttttacactgcctcagtttgtgaagtaaacccttctaatttatggcactgacacaatctgagcaggacactgtacctttggagtaggtggtgctagttatacccctcgtctgggcctgcttgtgttctctgcaatgctgaagtggctgttggtaagaataagcattatggtgtttaataaaactgaggttcttaaaggcatgacgtatgtactttcttcatgtaagttcgttctaaacatgttatggccactatggcatgttttgaatgtatctcattatctactacacttaaggacagagaccgtcktttctttccactctgtaacctatattcagtgggctaaatgtttgaatcagagcaagcaaagactacagaaaaatcataactcagttcaggaaccagtgcttcagaaagcctagaatgtaatcagaaatgaaagacagtactccagacagtatgacttcagaatccgttcatgagggcagtccggaatatggagatgagaaagcgtggaagattgggcaccctcatggatgtctttgtagcggctgcccagtgcctttgcccgctggtaggcatctaattagtgtcactgataactgtcagggagtggtatgaacctatccaatctcgatactttttaaaaacaactattttgtttcctaatcacagctggtgctcaagaccgaatcggctgggcttttggcctaggattagaaaggctagccatgatcctctacgacatccctgatatccgtctcttctggtgtgaggacgagcgcttcctgaagcagttctgtgtatccaacattaatcagaaggtgaagtttcaggtaagatgacttgcaagaactgaatagataataataaaaatggctgtcaaggatcgacaggatcatgtacttgaaagccattgaattttattttatttattttattttattttcattttactttaagttctgggatacatgtgcagaacgtgcaggtttgttgcataggtatacgtgtgccatggtggtttgctgtgcctatcaacccgtcatctaggttttaagccccacatgcattaggtatttgtcctaatgctctgcctccccttgcctgccaccccgcaacaggccccggtgtgtgatgttcccctccctgtgtccatgtgttctcattgttcaactccaacttatgagtgagaacatgtggtgtctggttttctgtttctctgttagtttgctgagaatgatggtttccagcttcatccatgtttctgcaaaggacgtgaactcattcttttttatggctgcatgaattttaaataatgtgaatttgtaaagaagttctggccaggcatggtggctcatgcctttaatctcagcactttgggaggccaagacgggtggatcacctgaggtcaagagttcgagaccagcctagtcaacatggtgaaaccctgtctctactaaaaatacaaaaattagctgggcatggtggcacgcacctgtagtcccagctacttgggagactgaggcaggagaatcacttgaacccaggaggcagaggttgcagtcagctgagatcgtgccattgcactccagcctgggcaaaaatagcgaaactctgtctcaaaaaaaaagaagttcctaaatagaggtccataaacacacaaggggttcataaaccttcagaaattttatgcaagagaaaagatatttgtcaatattattagtctaagcagagaaccaattttgtactttttttttttttttttttagacagaatctcactctgtcgcctgggctggagtgcgcgatcttggctcactgcaacctgcacctcctgggttcaagcaattctcctgcctcagcctcctgagcagctgggattacaggcgcccaccactacgcccagctaattttgtgtatttttagtagagacggggtttcaccatgttggccaggctggtctcaaactcctgaccttgtgattcgcccgccttggcctcccgaagtgctgggattacaggagtgagccactgcgcccagccctcatctagtatcttttccaacaattctactccattcatttttcagaatgaagctgcatatatgttagaccatttgatcctatgccatagaactctgatgaaaggtttttttaattaacgattttcttttcctgtgtgctttatttttgataatttttattgtcttctctttgggttgctcatctttttttttttcctgttttgtccaagtaaccattaagcccatccagtgaattaatcattccccagataactgtatttatcaattctagaatttgcatttgcttcctttttagagttttcatttatctactgaaatgcttgattttttcatccatttcatccattcttccttaaattctttcacatattcataatggttattttattttattttattttattttatttatttattttgagacggagacttgctctgttccccaggctggagtgcaatggcatgatctcagctcactgcaacctctgcctcctggattcaagcaattctcccacctcagcctcccgagtagctgggattacaggcatacactgccatgcctggctaacttttgtatttttagtagatacagggtttcaccatgttggccaggctggtctcaaactcctgacctcaggtgatctgcccatcttggcctcccgaagtgctgggattacaggtatgaaccactgcgcccggcctcataatggttattttaaagtacttgtctgttaattccaaccatttgattatctagtgttcttttgttgtggttgttttcccttcctaatcatggcttacatatttcctgctgcttcacttgtctttttkttttttttttaattgtgtttgaatggacaaagactgaggtagataaaatttatccccagaaagtcttatgctttctaccttctggctgctaaggtgactaggccagatctttttgttctaatcaggagttgagttgaatttcacatctgctttcctcttgatggtgagatctagccctgcagcagagtttgggatctaaccatgtgagatcacaggatctctttctgctttccatccacttaccagcttcttccaccaccagcgtttgtaagcagaaatattatgaaggagaattggctggcagtgagggttagctctgtttctccattttccaatctgccatgccagcccatgcttggctgacgcaagtgtggctcattcttcttattccaacaaaatgtctttgccagtagcaggctagctcttctgcctactcacgccccagtggcgacagcagccatcagtgtctgtctaccctagaagggctcatctctctctggagttatacttatttatatttgtgtacagaccttttcaactgtattagtccattttcatgctgctgataaagatataccccagactgggaagaaaaagaggtttaattggacgtacagttccacatggctggggaggcctcagaatcatggcggtgggcgaaaggcacttcttacatggcagcagcaagagaaaatgatgaagaagcaaaatcagaaacccctgataaacccatcagatcttgtgagacttaatcactatcacgagaatagcacaggaaagaccggcccctgtgattccattacctccacctgagttgctcccacaacatgtgggaattctgggagatacaattgaagttgagatttgggcggggacacagccaaaccatatcatcaactttaaggacaggtatgatttttatgagtgtattttgttattgttayagtgaagcacactgattttgtgtgtgtgcccatctgcatcttgaacctttctatgtatatatgcatatatttttggttttaccttatgaggacttttaaaaacttctacttgaataattatctgttttattttagcatcaatttccttgtagactaatttgaaataaagctgtatctaatttacaataaaacctggctagggctgtaactttttctcattctctttttaatatattgtcagttatttaatcagcaaacatttaaagaacaccaacatcgtgtagaatggtgtgctcaacaccatggtgtgacaaataaagatgaaaaacacagttgccaccagaattaagtggcttaaattcaattttaagtgtacttacaacaatctttttttatgagacacatagaaatagactcttgatctcttgcactaaatgtcattttttttctcctttctgccttcaaatttgaaagccaatatatgcatacctgcactaatatataatttttatagttgtctttgtgtaacaaacttaagaacttctaacggggcaattaggatttgtacattcatatttagtatatgttcataaaatactttgtgaagtatagattatagatcatactattacctaagtattcacttataattagtatctattcttgttagtttcctgttgcttaggtaaccagttaccacaaatctagtagcttaaaacaacatgtatttattattttacagttctagaggtcagaaaaccaaaatccacccaactgggctaaagttaaggtgtcagcagggctgrctccttctgtaggctcttgggggaatccaccttcttgacttttctggctttttttttttttwaattatactttaagttctagggtacatgtgcacaacgtgcaggtttgttacatatgtatacatgtgccatgttggtttgctgcacccattaactcgtcatttacattaggtatttctcctaatgttatccctccctcttccccccactccacgacagaccctggtgtgtgatgttccctgccctgtgtccaggtgttctcattgttcagttcccacctatgagtgagaacatgcggtatttggttttctgtccttgtgaactgtcaccttttccggcttttaaaggccatcctcagtccttggatcacagccatgcatcatgttgccttttctctctccttcatcttttgtcacattgccttctctttgacctttgcttctttcttataaggatccttatgattgtatcaagccttgctgggtaattcaggataatcttcccatctcaaaatacttctcttaaagtaatcctttaatactttaatacaaattaattctctaatacaaaaggaaatgtaaatttcctgttgaatataaggtaatgtatttctaggttacagggattaggacgtagatatctttgggtagggttgggggcatttttcagtctaccagagtcttccctttgacccctaaagattcacatctgtcttttgtaaaatacattcagcctatcccaaggtcccacaaactctgaacccattgcaaaatcaactcaaaatccaaaatgtcatctaaatatcatcagcccctaagtcccatttcatcatttaattatctaaagctggtttatgtgacactctgggtatgattcatcctggggcaaaattcctccccacttttgcacctgaagcgaggtacctactcccaaaatacaatgagtaggataggcattggagaatagttgtagacatttccattcaaaaagggagaaaatgaaaggagaagaaaaagaatcactggttccaagctatttcaaaattcagccattaggtttcaaggcctggggataattctctgtggcccttggcttcacccatttgacctgtatttctaccctctaaaatatccttcttttttaaagttcttttatttatttatgaggccaggtcttgctctttcatcaggctggagcccagtggtgccatcacrgctcactgcaacctccacctcccaggcttacatctcagcctcccgagtagctggtactacaagcacatggtaccacrcccagccaattttttgtgtttttagtagagaaggtgtcttgccatgttgcccaggctgttcttcaactcctgggctcaagcagtctgcctgccttggcctcccacagtgtcagggttacaggcatgatgagccactgtgccttacctccttttttgttaagggtggcatgtatatgcaggtgagttgttttattaccctggcttttgcctgaagaatttggggagtcaaatagccttctttctttccttctctttttgttcttttgtccctctcaattccagctgacagtgttcctgatggtaaatcattctcaaaaaccttgtggctctcccatktatatcatagggattcattccattacacaagaggctcctctgcagatctttcttgaataattcattgctatttctggcttctgctgagacgcctgaggggatccttgactcatatgcttaatttcttcaaagagccctctgtttgactaaataccctgatccttcaaaacttctgaggcattaacaaagggttgtatagctgcactcatggctttctctccaaagcacttttctttcagcraaacccctaactttttgtctttttcagtatagataggctaagaatttcccaaattatctaatcttgctcctctttgcatagcagttctcttaatttgtctgttttctcctgcaagaataaagcaggctgcattttcactgtttgcttggaaatttcctcagctaaatatccaagttcattgtttacaagttttgctttccacttccaattcatctaattctgccgctatgaatgaacaaggatcccctttcctccaccttccactaacatgttcctcatttccttgcgagccctcaccagcagggcttttgacatctgtattgctaccaccagtatgtttatgaatatttggatattctcagacagtataggttttctctaccatgctcctcactttttccttgcctgtcacagtctataacatccatatttctacaagagtctctttaaggcaaaatagccatttaatatcatggtgctccaagttatctactacccactgaccaattccaaggctaattccacatttttatgtatttgttacaagcaatacctcacttccagatacaaaaatacgtattagtttcttgttgctgctataataaattaccacaaacttagaagcttaaaacaacatgagcttattatcttatatttttggaggacagaaatccagaatcagcctgattggcctaaagtaaaggtgtcagcagggctggttccttctggaggctctgggggagaatctgttcccttgcctttgcccgtctagagacagtcctcagttcttagcttatgacagcatcacgttgccttcccccaagccctgccacttccctctgtaaacacctcaccctctctctgaatttttgcctccctcttcgaaggactcttctgattacatggaacccaccaggatattcaggataatcacctcatctgaacatccttccttaattatatctataaagatcttaatgtaggataacrtattctcaggttccagggagtaagagatggatatctgtggaagggggctattatttagcctatcacttgtgccattttatatcctatttcgtcatgacagattgcttgccttcagatataatagagtggtttgtctttagggataaaaaataaggatagtattaaagtgttagccatttttaactatttatgtagagtagtcatatttacatatataagaggggactgtgttgacagaaaacttgttttattactacagttgacctgccttgagaaaaatacttaaaatgattgtaattctctgcaatctcagaggtggggcgagaaaatggggaaaaggcctgctggcagctatgaacttgtggatcccctggccaggaaactctggaagccatttgggaatcctattgtgcaagaagcagaaatttctcttccttggtctccttttaggscctcctaagtgatgctctaggctgtgttggcttctgtggtgtctttctctgtgcggcctccacatcctgtcctgtacatttttctgtccagctgtggggcactctcctgggtgctagcaacagtctctgattgatgggaccctgagtcctcacctgtgtgactcttttcctgcataccttgaaacccattgtttaaatctagtcrgtaagaaactcaagttaaaatgtgattttaatttttgattttcattttacatattttgaattaagtgctttgcctaccacggctttctttaaccaacctggatctgtgcttgagataagtgggtcaacaatatggttggtctgttatgcaagtgataacttgttctgtccaccactgcagcttcccatgctgtattcgttctgagtgtttgggtctttgttgcatatactcctgccaactcccctgaagcaaaatttgctgtttcagtgcattgaactgaatattcaataataaaactttaatttatactttgttttttaaacagtctaaaattatgaattcaatatttagtcctacacagagcgatacttattgaaaattactcaacattgtacattttacttacagattttattagaacttactaattctgtgtctatccatggtggcttacaaggtcagccctcattggatgaaataattcagcaatgttggctgttatcttttttgccagttgaagggttttactggctctcttctgaggccacagactataatatttctaatcctgaatggagtctcaaatacttatcactgcaacaggagtagatgagratggatgggtagtggctgcaaacctatgatactacactctatccaagatgataatactggtagttagtagttaatacttacttcagccttactctgtgtcaagcattattataaagactttccatgtcttaatttaattttctcagtaaccctctgagtttgggcgctgttattcttgcagtgttatacgtgagaaagttgtagcagagccatcatctcaatagcatcgttatattatgtatgtggctcaatcagggcttccagaagccattccctaaagtttaacctgagtataaaactcataggtagattattcagagccgaaggatttaaattttttttttaacaaatctaaaaatcagtatacagtttacagaaaaatacagcatgaagtttaaatgatctaatttatgaacttactggtttgtaggctacaagtattaatgctttctcaaacttcagtgtgcaggtgaatccctgatggagcttgttaaaatgcagattctaattcagtgggtctgggggggtgcctgggattctgcatttctaacagtctcccaggtgaagctcatgctgctggtccacgagccacactttgaatcaaagtaatgatggttaaaattatttaacttgtcagggtctcagctgcatcgtcgttcaatcagatggtaaaaggagatggtctgactaggtggtgaaactcacttccttctctgttgcactctcattttgagtataactattataataagcaggtctgtaatttgatacctttggcactcaatcttgaaactattttctttctttttgccctaaattttttttccatggatttccaacagttgtaaaactattacacttgttttttggattaactgctgaaactccttccttcctttctcccttgtatttttcaaggtgagggagctatgtgaataactcatttagtttaaatgcacatttttaaaaattatacttaagtcagagatttgcttgtgcatgttaatttgtgatgggaaagtgttagtatttacttcagaaaaaaggaagctaaagacgaggaaagaagagaaagggcaaagaatttggaagcatcagcaggagggacagttactatcaaagagtcttgtatcaattaggtcatctctgaggtcagtcatgcctagagtcccagggaaaactctgggtcagagttcatccttgctatttctatggtagcaaacatcagccatgagtgctgcatgatatgaggcctgggagtttcttaaggccaggattggctctttcatgccttatagcaatcacagttcaatacactattcacctgtacattaatttgttgaggaccttataatacttgccatttgttgaatgctgtgtgtaagccattgagctaaatgctttgcctatgttagagcttttatgcatcacagtggatgaggcgagtactataaatccatattatagattctgaaactgaggcttagcgtcagcaagtagttcaaccataactgtggtagtaagtaacggagccaggattttaaccaaagctgactccagagagctcctaatattgaactagtaagctgttactgttgcctataccaagctgctgtgctagatgctagagtaaggtgaacttggtccctgacttaaagttatttctaatctagagtatgaggcaggtttgtcaagagacacttattaaataatatgtaatatggtttggctctgtgtccccacccaagtctcatcttgaattgtactcccataattcccacgtgttgtgggagggaccagatggcagataatttgaatcacgggggcggtttcctccatactgttctcgtgatagtgagtaagtctcacgacatctgatgggcttatcaggggtttctgcttttacgtcttcctcattttctcttgtcaccaccacataagaagtgcctttcacctctcgttatgattctgaggtctccccagccacacggaactgtaagtccaactacaactctttttcttcccagtatcaggtatgtcttcatcagcagcatgaaaacggactaatacagtgtgtaacactggtgcaactatacataggtgaatgtcgaatttcactgatactgaccgatgaatgtggtggtcaaaattttcttcttcgtttctttaattcttttttgctagttaattctctaagtccttccatgtctctccagaattgtattaggccttgagcctctgattacttgctaatctccttggcttggaatagcttctagatctggttttgctgtcattatcataaatgttgtctaatagagacttaatgtgggattttgcagtgtttcctcattctattcccaaataaatccagctgtgagaatcgcatcggcttcattgtgttgcagtgaaattcatggatctcaaactttttcagtatttccatgtgtatttttctcattttacttcccccgaaagtatattaagtattttcttttgctggagaagagatgtttatctcagaaaaaaactaataggaagggatacaggaagaaatgtgaaagatgaccaatcatagaaccttttatatgtattcagtaagcattgttgacttaaaaataaggagaggtgcagtgaccgagactatagacaagtttgtattggaataattatagtgcttatatctaaagcatttataacagagcctgtcacattgtaagcacttaatccatgttaaatgttatttacatttttaccaccactactattactctgttgtcaccaccactcccacaacttcagatggtcacttatgaaatggatgatagcgggtactggaaaaactattgcatcctacagtctatcttctgctgactaatgcttgaaatctccccttagagctcgcttcctttagcttaatactttaatcctagttaaacctaacatgttccttttgcatagaactggctgtgcctacctttcataggataactggatgggattagtggggagtgtgtagctatggaacagttttttctgtttgaaattgagtatagaaatcagggtcatcgtggcgcattcaacgaacttaactatattggtcaaaaggaaacatgcgctgttctgagagcggcagccacagtcctcctgattctcagtcccttgtaccgtcagtttccatcttcagcttgctttgccaacactgatactgtataactttagccttatgatgttaggacatttaattgccctgtagtctatggagtcctatggattgtggccctctgcttgtgttcaaacctgctccatcagaggtctatgggctgatttttttgtgaaaaaggagatcttttggtatgttttacatatttggattattgtaactccatatttctttcttgtttattaagttactaagaaagaaagaaagaaagaaagagaaaaaatgaacgatctaggtcctcagcattttcttacagttttcttgtagtgtagattggaagaatgttaaacatatccaatatccttgttgcattttcttggctgtgaagcttaaggaaataaatatataagaactttctatttatagatagcatattaaaccttaaatcttgccaacagtctataaratttgacaaattaggtgtaatatatyttaggaatcatctatctgactgaagaagttttggcactctgtggaatcagagggatacttttatactgcacagaatcacctaaactgtacatttaatagttggtggattatagagttaaaaagttacagttgtagaaagagatcatcagaatagggaccagaaggaaccggtttgaaggaactgacgtagaaagaaaggtcgtatcaattaagtgttgatggacaagttaatgtcttttttttcctgagtgtgaatatgggaagtaattgttacagggtggcaggagggatgactttggcttcaaccaagagaagacccagctaagaatggcttaaataacaacaacagcagcaaacccgcagtgatgccagggctctaaaacactgaacattttaatctcagatttgtcctctcaagattgaaggatggtgacgggaccacaagcattacctcttacgacaacgtctagagacagaaaatggagcacatttgcttccttttcataagagtgagggagagtttttctgggagacctcagcagacttccctcacatctcattttcaaggtagtcagagtggtctgtgaagttagcctgttattttctgatatttgtactgagctcgtgtcaataaagcttatgcttttgcattatttcacaacgaacaatgccacatgtgtacaatcatggcctatcgagaaagatatctcttgttactgtagatatttttatgaacagatggtcacttatgaaatggatgatagggggtactggaaaaactgttgcagcctacaatctatcttctgctgastaatgcttgaaatctccccttagagctcgcctcctttagtttaatgctttaatcctagttaaacataacatgttccttttgcatagaactggctgtgcctacctttcataggataactggataggattggtgggaagtgtgtagctatggaacacttttttcggtttgaaattgagtatagaaatcagggtcattatggtgcattcaactgatttaactatattggtcaaaaggaaaagggctgaaatactaactttacacaacctaggagttagatcttcagagttaccaaggaactctcaaatgttgatcagaactaattcaaatggaaaagtcaaggttcatattaacgttctagggaccaaatgaagtcaaagtaatttactgagtaagaataattagttaagaaaggtaaatgtagtttttctgtgtcgttaacttccctcatcctgtacaaaagaacaaacgcatttcttcactacttcaatcagaggctcattctgctcctttactcagagggtaagaggagcacatgggcacacctgagatgtgaggaattgagggctgcctgtatttagacagagaaacgagttactttgtaggtagagtgtcacatggcttttcaaacttcatgcgtttatactggcattttctatgtgtaatcttgcaaccttgaagatgaagaatgtggttaaaggaagcagtacttcatatagtggatagtttaattattctttctatcatttggccaaataatgaattacatgttttctttcaatattagagaagaatttattttatttaattatttatttrtttatttttttgagacggagtctctctctgtcccccaggctcgagtgcagtggcatgatctcggctcactgcaaactctgcctcgcgggttcatgccattctcctgcctcagcctcctgagtagctgggactacaggcacccgccaccacacccagcttatttttttattttttattttttgtatttttagtagagatggggtttcaccatgttagccaggatggtctcgatctcctgacctcgtgatccacccgccttggcctcagaatttattttttaacgctcactgtaagatttattaattacaagttataattcactgtcctttatggtgaattataaatggacgacccttgtaagagtccatatggcagagtttgaactcttgggtaactgtgatttgagaagcgattttgcatctattttgatttatttttaaaatgatgatatgttctaaacgtatatttctggatttaacttgctgataaaaatgtagaactgtgtgcctaccagccagctatttacctctgtcaaatcctaggattttactacagatttttttaaagagtaaaagtggttaggcgcaggggcctcactcctgtaatcccagcactttgggaggctgaagcgggaagatcgcttgagcccaagcatttgagaccagcctgggcaacatagagagaccccgtctttacagagcaaataaaaataaattagctggacatggtggtgcacctgtggtaccagctgcttggttggccaggcaggaatattgcttgagcyggggaggtcgaggctgcagtgagctgtgatcatgccactgcattccagcctgggcaacagagtgagaccctatctcaaagcaaacaaacaaaaaaacagtaaaaacattagaaatgcagttgaaacacctacgtctccctgatttcattctgcttcccagtctccccagaggtcaccactagctacagtttgatatttacctttctcatgttcttatccatttgtatgtgtccaaaaaacattctgtaggattgcttcaaaatttatgttatatggtaaaagtcactaaaatatagaaatccagagaagttttttggaaatttgttgagcaaattctaaaatgtatatggaaatgtagagggccaagaatagctaaataacaatgttgaaggatttgcttaatcttatgtcatctttttgaaaagtgatagtaattgtgagaatgtggaactgatgcaaggatcaacacaaaggcccatggaatgcaatgaggagcttggaaacacacctgcgcactatgctagatttatggcagcactagcactatggaacagaggcaggaggacaaggcttctgtgtaaatggagcagggataattgggtgtccacatggaaaaaaaatgaaacttgaccccatatttataattgttcaaaaatgaattccagggggtttgtagatctaaatgtgaaaagcaatttattagcttaccgcctttgaaaaagccattttaccatgagtgattctttcattctttttggagtaaattgaattgaggagatcgaactaaatgaactatggtgatataaaattaaaacgtaattaaatgtctgctcttcaaagttttgaaatgagtgtttacttaaagtgcttcttgtaagttttttgtaaagcattttatcaaattaggggtgtttccttctactttgagtttgcttcaagttgttgctacaaatgaatgctaaaatttattaaatctgtctatatatttcgagatgatcttatgatttctggctttattctgttaatcttgtgacatttagtgattgttttttgaatgttaaaccaatattttattcctgaaatatatataatttgactgcaaaatattaccattttatatacttgtagattttgtttgttaatatttctttaggatttctgactttgtgttcaggggtgaactaggcctttaatttcctgtgtttrttacgatcttctcaggttttgatgttaagattatgatatcctcataaaactagtttagaagtatttccattttctagcctctggaataatattttgaagatttatgttatttctttcttaagtgtttgatccaatttactagtgaagtcacttggggctggagtttcttttgtggaaagtttttaaattacaattaaatttttaaatagttattaggctattcacattttctgttttactttgtatcagttttgattaattgtggttttttctagggaattgtctgtttttaaattttcatatgtattggcacagctgggcgctgtggctcacgcctgtaatcccaacactctgggggacagaggcaggcagatcacttgaggccaggagtttgagaccagcctggccaacatggtgaaaccctgtctctactaaaaatacaaaaaaaatagctgggtgcactggctcatgcctgtaatcccagctacttgggaggctgaggcacaaaagttgcttgaacccaggtggtagaagttgcagtgagccgagatcatgccactgcacgccagcctgggcaacagaacaagcctccgtctcaaaaacaaaaacaaacaaacaaaaaaagtattggcataaagctgttggtaatattctcttaatayattgatttaaagaaacactattttaaattagtcaacagttaagcataattattaatattttatcaaattttacacacactgttttttttggcatatcaaacctcttagagtttgcttttcttcttaatgaagtatattgtttgagtatttgtttctgtgaggggttatgagtggtacattcttttggtctttgtatgtctgagaatgtcttcatgttactcccattcttgaatggcagtttaacaaggcataacattctggaaaggtagtcattctmccttagctctttgaagatgctatttctgccttctggaaaagtctaatattaatcaaagtgttgtttctttgtagataataatgccttttattttgagtgatgtttcagaatttctgtttaaatttgacattccctaattttaatatgatgcattttggtttggatttgttttggtttatcctgcttagtatttggagggtatttttgttccgggattcatatctttactcaactctagaaaagtctgagttattactctccttgaatagtggctctcctagattctctctattaccttctctaggtttcctgttgtatattggagcttcttagttatcagttatcttaactattttttggtatttcttatttctttgtcttgtattggtgaatttgtcagtactttctaccagtttaataatttcctctctaattttttaacttaataatgtttactttttatttctaaaatgagcttcttttcttctccattttcttgtttaatttctgtctgattttgtttcctaatttcttgcttttaaaaatggttgttactttgtttagtaatttgaatatctkcagtatacttgttttaaagcctttagctattctgtattattttttatctaaaatgagttcatattcttgttgttgatttaattggttgtgtttcttcatattataatttttckatgtttcaaagtctgactttgcaagcttattttgaatacatgctcatttccccccatttttgattatcaccacttgtccatcttgtctaccaactttttacggcatcctcttgtccctagggtgcccagttaagaagtggtcttttaatggcgttatagagtgcttgccttctgattatattgtcaccaggttagtgggggttttggctcaatacctgatcaagagtattgagtatctcttctttctgtggcttcctataaagcagtaggtgattcaaagcatgaactcatagcagcatcatgacaggatgttgaaatgaggccccaaggaaataatctccttaacattcaggttttcggatgagtgttcatcagaaagcaagttatatggcatgtgtctgtgtttgttacatctgccttttccctgccctgacatttattggcacagcccattcccacagatgtatattttatgtaagtcagtcaaatggatattcttaaaatgacaaccttgactccactgtaatttatacacacacacacacacacacacacacacacacaatgtttttcattgtgttaaatctttgtaatataaaattaactatttaaccatttcttttcttttcttttttctttttcttttttttttttttttaagatggagtttcgctcatcgcccaggccggagtgcaatggcgcgatctaggctcagtgcaacctctatctcccagattgaagcgattctcctgcctaagcctcccgagtagctgggattacaggcacctgccaccacgcccagctaatttttgtttttttgtttttcttttttgtttttgtggttttaaggagcagaaagtttaataggcaagaaggaagggagaggaaagaaggaagaagctcccccgtacagagacagagggaggggggctccaaagccaaaagaggaggtccccacctgccacgtataccagccaggtatatatgcagaggctggaggaggcagtgtttgatttgcatagggctcagaggattggcttgactaggcatgtcattcacgtagcccatgaaaatgctggccctcccaccctagactttcaatatgcaaatgcagggcacaataatgttatatacacgtgggaatatgtgggggcagccacattgccaggaacatgtggggaaaggacaagaaggctgagggaatctccatgtttgggtagacacagtttctaatggacgttatttgcatatcaaaggttactggcctggctctaagagccagggctttacaagaaacttttccagagatgctttaaaaaatgaaaacttcccaaggaccccttttcctacatcattccccctgtggagatgccacactaactgctgttagggggttttgggggatgactccttctggctacttcctgctgaaaaggggtttcgaatggggaacagtagctagggctcctcctggggtcgatctaaggatccttggaagaatggcatgtccatgtgtgtgtggttcagcttacagcaccatttggagtttgattgcttcttggtgagaagaaacaatttgagttatagtattgagtatacagggtccaaataycaatacaagatatataagcaagaaagtgcttaataaaggggttaaccaattccataaagaagactggaatttattaaagagagattgtagcccctcagggctgaggccggcattttccctgagcctgtcaacaattttgacttgatttttaagtacctgtagattttcttctactttactagaggtgttaatccaaaagcagcatgtttcatttaaaactgcattactaaacccaataaaaagtcctagcagactcagtgatagtaaaactttcatgcttcctttttgtcaactattatccctgctgtaagggtaataattaagcaaaatactacagcaatggaaactctctgtccaatatttcagttagaaggtgctaccctgtataamcctgttgcaaatagtagagtgaggacagcaattcccacaagtgtggtgtgggtaggtaatttccatctaaaattttacttgctaagatatagaattctcctttgggggtctatgaagttccttggttttattttcccaaacaaagaaacctccgggttatgggcaccttactcactttcattacccggcagaatttgcaagataattgcccagaactagcgtattgattcacatttttatgttacccatcccttttktttgtttgtttccaagctgcggaagatcaccacttgattcacaggatcaagcagagttagtctaaaatgtaggcaaaaagcttaaaaacaatgaatgagactaggatttaatgacaaatgtaagataaactttggagcaaaatctttttctccagtcctcatttttggtaaaaactagttatgaataaactttagacttaaacttgacctgattatttgcataaagtgcagcaagaatggttatttttacatagaccttttggattgactttgatgaaactgttccacaaggaatttcacataagacttctaaagccaagcccagccatgggtttgtgtcctctaatacctgtgtgtttggtgagcctatcctctcgaggtcccaagataaacttggagcttccagacctgttagaaagtgtcattctttactgaccacaggttaggaatcctgtgcggggactgtgcagacaaggcatgaggccagttcttcctaaggggctttttttaattggctttgcctgtcacgcttgattccttaaagggaaacacacactttcagtcaaagccttggtaaaataaccagtttttccagttgtgtcctgttgatgaagaaaaatggattcttactgcactgatgcaaacaactatattgccataagttaagagtactcacagatagtttccaaattctagaggaaccaggcagagaaaaataaacatgctccaaattttgtttacaggagtataccttactcaattattaaaggccataaatagtttaaaataactttccttgatgctgaaaatcaaaacaaggatcagcagtattccaagcaaaagttaaaaaggttactttcactttctgagtgtagtccatttagttaacttttgttttgcttgagatttgtcaacatgtcagttttttatgagctctgtactttctttatttcaatattacaatctttaaagctattaaaaacctgcatttgagaacacctgttaaagtccttaatatagcttgatkataaactgtcttttgagaaggaacaaagcaagacaacaattgtttgtgaatgacaaatttccaggacagttatagttaaaaatatgactgacaagtttatttatcttcatggtttacagtaactttaccattaattatgattgatagcatatacttagacattagcattttagaaatcccatacaattttggaacatatattagtattattcaccaaaatataacttaaagaagattggacatcatttcggcaatctcatgtgactaaacatctcaaatgatcctgtttacctcttttctgaatgtttcaggggccttctgaactatccaaaaagccaggcatcatgaaggacaatttccagattgccgtaaattattttgccaaaatgatgactcaaaaggaaaaaacctttcattagcctttactgtgacatgaaaattttgtgcaaagccaaattttacccttgcattagtttattaatgttaaccccaattcgtttacatgaaaccgtgtggattattccatctaatcctaaccaatttgaccatgaggtgaaatctttacaaacctttcataacccttttactaaagggcagattagtgtcttaagagctccttgctatgcttttattttaatgcttaatttatgagaagaccatctggatgctatgggagaagacagcgtagtgcttgtaccatgcatgtcattacaaggcagcccaaagccaattggcttattttgtaatcagctcatgcctgatgggagtctcatctctcagtcgggagtggggatgtttccttatcttccaggtggtcaagagcatgcttctctgatttataactactatcagccatcccttacagtgtattttctacctagttattacacaccaaaactctcacaatgcgaagtaatttctgatacccccaaaactcaaaaccatcagataacacaagcaaaacagaacagagccgttgattttgagagggatttagctccttttaattcctggggtttcatgaggaaaacagaggattttccccaaaacagggtttgtgatgcctcctctgtttttccccagaagtcccatactaccagaagttattttagggccttttatgcatgcattaagagtggtaagacacaaaatggagaaaaataattcagttaactgagaagaaaagagcctttttccagaaaaacaagattcaagaagagaaaaacatgaaggacttttaaatatacctataacttgagtatctacttttagttaagctgrgcactctttaagaaaatccttttaaatcccttgttacttgactttagccacaccaagcatttaagatgttccgcttttgaactttacaaaaagtccccttacaggtgaaaccaacaagccttaattaggttatgacttaaccgtgagtgtacaaggtatttttaaaggagtgataggcagcttttgaaactgtcattgcaaaactgtcactgagacagtgaaagagatttgacccaaacracttcattttgtttccagccccaaagctgtccttgcccatgtctgggcgtaggccgaaccaactttgggaagagctgggtttacagtctatagtctaaaacagtctataggtttacagtctatactctatagtggctacaccatttaatattcccaccaacagtgcacaagtgttccagtttctccacatcctcgccaacgagttatttttgtttattttaataatgrccatcctaatggtgtgaggtggtatctcattgggattttgatttgcatttctctaatgactagtgatgttgagcatcttttcatgtaattgttggccatttgaatatcatctttggagaaatgtcctttcgagtactttgcgcattttttaattgagttctttgttttttgttatttttatatatttttaaaaggaaatcatttgcaaatgtggccatcgtattgctgcaaacaaattgctgccagtacagattacattgttaagcatgatggttgaaaatatatatcacatttagaccattactggccacaaggaactgatattatttgatgtggtttttgaggttcgttctttgtcttgctgttactcttctagatacatatctatttgttgagtatagcctggtgtcatcaccctaggtcctacatgttaagattcctaaggttcagacaatagatggaggataaagagttgattctaagagtcttttaaaattctgcccatgtttatgcatatatacgacatacagtcaaatccatccccarcatcatctttgagtgtatgatgagacagaagagatctgaaatttagaggccttggaattatttagctagtcgctagctattttcccctgggtcactcacctgacygttctgtcactacattttctcactggtaaaataagttcagatactctcaaaggccactccttattctaggatgctatgaaagtgagtaggattttcctatctcctcttctgtgtacctcagattgcattgttactcctgacattcatcttgacttaatcttgccagcttaaaaaagttgttgtgaaaagagatgagtgtttctctgttgacttgtgattatgtgaacagtgcagagtgcaagccctctctctgcttctgtctggtctgtctctgtccttccccctttctgtctgtgtctcttgctgtttttctctatgtggcattttctttcactctgtctcttgtcactcttgtaatatgcggttctgattcacgttcaactgtcaacatagcaagggggaaatggtcccaggctgcataaatccacaatgggagtgatttctctgctctttattaagatttttgttgatgtatgtgacattcaacaggatttatcccaaacacaagagcgttattaattatttataaaacatttctgagcatctgctcttgtgccaggcaccgtgcttgaccctggggacacaggaagtatagtttcctgccttcagatagctcccgcactagtgagggaggggcattaatatgtataggtgcttgataaaggtagctaggcctgaggagtctgcactgtgtggcaggcaatcagtccagtaatgggaaggagacagaagtgtgagcaaagtcctggaggcgkgagacagccatagtctgtggttcagtgtagggtgtttatagcagagtgtgctgagttagtgtggggaatgtgggcagtggcaaacttagctcgcaaagcttaggctttgaatggtttctgtaaggcaattagcaagacatccaattttgtgatcagatttctattttagacagatcccagtgcggataagatgaggatagattggggccatgaggctaggagcccactcgaggcccggcacagaagaaatgatgtgatatcatgtagggtagtaacagagagactagaaggtagggttgggctcaggaaattttaggagaaaacattgaaagatcttggatccttatgtgaggcagaggcagagtgaccctatggcttaacacctaaattggggtctggctgcctttgagacttgcaggggcactgttaataactgtgttgcatgtctcggtgcaaactgggattgacctgggtaaagtgggtgtttaatcacagtaggtaaacatgagccagaaagaaaatggttcctaggtttctgccttgggagctgggtagatgagaaacaggagaaaaaacaggtctggagaagaagatgatgagttcaattttggccaggtgagtacaggagtataattttttttttttttttgagacaggttctcactctgttgcccaggctggagtgcagtggcacagtcatggctctctgcatccttgaccaactgggctcggtcgatcctcccacctcagcctcctgagtagttgggactataagcatatgcccccatgcccggctaatttttgtatagtttttgtggagatggggtttcgccacattgtccatgctgagctcaactgatccmcscacctcggcttcccagagtgctgggattacaggcgtgagccaccgtatttgagcaggaatataaaaatgtgaatttaaacaacttcattgtggtggtggtagtggtcattgtctttgttttgtttgttttaattggcatagtcaagtcttcagctgagcaactggtcttaggtatggctggcccaagtgacaactcaggccaagatagaagtgagaagttggaacagggttgtttactgtggaggatgagtcagagctgagccctttaagagaggatggtccaggggaggtgaagtcagggcatattgttatgggggagaggtagttgctgagcaagcactggcatgggttgatgcttgggaatggctgtcaagaggacagagtgcaaaggtcaacaggtaagataaaggaaagcttcctccagaaaagaggactgcattaacaggggttggggagagaggtagaagacggatgtcagggtcaggcatacagtgtttcttccctgcctgcccaacatgctggactctttaaggatccttcaattcttgaaccttgcttaaggacaggttatgtaaatgctagtcatcagcaaaagccaaactcacattgttatttctttttaatcatagctgtattaagcttttggaggtctgttctcccaaatgtttctgtctgttaagcagaaaatatttcttccttgaccaaggactgaaaagtgaaagaaaaaagatagaataaaatgttctatctagaaagtgctatctagatttgaatagttggaacatcttcctaaggtgtttattttggtggatatgtgaggaaatgagaagagacgatgatattgaaagttgacttgcattatttgtttaaagttttgacaattttgagtattatggtgtgcactttgcattctggtgcagtgataaaaaccacaacatcttctctttatttcactcttctgggcttaaatttgcatctttaatattgtattaccataatttttgcatattgtaaggtaattcagttgccctcttcctgcatggttcagatttccagttttgtatgagtttcttattattctcacccagtttcccaattagcaccttgttaactacacacctgctgcacagaaaattgtattacgccatttagcctttttaaagaaaaaaagagagaatggaagacactctgttaataggttatttcaacctcaaaaagtgatgcctctgggcacagaaccacaacatgattgctgacggggagaacctgattgtttaatagatgctagaactggaacaagaaaagcttttggcagacctctggaaacaggggggtaatctgcastgtcaccacagctgtgcacgcatttccagcttcaaaccacagaagccaagcctgatccgtcaggttctgcacatttctttgtggaagaatcactgagccacttccattactgtgccactctgaaataatttccatttatcatctcatcctgggattagctttatttcctagtatagaagaaataaatagacttactgactgtttcgttttcaaatttttcgtgaagacttggtaacttttcactcaaacggttattcatttattatacttacttccacatcgtgcatctattaaaggcaaatatgcagccgttagtatgtaaatggaacttgcatgctgaacaaatgaggtagaacctcaaacgttatttattgactaattagtgttattgtaatcagaggagagcctatagaaatgtgtaaaactatgcacgatgggcctacacgaatataagcagatgtcaatttcattttggtctagcttaattcatgcgtcttctgtgacatacgggtgtaataccttcatttcaaattgatttagatgcttacttaactattaaatgataatagctaatttagtggaaaagattattaaatcatataaaaaagaaagcctcaccaacgcacgtggagaatcctacttactgaagcatgggaggttgaaaagaaggcacaactaggaccttcattaggattcttcaagttggcctttccagagatggctttctgaatcacgagccctctgcttcacgctatcatctgtcacctcctgatcatcccttctgtgtcatctagtggctctagcacccggctggggttctccccaccagcctagaggcagtgcaagtgccccagtaactcagtcttctgtgaactaggaaaaaagcatttcctcctgacttcacagaccttcacagccacacctggatccctagccacctttcttttatcagaaatcccctctcatcccacgatcttctactcttctctcccttccccccatttccaccaatccctctcttgggctccctctttacccccatctgttccttgccagtctgctgttaggcaaacctctagcctcacttcttgtgccatcaagcccagaccaaacccacagtcacctgtgtacactgtcctgtcacctgcagcctcagctccctcatcctttaatttctgccagcctagttagtcaggcccctatcctatatcagcccccaaagttatctttttcctgtttggacatgttgttttcatgttgaacatgcctgtagtaggtcattcttgcattgctataaagaaatacctgagactgggtaattttataaagaaaagaggtttaattggcccacagttctgctggctattcaggaagcatggtgctggcatctgcttggcttctcaggaggcctcaggaagcttacagccatggcggaaggtgaagggacagcagacacgtcctatagtgaaggcaggagcaagtgagagagacagttgggggtggggaggtgccacacacttttaaatgaccagatctcacaagaattcactcacttttacaagacagcaccaagccatgaaggatccacccccatgatccaaacacctcgcaccaggacccacctccagcactggggatgcaattcagcatgagatttgggcggggacaaatatctaaactatatcaatgcctaaaaaacaaatagtaagaaagagatcgatgactgcctcccatacaaatgtacgatctcctcttgggagttctaggtttgtgccacagcttccttgcccacctccccaccccaagcccgtaacaagtagcctcattttattccaggaaaagaacttagaccatctgacatgaaatcccccatcttttctcttctccacttctgatttttttcagggtgcttctatccatcctagatctacttaatcaaaatctttggggatggaatccagaaatctgcttttttaaaatgctcccagtgattcttctgtgccttaaagtttgggcacttctgaccaacgctatagtaataaccaatggactggttccactaacttggttcttcctatttctggccatcatccacatatcatggtactgtctcatgttaatagtttaatgctgtcttgtttcaatagttcctcrttacttaaggaatagatcttgagttccttagcacaatatcgaaaatatttgttcactaaatgtttcttcctatccagtctgcctcgccccctgctcccttatacctgctttttggcagtcacataggacttctattttctgaagtcagtagaaatttatttgttgattcactgattcaataactctctgttgagtctctgttgtgatacagactctgtgctcagccattgagttcatgaccaagacatagccccttccctcactgagattatagccatgactctgttcaattactgctcttagaaaacaccctcctcactccatttctctcattgaaaacaataggcaacttttattgagtgcttaccatgggccaagaaatgggcctaagccagccagccctctttcccttgctcctttcttttattgacacacacacacacacgcgtgcgtgcatatagacacgtgtgtgtataattttatttaatcccagctgaatggtgtaggtattattgttaaccccatattatggtgaaagcaatggaaatttagagtcttagagctagtgcgggtgaactggatctgcaaacctggtctttctgactcctgtgctccattgcttctttaggccgcattcagacattctatccatccttcatcccccattccctacacccctttaccttattgtttccattgccctttgtttattcaacaaacctccgacaacgtttaagtgccttctttatgttgggcttaattagaacactttccaggcatgggagttctctctctgcttctgggcatgggagatccttaagtatagtggaccacagtgcattccttgtacattcagggcccagcactggtattctatcacaagcacagtgtctgggtcctatcagtattcagtaacatttagtgaacaatctcagggaagtagaacattttcagttaaagtgtattttctatggtctgtgacctaatgtatttgctcaccaaaataatggtraaaattggaaaaatgtttagcctgccatacattaaaggctggcaaactttttccaaggaacacttcaacggcagcatttgtatttaagtagtgaatatgctaattgcrtgtgcttctcaactacttctttattaaaatcactaggagagtctttttgttttgttttgttttgagacagagtctcactctgtcatccaggctggactacagtggtgcgatctcggctcactgcagctcccgggttcagctgattctcctacctcagcctcccaagtagctgggactacagatgtgtgccaccacacccagctaattttttgtatttttagtagagatggggtttcaccgtgttagccaggatggtctcgatctcctgacctcgtgatctacccgcctcggcctcccaaagtgctgggattacaggcgttaggagagtcttttgagaaaaataggtctactgtatggagcggtcatatttataatagtagaaggttgaaaacaccctatgcctccctcaggaagagagtggttaaatgcattatgcagaatgtgtaaaagaaatactttgtggcaatgaaaaaaataccctttactcagattttgtgtatctgtgtgtgtacagtagattctcattatttgcagtaaatatgttctataaacttgcccccaacactgaatactgagctttagttcctagaggaaatgcaggattaggttccttggagcttctgatcaccttttcatcaaatcatttaatgaataactttgttttatgtgtgtttctgtttagtggtaccttatttaaattacagttgttcctcagtgtactcagagaattggttccaagacctcttgcagataacgaaacctgtacatactcaagtccrgtagttggccctgtggaacctgcatatacaaaatgtcagcttctgtattctaggatccagggaatactatatattccgtttacgtttgattgaaaaaaaaaatccacatataagtggaccagtgaagttcaaacccaagttgttcaagggtgagctgtgtgttgttggttcattaacattgaactcttgaccaatcgcactataactcaaacatgagtattttctccgtaagacacatcacagccttcttgggctaaggacaccagagagtacttcagcactatgcttggaagtcattttaaacagtgaaaccaccaccataaagcacaaaattccaaacaatgtggcacttaatcgaaataaaacaagaatgcagaccatagaccatcaccttgttcaacatcagctgggaacatgtgtgttctgtttctcaaaattttcactcctccatggagcatggcaaataatgatttggaggttacaaataaatgttcacaagtagatgaattagtgcacgcagaatctgggcatcatgaggatcasctgtgtatctgtacctccctcttccacccaatatttgagagcaaatgggagacacataccctcttctcctaaatgcatcatgtgttttctaagatcaagaactttttcttacataatcacagtaaagttaatatatgtcaggaaatttcatgttgattcaatatctaatccaaagcccatattcaaattttgtcagctctccccatagtgtccttaattgctattttcttcctggtccaggattcaatacaattttatacatgtattttgttgtcatagctctttggtctccttgaatctgaaatagtttctcagcccttctttgygttagttaatcgtgacatttttgaagattacaggtcaacatagtagaatgggctttcatctgaattggcagaaccttcctcatgacataaaattctattttgttctgttttatacaattttttggcttcatcttgtgcattttcagtggaataccacagaagtgctgttttgtccttttcaatgcattgtgtcaggaggggcatgatgtcagtttgcccccatattggtggtgagagctctgacctttaggttaaggtgatgcacaccgtgtttctctaccacaaacttacccttttcccctttacacattataattaagttatttatggagtggtactttaaaacrattgagtctcatcacattctattcactggttttagcatccattaatgttttctgtaaggtatttataattctgatggttaatactgattgtcaacttcattggattgaaggatgcaaagtatggatcctgggtgtgtctgtgagggtgttgccaaaggagattaacatttgagtcagtgggctaggaaaggcagatccacccttaatctgggaaggcaccaactaatcagctgccagcatggctataatataaagcaggcagaaaaaaatgtaaaaaggctagactggcctagcctcccagcctacatctatctcccatgctggatgcttcctgctctcaaacatcagactccaagttctacagttttggcactcgtactggctttcgtgctcctcagcttgcacatggcctattttgggaccttgtgatcatgtgagttaatattaataaactccccttcattcatatatatatcatatatagagtatatatctatgatatatactctatatatgatatattatatatataaagtatatatcatatattaacatatatatatatcctattagttctgtccctctagagaaccctaatacagtaattgacattcttttataaggaagagcttttcctctcccaactttatgtattcattcagtaatttgtattaatatcaaaaggacttttgaagatagtaaatacctaaataaayagaattttattcaatgagtagcaattccttactatcatttttttttaattttgaacctcttatcttcccagatttggccactgggagccctttccagctgcctcctatgtccttttgrtgtctccatgattcttagacagtctctgtatttcctgagggtgttggaaatgctctgtatcttgatggggctaggttctaagggtatacacctatataaaaacccatggaaatgtgcgttatgatttagacatttcatgtatataaattttaccagaaagagactgtaaaaaaacaatgaatcctagccaggagggtacttttaaaataatggtgtgggtgagcaattctgaagttaccttctattaattctagcttgagcagaagagtaaatatattgaaaataatgggagtcagatttctcactgcttgagaaggtaattatagatataattacagatatggaaaacagagaagcaataataaaccctgattattagattagaatccaaggtattgatataaactcatggttttttacactgaaaatagagagagagtgagtgtgtgtgtgtgtgtgtcccttcctagctctgccagctttgagggcctggacacaatacaacaatagcactgagctaccctagtacttacatcttggtttctaaataccacactccattaaaaggaagcagggctcattatagaaaagactgaactcgtggccagggcagggaaaatagaagattagcctggaatatcttgttgaacttgatgtacttttaagatttttttaatttctctcttcacagtcctttctggaggatttaattacattcattttcttctttaaactgcttactaaaactatagagagcaagactgtggaatctctgataaacatagatccggaaagtgggatataccaatatctagcagtagctttggagtaaacaataattggattgccattgtatcttttatttatttatttatttatttattcatttttatttattttttgagagatggagtctcactctgtcgcccaggctggagtacagtggtgcgatctcagcacactgcaagctctgcctcccgggttcacgccattctcctgccttagcctcccaagtagctgggactacaggcacttgccaccatgcctggctaattttttgtatttttagtagagaatgggtttcaccgtgttagccaggatagtctcaatcttctgacctcgtgatccgcccatctcggcctcctaaagtgctgggattacaggtgccattgtatcttttattgtgttctcttgcaaatattaatcttaatgttacctgaaatgtgataatatttccatttcattttgataagaatgaataatggttaagccctcttgtgtctgccccagtaccttcttcagcacctgtttggtgctggtgtccaagagaagttctcagccagggtccccagccactgctccctaacccacccatagcagcttagactgtggccccttctcactgggcagggagggaactctgggctgcgctgaggttatgctcaaccaaattcctcttcacagtacccagcttgtgtctcgttccatgtgtgaatggctgtgaaaaagcctggattcatggggtgggggctggaaggtggaattagtaccttttcaattttttttaacgttattttcaaataaaaagataataagaaaaaagaaaacagtgggccaggcacggtggctcaccccagtaatcccagcactttgggaggccgagttgggcagatcatgaggtcaggagatcgacaccatcctggctaacacagtgaaaccccatctccactaaaaatacaaaaaattagccaggcgtggtggtgggcgcctatagtcccagctacttgggaggctgaggcgggagaatggtgtgaacccaggaggcagagcttgcagtgagcccagatcgtgccactgcactccagcctggaagacagagcggcactccgtctcaaaaaaaaaaaaaacaaacaaacaaaaaaaaagaaaacagtggcaagacgtgagctctagagccagactgcctgaattcacatcccaactctactgccttatgacatttctctggcctgttttctcatttgtaaaatgggaataatattaatgcttacgtggaggataaggttttgtggggattagtgagtttcaatacacataaaattcttagcacagtacatgacatatagaaaacattgccytaactattatagctataaacgtccatgttagtttattaaataaatgctttacatgtatttaagtgagtatattaaggcttgtgtataaacttcttcttgccctgctggaagttgctatatgtacttaaaggtgtaaataaatgtttcagaacacatttttcactgctgttacattttaccaatgactttgcccatcttattatgaagttttttgttttttttagatggagtattgctctgtctcccaggctggagtgcagcggtgcaatctcggctcactacaacctccgcctcctgggttcaagcgattctcctgcctcagcctcccgagtagcagggattacaggctgggattacaggcgcccaccaccacacccagctaatttttgtatttttagtagagatgggatttcaccatgttggccaggctggtctcgaactcttgacctcaggtgatccacctgcctcagcctcccaaagtgctgggattataggcgtgagccaccatgcccagactattatgaggttttaatgcctgttctctgggtttagcagaaggaacaagttatttttcccccaaaccaatatctttctttgtccattagaacatgctttatacggcatgtggagggatgtgtgtgcctgacagtccctgaccagcacttcgtatcttgttgagttattaatgatttctctatggttatttcttttctgaaaataagtaatcaccatggcaatgctgtcacttactaatgatgcaaataagactttacgcatctctgcaaatctacttaaaaataaaatagctttaaaaaaatattgccctcacatttggatcagttactcattctatcctgttttttgtttgtttttgttgttgttgttgttttctgcctttagttttgtctgcttttgctttgtcagaacatagggcctatagaaagaaagggtaggccgggcgcagtggctcatgcctgtaatcccaacactttaggaggcctaggcaggcggatcaygaggtcaagagttcaagagcagcctgatcaacgtggtgaaactccatctccactaaaaatacaaaaattagccrggcgtggtggtgcgcacctgtaatcccagctactcaggaggctcaagcaggagaatggcgtgaacccgagagatggaggttacagtgacccgagagcatgccactgctctccagcctgggtgacagaggaagactccgtctcaaaaaaaaaaaaaaaagagaaggagggagggaggaaggaaggaaggaaggaaagcaagaaagggtagagtttaagacggtttgattctctagattgtgttactctcatttttcatttgaagaaatggaggcgctctgaggcatatttattatactgtagtctggtcaaccagaaaaacaaccacacagaaacaaggtgcccctgtcctaacagctgcacccacctaaagcccagatacccacatggccagcagcagcagcccccgtgtgtctctgcagccacatttgcctcagtttctctctgtaaagtgggtataatgcctccctcgctcatatcacaagggtaactgagaacttgcctgagagatgactttgtgtgcagggatagtgctaggcagtgctaggaggatgtgattgatcgtcatgctctggacgccgccattcctgagatgaaagttgggaaaccattctcagggaaaggcagcacccttcccagtccaggcagccctcttcacgtccacattggatactggttcctatcctctgttaccatttgtggatataaatatctatctgtcaatatgcacaattagtggaagacataggttgccaaaaaccacatttgtttagtatgaacgataaacagaacctttgggaaagttgtctattcattggttctggaaagttttccctctgtgtgcrtgaaattaagaatttggaattcacagcagcatgacagagcttacaggaagctgacgaggcccatggttgttgttttgaaggcttgcagccttaaaggtgtgcaaaattacagaggacaagaagccattttcacaactggatttgcagcatcaattattcaccatctgtttactgagagcctggtatgtgcccagcaccggtgatggctcctgccttagcaccgagtgcagctgaggagagaaaaacaacacccaagaaacagtttcagaacatttactgctctcttgactaggaatacaaaaggaagttaaaaacaaaacccacgcacacacatagagaaatgagggtcggccatcgtgggcaggaaggggatttcagaaagcctttaaatgagttatattttgcttttacataaaaaaacaaagtctgtcatatgtctagccggctagtgctgctgctgaagaagctgaacatcgtcccagagggcagcagaactctccgcatcgcacacaggcagtttccagccaggtgtgtgccagttgctgggtatatgcttgtttgctctgagccctggcatccccctccagctgacagctgctttgttgaaactgctgttaatgctgaagagggagcaaaaagaaagaagggcatcgtgaggtgtcctgcctctgcacgttgggacatggagtggttctttctgaggagccaggcccttaattcctgatgtgcttttctaaatggtcacggtaacatacttccggttaattcctgatgcgcttttctaaatggtcacggtaacatacttccggttaattcctgatgcgcttttctaaatggtcacagtaacatacttcyggttaattcctgatgcacttttctaaatggtcacagtaacatacttacggttaattcctgatgcgcttctataaatggtcacagtaacawacttccggttaattcctgatgtgcttttataaatggtcacagtaagatacttccrgttaattcctgatgcgcttttctaagtggtcacagtaacatacttccggttaattcctgatgcgcttctataaatggtcacagtaacatacttccggttaattcctgatgcgcttctataaatggtcacagtaacatacttcyggttaattcctgatgtgcttttataaatggtcacagtaagatacttccggttaattcctgatgcgcttttctaagtggtcacagtaacatacttccggttaattcctgatgcgcttctataaatggtcacagtaacatacttccggttaattcctgatgcgcttctataaatggtcacagtaacatacttccggtttagcaacataactggatgctaacataatgactacaaataatgacttacctatgttaagtacttatggacccacggtggctatgctgaatactttgcatgtatttcctagaatctttacaataacaccataaagaaagtacgaagagtgtcccattttgcagatgagggaactgacatttagagaatttagacatctgtcctacggtacacaactatcaggtggcccatacgaaattgcttttttaggtatcaaaagccagtcacttattaaaaatttcatgtagttcatgctgacaatttctggcagagccattgctaccagataactctaagtttgtgtgtatatactgatgtaaaactctccatggctccatggctgggcttttagtcagatttcaccaaattaaaaagatgaacttctacaaagttaaaaaatttttgtttgcactttcagcaaaatagctctttatgttaaactctgagacatggaatactgaagtttatgatatcattgtggttgcaacagtgttcaacttgcaggttccatgatggttgatttttgactgcttgagtgtgtttccctgcaggcctgcagggtgagctgtgaagctcacatagagacatttgagttgtattaaaatgggttagccaaggcctaatgggctgtaaaaaataatgtgctgtggtggtgtgtctgatgatttccagccctcattctttcatcattagaccagtgacaccctctaaacaaacatcttaccagtcaatggataagtggtccctgtgtccaatacataattctcatgcttaaaattaaamagttattgtaaaaacaaaatggtcactatgcctaatatatcactgttcttccttagcaattagaacctctaaaatgagtgaaattagaataaagaagaacatttctatcttgtttgcatgagcagataggtcttggacctctggaagttcagctcagtccaccagtgtttattgagcacctgcagccaggtgagaggcattctgcagaatttgtggaagaatcatacatgcttaagtgttctctgctgtgcctcagtctccctatttataaaatgaataaagacggctctgcttccaagagatttcatttgtatggcagcttaaaatcttccagagaaacatggctgccatttacattactaataaataaaattgttccctaacagaaaccagctcactcaacctgcctatatttacaattagagtsgtttgtttgtttaacagatccttaagccttacttccaggtactgttctaagcattttatgtattttttaaaaacctattacatagatattgttactattcccattttacagatgaggaaactgagacctagaaaggttagataacaggcctaaggccacaggactctgaaagtaagtgaggaagccaggttaaacccaggcagtctggttcatatcgttcctgaatgtgataaccctgcagtctgttccatcccgggcacaggcaactggctattctcactggggaagtctgttttgcaagggtccttctttgtgtgcctgaatgtgatgcattttgcacttayttcctgagaaaactattgctgtttcttaaaggttcaatggcttttttatccaatttgtgatggaattcaaaaacagaaggaaggatttttccaggaggtatctctgtttctgtaatggaatagccattagttccagtttctccccttagctagctccccccgacattctctctctctttctctctctgacacacacacacacacacacacacacacacacactccttgagtgttcggatgaggaccctgcgggccctgagttcctgcccgacagcataagaagttggcgtagagtcagccccttcccactgcctgtcagaattctacactcttccttttagttttagaaacccattcatcaaatgtgtatgattaaaaacagcagaattgctagattcccttaaagaattgggtaatttttgcaacatcatcatttctcccccaccccagcaccccaccatcagaacaaacaagcagaccttttagcttgacttttcagcactcagccatatttgcaagtaatgattactctggttaggaatttcatatattttaaatgtggtttcaaaggtctttttaaaattaattcctcctcccagccttcctctttctttttctctcccctcttccctctctccttcccgtgtgtgcctgtgcatgtgtgtatgtttatatatttaaaatgtattatttgaagacaggccatgttagattttgtcagtggcacatttccttgatggctgttttatcagcatgtttttttttaaccttccatagatatgyatctgcccccaaatagcgtttaatgaagaggtcttcgaaataaatctctgaaaacaaaagctactttattcatcatctgcatggagagcagccatggaaactcatctgtgaaatgcataattagaaaccagaggcctatgtttgtgcatttgccagagagtggggagatatcgatggtgttaataaaatcctgattttcagttccttcttctctgatcagaataagaattagattacacagaaactaaattacaagaggcagcatagagaagaaaaatgcattatttttcttattgtaatatccttcttcccatattctttttcatatcaaaacatggtgctaaagctctttaagattcatatatataagctatatatgaaaagcaagcagaattatgtggggaaaacaaatatttacttttctgtaggctaaaaatcttcatatttctattttgctggtttttattttaaaatatttaattgacaaaaatttatatattcaaggtatgcaatgtgatgatgcgatgtctgcataccttgtgtaatgattactacaatcaaattaattaacatatccatcaccactcagttatcattttttttgtgtgtgtaagtgtatgtatagtaaggacaactgacgtctgctctcatcaaatttcaagtaaacaatacaatattattaactatagtaaccatactgtgtattagatgcccagaatttattaatcttataactagaagtatgtgccctttgaccaacacctccccattcccccacccccatcccctggcaaccacctttctactctttgcttcagttagttcaactttttaaagatttctcatgtaagtgagatcatgtactattcgtctttatatgtctggcctatttcactgagcrtaatgtcttccaagttcatctatgttgttacaaatggcaggatttccttccttttgtggctgaataatagtctaatatatataatatcccattatatataatattcaaatataatccattatatatggaatacacacacatatatacttatatttacatataaacacttatatacacatatatatgtcaatttctttattcatttatcaatgatacttaggctgtttccacatattagctagtataactaatgctgcaatgaacatggggtacagatctctcttctaaatactgatttcattttctttgaatatatgcctagaaatgagattgctagatcatatggtagttctgttttcaatttatggatttatggaggaagcagcgtactattttccataatgattttttttcaggtagtttattattagtatatagaaacacaactgatatttgttgatttttgtatcctgcaactatactgaatttgtctattagttctaacagatttttggtgactctttagagttttctatatgtgagctcatattatcttcaaacagacaatttatcttcctgccatatttggatacctttgacttctttttcctgcttaattgctctggctagcacctctagtattatgttgaatagaagtggcaagagtaggcatctgtatcttttccttaatcttagaggaaaagctttcagcttttcaactttgagtgtgatgtttactgtgggcttgtcatatatggtttttattgtgtctaatttattgattgtatttatcatgaaagggttgcatgttgtcaaatcctttttctacctcttttgagatgattgcatgatttttatctgcattctgttaatgtggtgaatcacatttattgatttgtgtatgttcaaccatccttgtatcccagggagaaattccacttgatcatggtgtatggtctttttaatgtgcaactgaatttaatgtactagtattttgctgaggatttttgcatccatgttcattagaaatatttgtctgtacttttctttctttctttctttyttttgtagtacccttgcctaatttaggaatgagataatgcttgtctcataaaatgagtttggaagtgctccttcctctttaaatttttgggatagtttgagaagggttgttgttaattcttccttaaatttttggtagctatgtttctgttttaaagactgttgacacttaggattggctttttggtgtactaaagtccttgtaatcctgatatgctaaaccacattacttagaagactgattataatatattctctataacctaccaaggttgaggaatgggattatcaaaatgtgtggctaatggaagctatatgacttaataatatgaataatctcccgataagtaagagaactaaatgcttttattataaaaactgtagcagtatttagtcagtacattaatatctggcaacccttaaagatgtactgtcacttactgggttgctctttgacctttgtcaattcatttaacctttttgggcctaattttcttcatctataaaatggaaacaaaatcatttctccttcataaaggtggtattaaggaatatgtaaaacagtaaatgtcaaaatatcctatacatatgtgagattattttttattatcttgctatgtttgaagtgttagagtcaccgttcatagaayttcagattaatagaatcataacaacaggatttattttaattgagattttaggttagtgaggaaaaggtgggatcataagctaatagacatctatacatgaaatactgttttcaaaaatgtaaggtttgcaaataattgatttggcttagaaaatccacrttgctcaacccataattacaagttttcattcatcttgctttagaagccatctttccaccacagcatatttcatgctgtgtttctggcaaagttttcatgactcaatttggagacatagattttcttacttgaagattcacacagcccattagtattttaaagattctgagaatcttatgaaagaaacctgaaacgaatatttccctaacttacttgacatgaaaaatccttttaaagagagcatctgttaacattctttgggtcaaatatcccatactaccttaagttcatgagctccgggggtggactgcccttgttcagatctccattgtgtgaccttgggatcataactctctaaacctcaacactctcatctgtaaaagggggacaatgatatttatctcataaggttgttaaataaggtaatatatcttttaatacgtgttgtttaatgggatagtgtatgtaaattatgaaacaacatattttaagataggtaaaaccctgactgtggtgggaatgggaggtgggagaaggctggaatcactcatgggctagtggtcctttctggcctttaactccccartgaaggtgacagctaggcctcttcataatcgagtttccccttactgtaaaacatgggtccttgttctaccccaaggcagccatattccctcctcttcttagtatctgaacttagggtcacctattcaaatgtgcacatgggccaagcaggggatgcaaacatgttaaggggcccagggtgaagggcgggggaagtggtgtgggcgtgggcagcagggcattgccagcctcttctcctcgggaccaygctgtggcctcctggaagcccaaggccaatctgccttgacttttattttttaaaaagataagttagaaatctggaaggtgttaacattcctgatttttctgtagacaaattgttcagattaaaacacaaagcagcacactgtttggcccatgagctgttggttttgcagtgtctgcatataaaagcaaagtcctagggacctctgctaatgggcttctggtggctgccctctccctcccctgccagcttgctcaccttttcgcttttctttgacctctgcccttttcccttgctaagaagaaagaaaacccatgtcttctgttcaaccaatgggttccactggttctgcctactgggcctctgtttccatcataggactctttctccaagtgcttcctaaccagtaatcaccgtttatttgattgtccaccaggctccagacttgctaggttctttcgcgtgcagttctttgtggggatccaactgcctcatctgtgatccccgggcaacctggcattacagccttcagttctgtttttcatcctaaggccacgcctgcctgtctttctacacctttgtctatattcwcatcatcgccataggcaatcagctctttggggccattttcgaggaattaatactgtatgagagggagccattcctaatagtctttcttgacagttttagrttagtctttactaygttgctaattcagacttaaagagacaactggccctccatgtcccagctccacggtgatgggtgtgtttctcagyttctcaaggaactgcatctctgatacctttataatcccaaggcctgtcacacagcctggtccatagggaggaggtggtaaaaagccaagagctagagccagctccccccgtcctaggtcccccaaccccagttcggctgcttcctaacttaaccctgggcaaatttcttagcctcactgtgcctcagtctcctcagctgtgatgaggggttggtgtgaggattaacagaaagccccaagacagcmcttggcaggtagmtagagctgcataaatattgatccttagtggtaaaattagtattcatgtggcaggattgcagtacatgcttatcagaggacagagctcagaaaactagtttgtctttggcagtaatcttctcttgaacaatgtaagaatcatcttttattttgaagacagcaagaaccctgcagcttcgctttggcagtaccatgtttttcagagcctgctcgatttgtacactgagtgcggctacctctgcagatgtgctgtaatgcagcaggctcactgcagtgattccttaagtgttagacgaagcacattgcaacctgccatatctgggaacaccagtggtatcctgctaagagtctggttgctgagattggacagagataagcagcaaaatgctttatgaaaataagtgctgaatatataaccttttggtaaatcwtttccaagtagatattttatttttctctattttatggataagtatgtgtcaactagctgtttgtgcatagatacagagcacattaaaaaattgaatattccatacatataaatgagctgctatatcctagtgattagaagcataaacttggatgccaagcagagagcgtttccatccgcagccccaccctgcatagctatgagactgcacagtcacttaactgcaagttacggtttctccatctataaattgggaaaccaatatagtacttcactcctaaggtggtttttgaagattaaatatcaaaatgtatgtaaggttctcagttcagtacctgacatactctaagtgctcagtaatgttagataatgtatttaaagttggtggtgctactggactggatctcagtgcaggcaaatgtgatagtgaagaatgatgcatagatgaccagtggccttttatagagcgagataaacacattgcatgaggctggtagcagtgtttccccatgcaccgtatgtgtccaagttctctgtggarctttcagaggagactgatgcccagcactattcctggagatgtagattcacttgcatagagtctcaggcacccagccagcccggttgagagcccttcagctctggcacagtgctccacagttactgaggtcatagctaccagctgtaccttggtgtcrtctagcacagaggtgttcgttgtttgatgagggacaggctgggaatgtgagcattcattcagatccatccccatctctgagaaaaatattcccagcatagcatctgttgatgtggatttgagtaggaaatgggcctcatgcactattcacattcatcttttacccctcaatcccatatgtgcagtcctcatcccagtagactttatattagtcagtggaagtacagctttgtacattgtactgaagctggccagcactttaattttttgagggaagagatattttgctccatttttgcatttggcctatcatgtcttatgttataaacatttttaggcytttccctttctctaaatttcaaactcctcttgaagaatacctacatcttacttattttaaatttcctaacagctcattgctttgcacattgtaagcttagagtgaaattcctggaaaatgaattaaccatgagaaattactaagcagtcatggagatgagctgtgaaaatgtattctggtgatatggtgtaaattatgcatatcaatcacatataaaaaacacacagatcaaagaaaataagtataagtgcaacattacactttcacaatcaacccagacttctgtttattggacctttggggatggatgagggaatcttttggtgttaatgccattgaatcttagataagaaaaccytaccatttcatcttttttgacaaagttataaattaatttcctggaacttagagaaaagaataccatacttaaatgaagtttaggtgtctgaaagtcacactaaggccaagtaacagcaggaacaagggaaaacactagaaccgagtggtccaagacaaggtggtcagctttctgtatttgagagttgattgaatatgagaagaaatcttacgtcccctccgcaacttacatcagcttctctgagcacagctgtgaccactctgttggattctgtggggaagatcacagaaacacaagacgtgacttctgctctcacgaggtttgcctctggcctgaacgcctcctcgagatatgggcgatccaggtgcctgctggcatgtccactcggatgacctgttgtgtttcacattcgacataaaactcattcatctataccatggcatgtggagcttgaaggaacctcagctttatytcccagggtttgctgatggaaatgctgacccatttcttctcgccccgaggatcctttcccttcccactcctgccattatacaatcatcaactcacatagcccctcactctgtgatcctcccaacagatcatgattgcgctttggattcccatagtactgtgtttgtacttcattccttaaattagtgtaaccartgtttaaattaaatatttaaattaatttaacccatacttacttccccatcactttgtaaatttcttgtggaaaaagagtatcttactaatcttgtgtgcctttcatgtttcttcgcacatagctttctatacatatttgttgaattaatgagtcaagagaaaaggaagactgtctaagatgggtcrattgatgccaaagtgtttgcagacaatacattttgtagatgctcatatttttatatggctgctctagccttttaaaatatgccatatttggctgagcgcggtggctcacgcctgtaatcccagcactttgggaggccaaggtgggaagactgcttgagctcaggagtttgagaccagcctgggcaacatgggaaaactccatctctacaaaaaaatacaaaaattagccacacatagtggtatatgcttttagtcccagctacttgggaggctgaggtcagggaatcacttgagcccaggaggttgaggctacagtgagccgtgatcacgccactatactccagcctgtgtgacagagcgagaccttgtctccaaaaaaaaaaaacagaaaagaaaaacaaaacaacaacaacaaaaaacaaacctgccatatttactttgactggttcaaatctttaagagacacagcctctactatcacttgtaatattttaaatcccttgaaaacagtggtgtgatcttacagtagaaaattcaccaacctgccaaccctgaaatagactgagcctctaccccagactctttctttgtttattggatttatctagtgcctttgctttagagctgagaggacatatgctaggcacctggagagatcccrtatttcaaaacaaccgatagccagtaagaatggggaaggcagcagacaccgtctctgatgttgatataccctgctttgtctcccctcgctttcccttagcaaagaaatgtttcatattcgcagcacagtcagtactccttgcctgccacgaggcccagagcgagaaaagcccagaaaggaggacctagcaggtacccaggcctcttgaagtcacagctggtggcatgagggaccaaccatccatcacactgggccacacagcgcctggtcacaacctgcttgcagcccagcctcttaaggcgatcggcgcttcttctctctctgcctcatctcacaaatcttccctctggccctcaccctcctcccatctctgctttctgccttatctccttgtcacagtactagaaagggtgagccgaccaaagccgtcctgagcaatgccgtgcttctggttcattagcagcacacagaacaagtgaggaggggtggacagaacagacaggatcctgccgaccgtgagtgagtaacaggcgtatccatgcaaggttttccagctcacgcaaagccgtgtctcttggaaggttacccctatggctcctccatgaaggaactgcacctcccgcccccmccggcctctgctggygcctttccaaacacagaggtgcacggccgtacccagtaaacagttatcttcacagtgcaggggcaaagtgatacctgtaagagaaggtgcagcaagagaacatgttgcagagaaacacctccaactgaaatgatgagccagtgggtgtctttttatgcccatcgtcttccacctccctctccacaaaaataaataaattaaagaaattcagcacctgtggacaactctgccaaaaggaagttacctcctgtgtggtttgtcacattcaggttcttcacactttccgtgggaacaaaggctgtctccatattacctgtcaagtaaggacaatggtgaggctccgcaaaccactttgaatccttgggttatttggggaggaagttattgaaaaaaatagcccataggaaaatgtttsattcgattttattcaggctcaggcgaattttttatggcatttcggggcagtggagaagccatggggacaggaagatggtcggagagtcctgtgccagtcagaatgtagggctgtrttttctggctcattgctattgttcaaacacaattaatgatggccccacagggtagcaggtggctgaacacacagcagctaaatccctggctaagggtctgtggaaggagtgtttccacktggcaggcatggggacaggcacctscagtcctgttccatactccttcacccttcctgacattgattcccaggtccctcacctagttggsagttctcttctgacatcgctgagtattttttgggtggaagggaaagaaacttgagggcatgtaggcctaggatcttttctttgcagggatggggacccttcagtgtagggcatagtacttggagagtgttttcttgttgagtatcacaagaggagagggagctggtacctttgaagttcccctcgatgagcagaggattygtgcctgaagcacctttgtcattccctgagcaacttatcaacacccttgttccttcagttctttgtttaaatttatgttgtgaattggtttttctgtgttttctttctgtactttattagaatctggtgcgataacagggataaagaccacagacttcttgataaatttgtttctcccttccttctttgccgcatcagtgaggtcgaggcaggagacagaaaccatgccatttgtttggtttttaatacagagaatttaaactaaagaaatgttagcctttgagggaggtaattaagaagtcaagaggagaacgtggaggttatcatggaggtagatggcagaaagcagctccccaccctggggctgagggaacaatcgaagaggctggaattaatgaaacttaaaacctcagtggagggtccttcagagctaaggcccagacccctgaagaggaggacaagccaagcaggtgtctctgagctcagaggagggacccgtggggctgggacccacctccaaggacaggggctgtgctggcatctctgaggagggsttcgatgaggccgatgctgtgatgttgggaaaactgtgatgtgaatgaagcctctgctcctggttgccagtgtataggagccgtgttgctgagcccctgacaggaatagaaagctggcagaatggagccagccctttctcctctgtccggccggcagccttcctccagggccaactggaggatcctcctggggagctgctggcctagctgaagggcagtttgcagagtccaacccagtctcccaccgtagagtgcaggaagggggtttggagctgagaggscacagcttaattactgctttattagcccaagagcaaagccgaaggtcctttctgtcttgtagctttgagccctgcactttttcttcttgtttcttcctctctagctctgagtttgaccctttagctcttcagagaaaaagtctaaaagaccctcagcatttccaagtgtccattttataatcccttcataccttgtgcctaggaggtctaccccttaatcctttgatgtgtacctaaggggaaatgacgcctcagctgaaccgccaatcatgtgctctttctgataggttttcgcttctgtcggcattctctgatggcccttctccccatttcctgtgtccctggtaccacagccagatcaaggctggtgaaaccagaaatcatgaaagagagccacagactttctcattcaagtccgcaaatgttggttatttccactgtgcgccaggcactatggttaatagaacgagggagaaaatgtgatccctgcccctaacacttgccaccaagtgacacaaacagaaatgtaaactcttccccaggttacagactgggatggtcattgccacagcttgaggaggtgggagaagcagatggatctgaactaaattgtggttggccatgaatggaacagcagtaaaatagtaaacatgtatatgtttacgatacgcttaccaacgctgacacctttaatccccactggcaacaccatgacagacgactggaatcatccctctttttgtagatgggagattgggcgattraggaaacgcccaaggtcacaaaaactagcaagtagcagagctgagttgtagcggctgagtgacctcccccttagacctcatttgaagatgagataaagtaacagtgcctggcaagagaaagggggtagttaattataccttacctagtatggagttttgtaatttataagggttttaaatatgttaccccatttaattttcataataattcaatgaggtaaggatattagtcttattctgtaggagtctactgaagctaaaataggaatagagatggtccctaagagataggagaggtgccgccaccgttatacattcagcatattcagggaggccgtcaggaagaggagatgctttgttggtgtgctgtgattgatggctgaacaggagatttgggagtcacacgcacctctgctttgatcccagctctcctctcgctcattaaccgtgcacccctgagtgcagttgcttctgcaccscctttccccgtccacaaaatctggacaacaccatctgccttgctccattgtgagaatgggtaagtgaaagttgaaaacctttttgtcatatgtaggtaccagcatatgtgatagtttttggagaaagaagacatccctaaatttggtttcctgactagtgctgtgtatggaaccattattcattttgcataagggaaattaatcattaaagggcttrgaattttagctcttaattgatgattttgcttgttcatagcctcagcgacattgcataggatttatttgatggaacactaaaaagctacttttccagattccaaatagttaatattcttaaaccagcaagaagcccacggtcattttgagaaacaggaatagtgatttgggtggaggtgagatgtgagataccctgcaagtcggatgtgaatgcccctgccaggttctcttctggcctctagtaaccagtggaatccaaaatttgggttgcacttggtcttttcagtttacaatgtaggaaggacaaactcacttataatctttgttaggtttcccctgcctaacttggttaaatccagcatgtctcagaggtacttracaatggcccagggttttcacagtccccctcgtgacaccctgtgggatagttttggtcaggtgacartgtgtgaggtgctgagcacccgcttttgcagatgaggaaacctggatgcagaaagctggcagtttgtgcctggtcagggagaagaaggcctggcgctggcactgctgccctggacggaaagcagctgctccagaaagcactcagtaccttcttcttctccmtrctaagtttggcatttgacccaacagatggccaaaaacttgtaaatattcacccatgttttgttatttgaatggactgatcttactgagacttttgcttgctggatggaaggtgtggctgtctttgggaaggggagagtgacctgaccccttgaggactttgggccatgtttgccaagacagctgggtctgcttctgctcctggtgcacagtgccacattttgcacttgacacctctaaaattccctttcccctctggcctatgagctcttgggaagcagggaggaagtctgagtggctgaagcagccattgcaggcaagacacagagcggcgcctgatgttcttttctctggtctgatgtttgagttctgcaggccaccgcctgagctcagagccggccatttctccagcagcactccaaactcacagcactctgctaaccaaggcattgcagsgrcccgctgtgaactttggcgtaggctttgttggactcatttgaatttggcccaaaagaaaataacatttcacatttctccctaacgtggagaaattgaactcattgtcttttttgttgaagtctactctaatattaacaggtggaattttattttaaatatagaaaagccaatttttaaaaacatacaaatgcataaaccgtagccaatatttccttccattacataatttctctagctaatgactaacattgatatcctttttcctttaattttcttttttatctagtacttgatatttagaaaatatatgctctgttgaaattatgcagcataataatacagtagctacccatgaagccgccaccggacctgtgatcaatctcaccagtcccttgggtcaccaagagttttcttccccatcctgtctccctgccacccctttccttgcccagagcaactatgatgttttctcttaaaaatttaggtgaaagatggggcaaggaggctcatgcctgtaatcctagcacttcgggaggccaaggtgggaggattgcttgaggccaaaagttcaagatgaggctagacagcatagtgagaccccgtctctgcaaaaaaaaaattagtcaggcatggtggtacctgcctgtagttcccgctactctggaggctgaggctgtaggatcacttgagcccagcaggtcaaggctgcagtgagctatgaatgtaccactgcactccagcccaggcaacagagggagaccttgtctccaaaatcaatcaataaataaatgagtaagtaagtatgtaagtaaataaataagtggtcatgtttagcttttttgtcttctctccatttctaccctgtaattgagagttgatgttagactaytttctggaagtatcaatcaataaatgttttcagaagtaatcaactcagcataaccactttccctgggtatttctgtcaccaaaaggggtacaaaacaatgcttccaacacaggcataaggtgaatgtctactggggggctggggtcactgcagagaaaaaacagaaacagtgttaattctttagcactatggaggtcaggaagaaatcgaaaacatgtagtatcaaagcatctggccccaaaggaccmctagaccaggacatgggggtaggggtagggtgaggaagaaaggaggaaggtcagattcaagggggtccagtctgtaaaaggccttccttctgtgagatttggatgtttgacatttgctccaattttgaacaagccactggaaatcacgtcttaagttctttgggttcatttcaatttgctccttttcctctgtacactggaacagtcagaaggccagctttgcgtggattcaggcaaattcaagtgacttcgctagctgggcctcagttttaccttgcagcatatagagtccctatcagaatgggggccttgcagagactgagatgatgtgaaattaacaagaaactgtgagccagctctgagagttcatcctctaagtatatttgaggttaaattcaaggttaggggttcgcagacctagcttctcattatgtgtgttttcacctagcatctccactcattttaaatgaggcagatggaaggcttatatctgtctcacagtaagcatgattaactgggagaaattataaccaaaaccatacgtgagttcacttaaagtacatgatggcacaagaccatgacgatacagaaaagaaatgcwatggaagatctacacagatgggcaaacctcctgcaaatattttacgtctgagaggaaaaatagagtgtgacrgtaatgccgcctccagaaagactagttatttaaccgaaaaaaatgaacgtaaaagattaagtgtttggtaagttctgaagatgagatagagacagaatagaaaagagaagttctctgtatttcttctgtcaatatatttattcattttttgttttcatgaaaacgtttgcaagattaatttacctgctatrcaattcacccatttaaggtctgtaattcagtggtgttttttagtatattcacagatatgtgatctccacagtcaattttagaacattttcatcaccccagaagatactgtacttttggcatttttattctgtataaaatacctggccagatgttcaaaggcagtgaaatattatgaactctgggctgaggccgccacctcctctgcaagcccttccttaaccagaggcacatgtgatattttatttaacaaagatttctcaggcttgcttctttttttttttttgtgaaaaagcattaagttcaggcaggggcattgaaaccttgcttcagaccctaagtccccatgaagattttggagccacatgcaatgcaaatgggctcttactcccctgtctaactaaagtagcacactgtagctccattttccaaatacatgatctgtttaagtaaagcattctagagctgtaaggcaaatatgaaaggattcaaaaagacttgaaaatccrtttctgtcctcaaggaattcactagatagttgggggaccatgatattgaaacatcaaaagttaattgaatacaaggttaccagaatgattgttccatatgatttcattatggaaatacttacagaaattctgtcaaaagttaggtacaaatatgggaaacattacaatttagagggatgtttagaacttgatgagtctcgtgtggtttcttaatgaagtaacagaacaaaagttgcctgagtaggaactgtgcctaactctggccaacacagtatgctcctggtactcagtgaaagtaagaataaaaacaaaaattggaacaaagtgagaaaatctgtaaatatcaaagcagcatgaaatcataagttaaaacaacctgaattcataaagtaccaaactcaccagccaaatttgataagcagtttttattacaaaatgaatagatggaattaaaagtaagggccatcaaacatttcgatggaaaacaaagtaactgatagtgcatgctattttttataggtaaagctgatttttaagtgaatttagataagaacacgatcgcatgggctataaacagactggaagtgcttatgactcaagataattaatctaaaagctaaattaatcattcgaaaaggaaatgtcatggaaggcaccatagggataaatgttggatttggtgttatttacataattgttaattaggctgaatagactacttctggaaacagtagtagaaacttggactaaatgtttgtgtccctcccaaattcgtactttgagatccaaccactagggtattaggaagtggagctttagaggggtaattagttcatgagggtagatctctcaggaatgggattagtgccattagaggaagagacagcagaacttgcagctctctctttctctccccctgccatgtgaagattcagcaagaaagccgccatctctaaaccaggaagagggccttcaagcacccaaccatgctggcaccctgtggcctccagaacagtgagaagtaaatgtttgttgttcaagccaccgagtctgtggtatttttgttacagcagcccaagctacatcagagcccttagttttaaatgggaggccttggggccgggctcggtggttcacgcctgtaatcccagcactttgggaggccaaggcaggtggatcacccaaggtcgggagttcgagaccagcctgaccaacatggagaaaccctgtctctactaaaaatacaaaaaaattagccaggcatggtggcgggcgcctgtaatcccagctactcaggagcctgaggcaggagaatcacttgaacttgggaggcagaggttgcggtgagccaagatcacaccattgcactccagcctgggcaacgagagtgaaactccatcacaaaaaaaaaaaaaaaaaaaaaaaaaaagacgagagtggggaggcctcaaagtacaggggttaacagcatagcctggccttagtagacctgcatttgaccttggctctgccacttactggctgttggaccttagacagcttagttaaggtctctaagtctcagtgtcctcgtggacacatggattggtaatggtggctatctcgtggagttgtgctgtgtgttaatgagataatacacatgaagtggctggcacagtctctggcacacagcaccccacaaacggtgaccattggtaatcatataatcacaatcaaaatcaggggacgtgtgctctgatctagaaagagaacaagtgccataaaagctgcaaagtggtcctttaactaaacgtggccatggttagaagctgactcaaagtcaccttgacaatgccataactgtggagaacttgtggagaaaacagagaccctctcctgtttgacatgcattccaaataatttctgagctgagaaagaaaaccaaaaaacacagtaacttagcctaaagggaaggaaaccagagaatgacttaataatgattgactagcctggaaaaatttgcaagtggagaatgatagtgctaccctgtttcagtaacattaaaaaggagaagagttttaaggtaaggggaatattttgatgcagaaagaaactttactgaaataagggtgctgcagtactgggttgaattaacaactgacaatgctttcttgagaattattagctttcttgagaatgtttatgaacagattcatgggagctgaagaatttttattcagtcatggaacgataaaaggaaacctccagccgggtgcagtggctccacctgtaatcccagcactttgggaggctgaggtgggtggatcacgaggacaagagattgagaccatcctggccaacatggtaaaaccccrtctctactaaaaatagaaaaattagctgggcgtggtggtggccacctgcagtcccagctacttgggaggctgaggcaggagaatcacttggacccaggaggcagaggttgcagtgagccgagatcatgccactgcactccagtctggcaatagagtgagactccgtctcaaaaaaaaaaaaaaaaaaaaaaaaagggaacctcccaggattttaaccttggaaggtgcatggagacatttatatttcatatacgggggctaggcccggagcaggggccagttaggatggggtagcattgttaaaccagaatcccactttttacccctcccctcctcagtcccttttggcacgcttataatttataaccgggtcatggacaaccgtcaaacttgtgtatctgttgaactctccaaatcagtgttttgtctagaacactatgacgtctgggctttgtgaatattatttcatgtcatcttcaccacagtatgctgtctccattttatagatgaagaaactgaggcatattggcctcagtcatgtgtcaagcccacggcacaccagtcagggccaaggcctgaccgatttcggctrgtaaagatacaaggggccactctgttttttattgtgttattttttgacacagggtctcactctgttacctaggctgtagtgcagtggtgcgatctcagctcactgcaacctctgcttcctgggctcaaataatcttccaacctcagcctcccaagaagctgggactacaggcatggaccaccaagcccagctaatttttgtatttttttgttaaaatggttttcgccacgttggccaggctaggagcctctgtagatttagacagcttgttacttacataaatgcagaaggaagagtagccaaagttgcaagctcccacccatcacaaaaggagggtcctgaaacaaagggcgggtatgttagtttagtagggcggtcataaacaggtaccacagccagcgtggcttcaacagcagaaacttattgtctctcagttctggaggctggaagtcttaagaccaaggtgttggcagggttgattccttctgaggatctgttttgtgcctccttcacctccagtggtttgctggcacrctttggcattcctgggcttgcaggagcgttatcccascctctggcttcatctgcaggtggtgtgctccctgtgtgcatgcctgtgttcagacctccccagtttgattaggataccagtcatattgcattagggtccactccaatgatttcattttaaatgtattacctccgtaaagatcctgtctttaagtaagctcgtattctgaggtactggggtttaggactcccacattatctttttttgggaggggaacacaagtcaatccataacagagccrgtgattacaatgccagctgtgacatagcccattgcagagaagccagttaaaggctgcagctcagaggttttatattctatggtacyattccaaggagggaagccagagagcctcacaccccttcagaacctgggaggtgaggagaaactgcctcatgacagcctcccagggaagtagggaggtggrtaggagatggctcctagcagctccttaaaggcctggaacaccagaggatcacaagactttatcctttcaagacacagatgagctgcggttcaagtctttgcttggtggcttatgcggatatgtgcgaggttgccagggggccctgacagagccgttcctctgtcatygctcgtaggatggggcagattctgagccaggtctgccacactcccatctacactccttgaggcttgctgtttccctggacaccaattcttatgtcgactggttgctgacattttgttgatgtcttggagtcacaggtcagtttcccccccagaaagcaaactctgaggcagagatgaacatgccagaaagctcattagcaggtgctcgcaggttcaacacctgtggaaaggcaggggtggcagcaggaatgggcaggggaggaggtgggctgccgtgcactcactaccaggccctcggcggaccccaggcgtctctgaaaccacagaactgtgagctgcaggcaggggtttctcttctagcccataaaargcagactttttaaatttaaataaacatgctgcattgaaagtagttaccacaagacaaacaatgattgcctttatgtatgattttatcataaagtatatattcttaacaatatcgaggtatacacagtatatgtacatacatgtatatatcatgttagtaaagtatgattttttgtattttttaactcccttaagtcggtcgtctcagctgtctgtatttgaactgcatgacacacttttgagtctgggtcatagaccagatccttattccggtcattgaatgactttattgggtttgtaaatcctaaaagttctacatgaaaatctgtatttaagaagatatatacatttctggaacaagaatttgaatctgttttcatatcctcggggagacctttgtcctcctccctgacaaagttaagaaccattgtgtgaggaaacagagtcatgtcgtggctgctttgtaggctgcactttgcctgctccaaacacacagcagtgacagatcaaaatctaaaaagcgaaaatgaaaaagtcataatcrtgccccctactcccctaaaaaagatayatcactacagaccagagacaaacgcaaagcagagtgtgaaaccagacactgtgggctkcaggatcgctagccgggaggtggaaacagaggcttagctctggtggcagtaagactaaatgtgccaggccagagcatgtactctgcttgaaagcrggcagggtagtggtcctgtcctctgatctagaagggaggcccgaatcactgcctgccctaacctctagcctatagaaagctttgatcctgggaagagcacaggacagagacaaggcctccttctcaggaactgagctaagcaccccatgtcatcatcagccgtatcaccattgggcaagaacccagaccaccaagtcaactccattctgtgtgaggggttcgascagaggaaccakaaaaacctctgagcagggagggtgatcagcaagagaacattcacaattatctcccatgcaggccaagcctgcccacccaaattccatgccacgtgaggaactctgaccttggggtgtcagccatccaaatcagcaatcagaatgtgaattcactggagactaaagtaaaataaaaaagctatcttggaaaaaaaaaatgcctgatgccctcaaagagaccattggagaaataataaccattaaacaaaaaaggaaaattctgaataagaggcaaaaactggcagaaatgaagggtaagtagataaggaaaaaaattagaatctcagaaatgagtgatagattcattaaaataaagaaggaaaagcagatgagactactagactcagttgacaggagaattagtagttaagacgctgttactgaagaattcacccagaatgcagcacagacacacacagaataaaacctaaactaggtcagttaagaggagaggaagatagattcagaagctccgcagtatggattattgcagttccaggagagaatgaaaggaatggcagagaagtagggctggaatttttcagaattggaacaagacgtgaaccctctgattgagagcgctstcagagtactgagcagaataaataaagataaatgcagacccagcctcatcagagtcaaattgcagagccttggggataaagctacaccgcttccaaactgcctggaaggaaagatagattacctgtgaagaagtagcactgactgacagcagactcgtcaccattgctaataggcggcagggaagttgtcagagtgcttggggaagacaaacatgaagctagaattttgtgtcctaccaaattattaaagtgtgaggggtttcagacatgtaaataccgagagagtttgcctcctgtggactttcactgccaaaaaaaactgttgaatgatacttatctgagagagcagaagtgaaaaagaaggaaaggtgttgggactaggaaaggcctaagattttacctcacttgcaggttaacaaggtaccgctgcactttcatagatgcaggcagaaaggcaagagactcctgcctcaaagaccaaggactttgttactcagcacagaggtggcgtgagttctcttagcattggctcttctagtcccccagttcaatagcggggaggtggagcagctctggatgctgtacacacactgggctggagcacagctgaaaaccctcaagcttgggcaccttccagtatttcatttgtccatttgcgtgtgtttgtttttagcccagtcttttaaaggggctattagtaaacctgcccagtctttgtccctgaggaagacattatgtttatcattctggtgagggaacaaaccagctttctgctccagagggagagactaaccatcttccagtgctatttggtgtrcaagccaccacaagttttaygaaaactccatagagcactgtcccccaacaaagaggtggaaaacaagaaaaaatayggaatttaaaaatatttttaacttaaaattagctgttgagttaatttattgttttacctgtgattttgtttagaagatgaaactctagacaagaataaccaggaaggagggctgctagggaaaatgaagcttcctgtcttttttagtagctgaatagagacactaaataactttgtgcttggaacaatttattaaagrataatatgtatgtgtgtgtgtgtgtgtgtgtgtgtgtgtgtgtgtgtgtgtgtgtatttcttaaagaagagaaatacaatttactccttacaccagggggaaaatattagaatattttgaaaatcaagcaatccaataggcacagaaaaggagaaaatttatgaaaagaggaagactggttagcagaaaacacaaatgaagatggtataaataaaatatattgataatcacagtgaatataaatagattaaagtgacctgttaaaaatctgaagccattcagtcatcatgaccttgttccaccatctcaagcaggaaggaagggtggaaaagctgtccccactgaggtctgatgttttagtctccacagaattgccacaacatctcattggtgaaactgaggtcatgccccctcctcgcctggccaatggtgtaaataaccatgacgcgtttatactagtcttgattaacaagtcatgactttcattccctgggactgaggagggacctttcccagagatcaagtgggagattttattatctttttattagaaagtgatagatcaagaaaatcagcagataaaagaaaggatatagaagattagaataatacaataaagaattgtgaccacaccagaatgagaggtcatatacctttcaaacaccccaagaacattgattatattgctactttttacttgggcatgtattttttttttttttttagtttccaaatatatgaattttatgacttttaacaaatatctttttatcgtgaacttcaaatttaattgcattgatgtcggaaaacgtagtattactcattcttggaactttgttgtaacttgctttttaacctcaaatataaggatatcgtttcaagaccattggaaatagctgcagtgtgataaatgtaagggtaagaagagagtgttacaggagtgtttaccatcagtttgcgcatgtccaagtcacatgcctggtaggaaaactttaaatttgggatcacacatttttgcctatgccatttctattcattaggttcatagctgtttcttgtttastgccttggttagacctgtgatgagacagagcactgctgatggtgggtacctagtcatcagtttaagttttctgttttgagtgaaatatccatttaatcaaagtttccaagttcattcttactaaatggttcaaaatattcacctatgacttctaaagtctctactgtatctgtagttttttttgagtattaaatcgtttattgattacacatgataatgaatgatacacaaacttcatttccatctataattttatctggttccagattcaatttagatatattgcataggatgggccaacaatcatttttataaccaataattccatgattttgcttgggtaatcccttttaatggtgaacttcagatcgcaacagtaaccatcagttcacctacaccaaggtttctgaagacaatggcttctccacccaagcaggttgtatataaactccaaaaagaacctggcatcaccctgaaggaattctaacttcacactcttggggaaaatttaccaagatggcttcagagcagactaactttatacagcacattaaaaaaaaaagacatttattcagtatcacaatcagactattacatttagcaatcaacagcatgggtgccaaaaaaaaaaatctgtattaaaaccctttgttggaatgctttacactttccacagaacagaaactaaaataacctgttgtacagttagtcacaaatacagtcctcagttttttgcccatacacatgagtatttgtctaaaatatgtcttctttgtagcagctaggccctgccaccactgtgcttggctgagttcacaaatccgttgtaacctgtagcttccctgacacttctctggctctcctctccggctaagctttgtttcctaattaaaatcttctgccactgccttagctactgctgctactggaaccgccctagccaccttggtttcatggtttggcaaagtattggcctctaccaccatagggaccagagcttctgcctccaaagtttcctcccttcatgggtccaaaatttgaagactgattgttgtaattgccaaaatcattgtagcttccaccacctccaaaatagcttccatcattaccaaatccattatagccatccgccctgccaccatatccaccaccatcatggctgccaccaaagccaccatgaccactgaagtttcctccatgaccaaagttgtcattcccactgaaaccacctccacgaccaccaccaaagtttccagaaccacttcacctctttggctgaaagaagcactcaccatctcttgctttgacagggctttcctaacttcacagttgtggccattcacaggatggcatttctgaatgacagtcttatccacggagtcatggtcgtcaaaagttacaaaggcaaagccccttttcttgccactgcctcggtcagtcatgatttcagtcacttcagtttttccaaactgttcaaaataatctcttcaaaataatctcttaggtgatgttcttcagtgtctttaatgccaccaacaaatgcctttttcacagttaagtgggcatctggtgtttgagaatcttctcttgagacagctctctttggttccacaactcttccatccaccttgtgtggccttgcattcgtggctgcttccacctcctccgcagtggcatagtgacaaacccaaagcccctggagcaattggtgtttgggtctctcattaccacacagtccaggagcattccccattgctcagaatggctcctcaggctctcattggttgtttcaaagctcaaccctccaatgaagagcttcctcagctattcgggctctttaggagactctgacttagacaggacggcagggagaagagagactttaatgatgttttttcagcagcatccacgagcagaaagtagcaagctgacgaatcgtatctgtagttttgatgcccttttcaattctttttaaaaaaaaaaaaaaagaattataaagaggatcaacaaaagaacacatcaatgcagtcagctctctgtatataggggtttcacatctgtggattcagccaattgtagtcaaaaatatttgggggaaaaacaatttaaaaatacaacaataaaacataataaaaattttaaaatacaatataacagctacttacataacatttacattgtattaggtattatgagtaatctagatgtgcataggttatatgcaaatactacaccattttatataagggacctgaggattttggtagctgtgggggccctggaatcaatccccctcagatactgagggacgactatatgcagttatctgataaaactagtraaatagtcatccttctgttaagaaaagaaataagaaaacatgaataatattgtacgtaatcgaaggtccctttggattctaaaattccacaattctatggttgtgggttatcaagtgcccaccaggtggctttgcctgtccagcttcagcctctctgccattccacgtgrttgctaaaccctaggacaatccagggatggaggcaacgctctgtgtcccaccgacgtggtatgtccactagctcacgcagttagaagagaaaacacagctgaatgcactgactgtactgtagtcattgctcacagcasgtggctctgtaatgtgctcctctaggctctagaatacctgcaatgtaacagggactgtgcacagtaaggagattccagaggtggagacagagatgcacaccccaccctcaaaaatggcagtctctcaggaagacagccatgaagtaagtaagtacacaaacagtgaggatgaaaagtactgtgcaagagaaggatagggtgcagtaatgggattgatggagtctgtgaggataccaagtgaacagggtggctgagggccagaagtgaggtagggagggtgggaaattttatatggagaaagccacttagtgtgtttaagaaacccagtaggctgggctggcctgaacctacagaacrtcggaaagaggtagaagcttttaggaattggaggctttctcctggggcagtggggagccacaggatggtttttaccaccaccgctggttaagcacctaaaagaaagcccacatctcagtaaccatgatctgtagttagcctcttatttcccaacaaaatcgtatgtctcccattcaaaaaaacaaaggccactagtagatatcccatgtccgatacctacctattagtggattaaatgctttcttttccgttaaaccattaaactttttatattttttagcttgaaataggcttgcaatataataagctgtctgggtttttcttttaaactgcatggattttaaactgtatttaccacaatgtatattttaataatgtcttggggcatgtgttctggctgcctgcgttattatcatattgactgttgtccatgaattgttgacacgtgtttcattgggacaccttctgccatttctctgtcaccgtgcctggcatcagaactcaggaagtgtggtacctcagcttggattaattgaagaggagattccatgctaattcttggcaatctcagtctcttatctccctaaatttccattttccataaggaacaaaagggaaaacaacctgtgtaaccaccaaactcctgtcatctattgttacattaactcatgggtcatttgtcacagcagtgtgacttcaggagagaaaacaaaacgcttctcaggaaccaatatattttgtcaacagcacccggatgctaactatcgtgtttgtatgaaatgtgtgttctaaactgatgcatttgtttgacaactttattgatatttcaagttggataatcatttatgtttgagcatttagttcttcagatactttgccatttaaaagctttatactttctctgatcaatgattcaccaaagggtttgtagcaatgtcaggcttggcataaattagtttgtaaatttgcccttctaaaagatgtttggatttagcagatatttccttaggatttcatagttatgtaacaaaactttttttattgcagcagtaacttacagaccaaaacatacacacatatatctatgtataattttgatgtatatatgtgagagttatatgtttagttgtgatatatatatatttgtgtgtgtgtgtgaaagcaataaacaaatacagtaacttctaaacatatctaattttaaatgtctgtcctatataatggtgaactactgagctagtaagctggaaaaaatggaataaagtgggggaaatggctacatttatgtttatcacatccttaaaggcataatttgaaaaataattccccaaggaactacttatcaacccaatcctttattttagtaattagaaatactaacaaataatgacattactaattgaaatattaattttgataagctcttattcctctactaaaatggctttctgaaagtatcacaagaagttaatgaattgcatgttaattaaatttgaacttttctcctctagtattcaaatgggaaaaacagaaatataatacattcaaatttctttgtactaagttgaacgttaatggcaatataaatataatatatggtaatgttacacatgaatgtgataagaatctgtaatattcataatggaatttgctaattttgaatattgatttgtcttttaagttcattttgttctgcaaatttagatgctgaaatgatgttttactagcatttcctaattagtcaagtgcaactttttatgaaaaatttaaatattctcattcaactaacaagttcatgtatcttttctcctcttgttttgttagcctcttagcaaatatccggctgtgatcaatgatatttcattctggttgccctctgagaattacgcagaaaatgatttctatgacttagtccgaacaattggaggagacctggtggaaaaggttgatctcatagacaagtttgtacatccaaagtaagtgaaaagctttctgattttacccttgactatctctgtgtgataaatgtcatgtggaagcatatcataaaatttgctgaaacccagggtatctgagacaaaatgtcttctgaatttgtagtgaatgtatagcttatcagaaaactctttgatatcagtcgtctctgaaaatctttccaagatgcattttccatctttcctgccttagtaaagaaaatatatgaaacagaatcttttaaaagtcctgcagcttttcagtattgtttttggaagtgacttcttaccttagcatgttccaggtgcagaggaaatgggcagaaagagcagtttgtggagtagaagctgttttgatagtctctcagcaaatatttgttaagcacttaccacacgccaagatctatattacgtcctaggaattaaatgtgttccaaacagacttagctctgccttcttggaacttatagtcttgtgagagaggcagacgttaaatacataattatgaaagcatgctattatgagggaaaaatgcattgggtgtcatcaaaaaactaatttcatgtggggagtcagggcaggccactttgagacatggaagctgagaacagaaggatgatgggcagtgaagaaagaagaaggagcatcgcagatagcacatgggagtcctggggggaaaagggcacatgagatgcagaaggcagccaagaacacggcagctcaaggaccaagggggaggctgtgtaaastgatgattgttgggtagtgatgtgtttccagggccaggtgggcctggaacctgcaaggtctcagacttggaattttaccctaattgtagtgggaagctatagaaggataggagcagagagataagtgacgtgatttgatttgcatttctgactggtcacctttaaatggtcccctttggctcctagctgttagagaagaaacagtcaccaaatcctgtctaattcacacctccattttcccttccccgcctgattgttccaggtgtgtcatatctaaattgtcagggctcctggctcccacgttatatcctgtcattcagactcccacctgtttccttctttgtcttttttttttttttttgagacggagtctcgctctgtcgcccaggctggagtgcagtgatgcgatctcggctcactgcaagctccgcctcccaggttcacgccgttctcctgcctcagcctcctgagtagctgggactacaggcgcctgctacggcccccggctaatttttttgtattttttagtagagacagggtttcaccgtggtctccatctcctgacctcatgatccgcccgcctgggcctcccaaagtgctgtgattacaggcgtgagccatcgcgctgggctgccttctttgtcttttaaagcattcattctctagataaagatgttcagtgttcactgccaattgttttgcctccctttccccaattatctaaatgactgaagttcatcatctagaattttgctcaacaacttgtggaaacaatagtccctgagctctcgcatgttcaaaactgtttatctgtttatacttgaataacagtttggttggaagtaaaatcttggcttggtctttctttttgggaggatcttgtaagtgctgctcgattgtcctctcaagtttaatttcatataaagaaatctgatgccatacttgatctttttgctttttgttttaaaggattccttctttatctttcaagtttattatctttatcaggctccacctcagtattgatcttttctccctagtatatatcattgtgtttcacaaattggattggactcttatttattttaggaaaattttcttgaattatatctttagggatttgttctgatccattgttctgttctgtttcattcttcagggatccagttatgcataagtaggctctcctttgtctgacttctgtacctattattttctctctaatgttttaaaattctcatttccgcttcatttggtatgctctcctcattgttatcttctctgtcccttactgtgttttcttctgtcttttctcccttgtgtaccttccatctgtagttactttgcttttctccccgttctgggttctgcaagctcacattttagctccccctgctttcttgccatctcttctctgagttatttctgctttctggtcttccttcatagagaaattgcttcactacattttaaaaattgattgtaaaatatttagccagaaatttcgtatgctccaatggcaacatttttctgtgacttttctgtttctctgccattgtcctcttttttccctcaattcttttttaattgatctgtcagtggtgtgcatatgatcgcttttttgccgctcatatttgaatgcattgggtttcctggaccagctatttgcacaagactagggggaggttgagggttggcatagcaggcaggggctgggatagacattcaacctagcttgttttcatgctcttaaggctttatttttctagaatgccaagaaaccaactttctttaaacatgactcatctcttcgattttcttgtataggtcttcctcccaccccaaatctacacttgttagaaacagaataattacctttgcttactccattatcaacacttggagatagagactttacacttcagattgtaacccatagctcttaaaaaaaaaaaaaaaaaaaaaaaacaacgaaacaaacaaacaaaaaaaccatgtttttgctggagttttctgagatgtgccactctgtgtgtttcttctcttcacttcctctcatttggcttctacttgatttcagctgctgttggcagcctttaaatatattttggagcttgcagatgatatctgtctcctaactttacagaaaatagaatgtatggggtagtctggatccctgatgctgtggagtgccaattcagccctggacttttatgtgagaaagaaatttccaggagtttccatgttgatactagaagtctagttatttacatttgaagagaaggaaaaatattggaacaagactgattgctragtactaattgatatgccaaaggcatgtgacttgtaattttttcccattcttttttagtacaagttgagtatcccttatccaaaaaatgcttggggccagaagtgtttcagagtttggatcttctcagatgttggaatatttgcatatatgtaatgagatatcttggggatgggacccaagtctaaacacaaaatttctttcatatataccttatacgtgtatcctgaaggtaattttatacaatatttttaaaaatttgtgcataaaataaagtttatgtatattgaataatcagaaagcttcagattttggagcagtttggattttggatctttagattagagatgctcaacctacagaaaactctggaatcagggatttggaattcattcttaatttttgaggtcacagtcccttactttctgatatggccgtagcttcacccttgccagcgtcaaaagtgggatgagtaaccctttcgcactggagattttcagaacctactaggttacagagagatgctaaaaacctaggaagctgagagaaatttctgttgtgctggatgtggggggtagatgtcacttgaggagggggtaaacattgaatctttttgataatttggtagtgttcaaggggaatgctgaatgggcatgctaactggaaagactgcagtgggagtagggtagtgttggggtcctgtggacccagggacagatcaggcaggcagacaccccattaaaaaaaatcactgaaaaaaataaatatttttctaaaaaaaatagagtattagaaatactcttaatgcaggtatacacacacaaccccatactgacctgctaaaaggtgaacttattcagttccttctgaaggagacagtacttttgattagaaatttgaaaacattcttcattggcactgatcttacaatgtcttgaatacatattgtacagatatttatagactatttttttggagctatgccaaagggcatggctgccaagggcatgtgtcccttattaagaaataaggggcttggtgattggagtaaggttcctgtggcagagattgctaattatctctcaatatccaattccccctgcccccgtccttctgcctcatgccattgttgtaataacaaaaacctggttttttagctcagcaattttccactcagctagaagtctatacttctaaattggccaatgatttgtaagtagatgtgtttagtggtatttccagaagtttctttaaaagttgaattgagggtattcttttttcttcctgctacttcattgtgactgtgatggctagtattcttgcagccattttgggccatggtgcggacttggcaatggagactgtatggagtggagcaacaacatagaagaaatagcctggggcttgaatctgtgtcacttcagccctggacttgtagctgagagagaaataccttgtttaggccacttattttttagatctcattattgacagccaaagcaaaacctagctattacagtactgggaaatatacctgaggaaaaggacacattatttagtaatgatggcttactgtgcagtgatcctcaataagtatctagggcaagggctgaccagattgtgaatatttttgacgttgtgggtcataagatttctctcgtaactactcaagtctgcaagtgcaaaagcagtcacagataaaatataaacaaaggagcctggttgtgttccaatgaagctttgactacaatatcagacagtggaatgtgaatttggccyatgggctgtaggttgctaacccttgatttgggggagggggatacatgaagttttttttgaagactctgactcccaaattccaaaaccctctactgggagatcatccttccttgagcaccctgtgcccatcctccccatctccccaccaagtccctgactacttaggtgataggaagtgaatggtctcctgaccttgaaccttgacctcaagatttattttattccataaacatataaatgaaatatagcctgatagtgcaaaagagcgccgaccctttctttgcctaacatcaaagcatgcttaagtgtgagacgtgataggactgagtgaaagacaaagtcgttagacacgttgcatgttattttctgaacaaaaacagatcccaagatgtttcagggagacataaactgccgaagaagagcctaatttcataatattagacaaatggagaaattttttcttgattacaaataacagcttgtgccctgaaggaggatagatgttcaggttagaagaaaatggcgttttgttccagccagtcatttagaaccttctcccagagggtctttgccacttaatctatgggccacttaacrtgcagaagagttcttgtagttctaaacttaatgtaacaaaaaatagaatggtgattacctgtagggaaggggaccaggttgccatgtcctttgacatctttggaatatggtactatatgatgcattgactaaatgggagacttgagaaggcaatcatgtatgtcagtatatgaacttgatatcccctccatcacatttgtaatatgaatacattgatcatcttcagtctccaagttcatgcaccttaaggaattatggtgttgttttttgttttattctgtaacaccagttgctcagaatatttcttagcaaaatggggtatgaggaagagtgaagagtatcccaggggaacttagccattgcctttagctgccaacacttcatttggagatgccagctgattatttatgaactgtggagatggactgtaagacaaagtagaccttaataggtcagatttggtctggctttaagacagacctttttgagagtgggaattggggagtaaaattttttttttactaccatccctttcctttgattgcaaggaggggtttggtggtgaaaaatgccccaggtatctgcagcaagggcaggtttgaaagggtggattcactgatgcccctaacccgattctgctcatagactcactccttgttccggggactgctggcctgccacttcctgctcacagtcgcagrtggggcttcctgagtctgtgcactgtcagtcagagctgagatgctagaggtgagctcctccctcaaccccaggtcactaaaggggcctctcagttctcttcatccctacttgaacttcctcatggttatattcccttttgtgatctatcacttgccattttttataatttggcttaagtgggtagactagaacacttgtgaccatgtctgacagaattctcaagagggtcttcaccatgagaggcaccttctcggtgtggctggcctggcttcccagtgtgcatgagtcatggacgttgacctggtcaaagctcttcctcctgcagtactggagcagtgcattctccttcctgtctccctctcttcattcttttttccatatgttcattcattttcactttgtcaaattacacccaataaaaatgccaatgcatacaaatttgaaaatagaaaagatgagattcacccatcatctcaacacccgaacacaacagctcttacacttttacattttcccaatcatgactgttttccatatgtgcgcatcagacgagttttcggcccttacatagagaagttggtatatgctttgcattgtcatcccttggtcttggggagggttttttaacctctgcactactgatattttgggcctggtaactctttgtcctgtgcattatacgatgtttagcagaatccccggcctctactcactagatagcagtaacaaccttcctaccgtgcacgcgcacagacacacacatacacgcacacacatgacaactaaaaatatctccagtgcccccttggtaggcaaaattgcccccagtttgagaaccactgggattttctttaatggagaatgtcttatgcttcttataaaaaaagtttcataaaattgtacttcattttatgttatgagcagtggggagaagggatagaacacatcacaggaggaggtgttctagtgggggctcttgtcccaaggaacagagagacccacttgttcaaatgtaggacaagctggacaaattaaccaggctttggaaagagcaggaactgaggcagttgaagggtctgagcttcactctttccatggtgtcaccacttccctattccatttcattttctcacacttattctgtctctccccaccttcccaccatgtcgtttctgctcttttttgtcttatacagagttcagaataccccacctgggccccgagtccacatgaccttcactgtccagcaatcagcaccaacttcaagtcccttgtgttattctgatggtctcaacaaagggacyggattagcccaactcaacttttcctgctagatcagaggcagttggtggatgggctccacttgagtcagatgctgcccagggtctagttagccacgtgggtcaggtggacaggcctccggccttctcctatatgtcagtaggtttactgttcttacacatccttctttattttctctttcacctgaactacgtagctgctgatttaggcaccaccacttctagccttccttaaacttcatgcaaagagatgtgccataaatacatttgccaattgattcttgagttcttgtgctgtggaaaacattgggctaattgctgtggggtcataagggtatggaggcaagattctggggtgtttgtttgtttttgtgttttgagacagggctttgttctgttgcccaggctggagtgcaactcctaggctcaagtgatcttcctaccttagtctcccaagtagctaggactacaggcataggccaccacacttggctaactttttttttttttttaatagagatggaggtcttgcttcgttgcccaggccgatcttgaactcctggcctcaagggatcctccctccttggcctcctaaaatgttgggattacaggtgtgaaccactacacctggccaagatcccggtttttatggagctaaataacatgcgaaaagtgaaatagcaataaaaaatatgatgtaacaaggctggttaagcctaatgaatggccttcccagtttcttgcatgtaattaacactcaggaaactttgattgacttgaaatggaaggtacccatcatccagggctgyagattcagaggaaagaggccttcagtctgggaaagtttaccaaggaaaccgaatagcaagctgtgtatgtctgtctcccttctaatcccttatgaatgggatgtacacagtcccaactctagttaatgtgtgtgaactacctgtcatagaaactcagcttccaaaaactgttgccaggatagacccactcatggtgggtactttaagacaaagggaatttatctcaggatacacctgaatcaaaactggaaagctcttcagaactgagggaaggtctaagggccagagaccctcagcctctgggtgcctctggctctgtttctgtccttccttctgctggccagtctgtatcctctacttccccaccatacacacattaacatctcttctctttctacattacctgcagtcttttctagccagtctgcttcaytatccagtgcaaattctggagggaaatagcctgactgactgagctaaacaccatcatgcctttcaggcagatccccttgcatcaggctgcctcctggggtgctgggccacctgcacatggaccaccgttgggttaagaatccattgtcaatctcactaggggccacttataaaacagcccagccctactcgccagagcaggaagccctcggcagagcaatttcaacctggagggctcatcagattttttacaccgccttcctctttctccgacctgccaccrgtcagctccatgtgtagaactctgtgtaactgcagcttattgttggctcattcttagcttttattctctatttgcatttaaacttttctaggctattccacatgatggaaactccttagaggcctgtggcatagtaagtgctatggtttgaatgtttgtgttcctccaaaattcatgtcaaacaggaatctctattgtgttggtattaagaaacgaggcctttgggaaatgattaagtcatgagggctctgccctcatgaatgggattcgtgcccttayagaagaggcttcagagagctgcctgctccttccatctcttccaccttggggaggacacagtgttcgtcccttttgtcctttgtccctccgccatgtgaggatgagtaagaggagccaactatgaagtggagagagacagccytcaccagacaccaaatctgctggcaccttgatcttcgacttccyagcctccagaaccgtgagaaatgcrtttctattgtgtattaattactcaatctaagctactttgtatagtggcaggaacagattaagacaatagctcattttcgtcttcctgcaatgtttrtatcagtggagggagacttactacataatgcttgctggatggttaactagtgcttcttccttccttagaggaactgttattcaatgactggaaatagtttatgagaagtagagtccacgtagtttagtggaagagctcagaatttagaattggaaggcatgggtgagtcctgactttcacaccttagatgtgtgatgttgggacttttggagccttagtttcctcatctaccaccaggagtaatgtcatccataaatggtagctaggaaaactagatgacactatmtatgtgaaatgctttgaaaatttmagacagtttccaaaaaacgagttagctattagagtaaaaagccagtgtcatagtcaatctaacttgtactttaaaataaagaataacctcagtacaactgggagccttggacttggcagccaaatgcatataactgggaagttgggataatgaagggaaacagaatgagactttgtataaaactgtcatttggaaatgatgcatgttattcctgcaatttaaggaggaaatttttaattaaaaaaatacttgtaggccgggcacggtggctcatgtgtgtaatcccagcacttttggaggctagggcaggcggatcacgaggtcaggagtttgagaccagcctgaccaatgtggtgaaaccccgtctctactaaaaatacaaaaattagccagacgtggtggcacgcrcctgtaatcccagctactcaggaggctgaggcaggagaattaattgaagccaggaggcggaggtcgcagtgagcttagatcatgccactacactccagcctgggtgacagagygagactgtgtctcaaaaaaaataaataaataaaataaagactttgtaaagtggcatcgatgctggtcagcagagttatatagccagtctgggtgttctctgggtcctgtgttgggaaaatgctgtggacagtggcagatgagatgacatttctggtttgcaaatcacatcctggtcttattcctctggacagagccaaataagtgcagttatctgaacttaaagatagcctagcgctgaaaagccaatgacagctaatcttgagagagccatsggtacagggagcttgtcagaagttgtgtctccttgaaattggcagcatgcagtaccaaggggatggccagacactgccaggcctctttaaaactctcctggctgcttccttttcttttccatttttattgtaatgctggtgatgtgggtataagaacttttgttgtggtggttcagacagccgaaaaagcaattctcacaaactrtttttagcctggatatctgttttccccttcttcctttctctttcctccttccccaagctttcttttaacagcttacgatgggtgcatctcattcccatcacatagcagccctgcttgacaccagcattagatgaattaaatcacagkttgttcagtccccaaacaccttgttcctccttgttgccctgcacatcaccatttgcctaaagattcttygggattcccttcagtgctgtcctggcagggacccaggagtagtgtctctgcagagagaagggcagaggcagagagactgcttgctcaacagcagctaggcagggagagaagccgggcgctgaaggagctgtatcttcaatgttctgctgttgcaatgcacaccttcatgaaatcctttttaactttcacttagcggttttcagcgagtctttggctattgtcttcccttggcatcctgggcacctttttgtagtgtggcgatggaatgctctctttccaagatgagggatgagagtaactcacatcctttgatgttccctgccccaccccctcatgattagattcaagcaagttaaacacacaccaagagcaacctgtgacatgatataagtcacagaattgctggcagaaatggggtagggtggggcggccccgcccccgccccctcattttgggcagttatgagtgacactctgaattgttcgaggtttttaaacttgtgccctcckttcacaagatcacttctttctggctaccacccaaattcgatgtccagagccagcatgggagtctgcccctcatccccgcctaactcactgtccatccacctgtgtctcctgagttcttcccatcccacacatggctcagccttgaatgtaccrtagctcccacagttaatgatattgtcttgaaaacgaagagatttatgaatttggatacatcctggccccttcagagggaccattatcttgactgtagatcttggagttaggtctctaaagacaggcctgtgatttgtgagaaagtctcaaggatatgcaggtaacacctactggagtcacgcttcaccagttcacatttctgagcagcacagacaggtctggcagtcttgggcctcacgttgctggtcttctccagagcaagaaacaagctgggctccaggatcacacaagcagggccgcgactgacacaggggtgcaggctgaggcagctcccatgtctcttgtgctaattcttttctttaatttgctcataactgaggcttgagtagcagccaggagggtgaaccaaagaaggcaaggggccagcatagacagggatgaggtcagccccggggggagggactgatgatgtgcacagatgtctgccaggggtcctaatggcacccaagatcctgggtgtctgtcttaggagggatgtttggtagagagacaagtggccagtggacactgtggatatgtgtggtggggcagatgagtggtcacagagaaataaggcttagggggacagcgatccagtcattggcagagtggagtcctaggtaaggcccagttacagaggaatgtggaggccacagcctgggatgcgggactctgctgttacagcagaatcatcagcaaggctgcccgcctgccctgatggtgagccgctggccaggctccagatggtctctccggagaggtgggactgggcttggaatcacaaggctgaatctcagatgcgcaggtggtggggatggttaagttagaacatccaggcatccagcaggtctttacagaggcttcagctggttttttgctttgtttctgttttgtttaatagtgtacagcttcatagtgatctacatattcatgtatggtttagagccagggaaggtgttatcatgattggaatttaattgggtgtctagtaaggaaaaagcaaggtagaatgttccatgacatttacaggaagaagataatgcctgaaggaggcctggtacgaatgagggaatccctgttttctagtgggaactacctcaaggaaaaggcactcatcagacacgtaggaaatgagttctcagactcagacatccccagcytgcaggtccagatgagggtacgtaataatgttcatactcagatatcccaagtgcatcgccacctacctgctgtcatggatcccagtatcccgcagagccccccagaagtatttctgtaggtcccagggggtgtccacagcaagctaacttccactggacatgacagtgactcccattgggcccccaggggacaccaccgttgaggctttggggccatcatggtgtccagtggtatttcagagctgtacgtttccccactgtcaacttgtcacctgggacttaagcaactcagctttgagccccgcctttctaccagccttgcaaagcccctctcccacatcctccttaggctttccctccaggtaaacccatgcaaataaaggtttggatatttcacctcagacctgrttagatctcagttttgactaatttcttttccatgggagcacagttcagagatgaggacaaaatcaacaaaattccagttacctaataatcttttgtgaacataactatagtcatgcatcacttaacgacggggatacattctgagaaattcgtcattagattttgttatgtaagtattatggagtgtacttacacaaacctagaaggtgcagcctactgcacacataggctgtatggggtacagtgtagcctattgcttctaggccacaaacctgcacagcatgttactgtattgaatactgtagggagttgtaacacaatgttaagtacagtatctgaacatatctaaasatacttcataaaagtggcagcgtagtaggtttgttcacaccgcatcaccacaaatgcatgagtaatgtgttgctctgtgactttacactgatgataatgtcactgggtgataggtagctttcagctccactataatcttatgggaccatcattgcatatgcagtctttctttgactgaaatgcygttgtgcagtgcatgactgtattttataagatgagcctaatttgtgttatacttctcgggaatgaaggcataccctgcagtaggttttggattctgtgtttgacagatgtggctgcttttctttgctttcactttcccctaaaggaaataacagtagtaagatgaagaaagaggaaactagtagtgaaaattaagcaggtgaaatatttatataaggcaggacagctgtggtctagacatttacacagaattttactagagtaattgcttatctcagaattcattcaatatgctaatttctcgtagcagattgcctgtccggcaatgcacatggcatacaatttttgaaattctgcagtgatgatggaataagcatttctaacccatttctctgttatagcaattgccacattgcctggtgtttatacgtcttttcatcactgcactgagttactatcaattactgggtctttagctttctactatatttgggatatagaacagagtaagtactcaatacgtatttttgatgaattaatgataaagagaaagaaattccatcaacaacgtatgttatattgktttttctccagaggtaactaacctaacttgatatataggccacaacttaacctcagttggcagtgttttccagctaggtgaccagaactctttactatccattatgatgatttcttgaaagggagaaactgactagggtggagaatactccttagaaacagaagttgggtcctaagtaaattgatgatttaaaaattatttggtgcaggccaaatattcagatagggaaaaggaaaaaaggaaacaaaaagagaagggattttaacgaggttggtcatatcctatacaaaatacagttttaaactctttagcttccaggagcagaaaactgtaggaagtatgtaaattattcacggttacctgggaaaccctttctgacaggaacgggggagatcacagggttggatggaaattcaagcagtcaaattgtaatgtgtttgtgtgtaagtttgcttgtttgtttgccacagatgaggaacagggaaaatttctgaaggaaggtaacatgaaaggaagaaaaaagcttgtctgtacagggaaggcagagaaacttcaggtctcttgaaggtgtaatttccaaaccactctgtccctagaccatcctatttggagtgacagcaatagtggacctctgacccgggctgtcagaacccctttctagaagcagcttcttcccgcaaaggcatggtcagtaagggagcctccacgttggcagagtgggactccacgctttggccccgtggacagatctgaagatgggcacccagcaaagctgggcaggcgaggcctcttctctgtaatgtttggacagaaaaccaaagggcgcttggattactcctccagcggctgaagctgtgagtacctaggaaccatccccggccacgtttcccatcaaggggagaatgtggtgaacagagatgagagatggagggaaagtgctggtgtgcctgagtccctggttccctggtgttctggcgcccagccgcatgctgcccttcccacagcctggttatccagtccttcctcagattccctaagccggtggtaactctcctgttgtttaagctggtttgatgtgcactgccatcacctgagatcaaatgagttctaaaacacatgcaattgcagacttcaggcactggcagaggacaagaaggaagaggtaagaggttgaagtgatcagcttccctctgagagaactctggagcaccacagggttgaggctgaggtgaccatttcagtatgaactgaaaatggcttttttccttatagctagaacggctgaaaatcagcaccatgtcaggttgtaacacatctgttccagggatcacaggatgtcccataaatgggttaaacacttaccatgggtgaggcagtttgccatctgtgatatttatggtctgagatataaaaataacttttaaaaaatgagtgcttgtcctcaagaagctcacagtctgataggaggtatcacataggtatatgtgattcattgtgaaaaaatgtcttaaattagaaacgtgtcaccatgatttcaaacaggggtagcaccttactttgccttatatactcaagaaatgtttgcggattgtggttcagctgaatcttgaaaaacaaataggaatttgrtatggaaggggcctagaaatttcaggtagaatgtatatgtctgtctttgtacatgttgcccacgtatacagacagaaatgtaagagtgawgtagtgtgagcagcataatagggaggatgggagagttgggaaaacgaggctgaggagatgaggggctagatcctaaagcctgtattcccttataaaaatgtgggctttcctggtagaaaatgtggagagtcattaaataatcctactatgtgcagtttttaaatgattacctatcttaactwtgttggccaagggtaaggttggtggttggaaaacaggtcaaggaaaaatttaataaatagtctgagtgacaggagatgagagtctgggctgagttagtgccgggggccttgtggggagaagctgacaatataaaaaaaaagacaggagctcaaatctatgggaaacggggccagttcaaaggagagatcgtggggatgaagaaaccacataactctcagagtcctgacctgtgcggccaagagtttggtggttggaatggagatgaggattaagtaggggcagcagtgctttggtggagaagatgatttagtgacttttggacttcctgagtttgaggcaggacacaggggaatgttaccctaagagctcagcagagagaggccaggattggaacgtgtactactcttgaccactggagctccagacatgacccaaatgcctggtgaatgtctagaacaggtgaagagcaaggtgaggaaaggacccgagggaacaccaaggtttaaaggatggtggagacagtgagtgaggaactaagaagggagacccaagagrtggaagtcaaagagcagaggctgggaatgaaagccattggaaggtacagtctcttgcaggagtgagactgtagtgtcatcagaaaacaagcgcagaccacatggatttgacaatgagtagtcttctagtagtcagttcaatggtagaaaaatactttggatgatcatgtttctttaaatatcccacccgttgtgtctttacttgtatttattcyacaaatgttcataactagagaatacttgatttaatggatttatgcaaagggttggtgtctcatggagcaagcaaaacgtcctgactctggaaaccagacctgcctcttcatacttatgtgtctggtaataggcatttgaaataatactgcagggaagtttcacgttgctgtcatttacccgttctgattttccttcctcgtatagctcacttgaagggtgggataagatggctgaaagcgctcctgtcagccctctctgagaagggagaattacacagacgtgatgattggctatcagagttccccagcactggggtggcccacttaagacaagcctcattaaattcacttcatcaagtaaagccggtgtgtctaacttaagaaagaatgtggcatgcaaattaagacctgaaaatatgaatggagtctgagcgatgctttgatcagcatttcttaatatggcacatgggggagaaaacttcttaaagttgcatttacttcccctcagttttgtatggcaggggaatctgttcacctgctacctagaattgcctcctccaaaggagaaacccactccttgggaagcaaagtgcaatacaataccaagtatgcacaatttgaaattagacttgacctccactcacctcacaaactaaaaacagcctccccaaaataagagaaagaaagctgggaaaggaaggtgtgaggaacatattgctgggaaaacagataagagttgattatatttagaatttttttcaacccagattgaatcaatgaatacctatgcattgaacatcttagttttgggattcctactgcaggagaatctatttaaatatgaatcccaaataaatttatatcatgtctgatataggaataaatctggcaatattaaacagatcaaattctcaagacaactagtctgaatggaagctattcttagcatagtttaagtaaaggagatcaatatagatattcaagattgaaaaatcctaatagttaatagaaaaacaaaattcaaggtccctctaaccttcaaagccgagctgtttcaagtgcttctcaagaaacaaatgtctcttagagaatgtagccagggccctctaaggcaggtgtgctcctgcatcctgtctgtgtggagtccttcttccatgactggaattgtctgagatcttggataccactctgccccacaggcagcttcactcagccagtggctggaccaagtggaggtcggaaattgaaccctgtaccatgtgacccgctttatgcattttacatactgtaattatactgcttgactattttaaataatatttttacttaagtttcatgcttcttgcaataaaaggagaattttttttccttctcaagctataatgtaaaaatgtcagggcagttattatactcatagttgcaaatttgtttaattaaaattacactcaactgttctgacacatttttaagcaactgtgaaaaatagctattatgatctgttggtatgcttccttgagtggctaataattttgttagatcatgatttagttctttttcatcrgtaaatatgaaaattaaagttagataaaacgagccataatttcaaactttgtatttgtttatcagttgggcttttgaattaagttttaaaaatcactttttcaccctatgccycaatamaaattcagmaactgtatctgttaaaatgtcccgtaggtgtattctgtggaaaaatagatccaaaaaattcatagcagattataggaggagaatctcttcacaggcgagacgtgctctacaggcgtttcaactctgaatccgaggtctcagattcaaggatatgctacaaatctattttaagttgttctccattcagttgctgacactctagaagggccattccaaactttttgtggtgagatgggaagagtgttcttttttctttttttttaaatgagatgaaattcacatgacataaagttagccattttgaagcgggcaattcagtgatacttaatgtaacgaccaccgctatctagttacaaaatatttccattacccagaggaagccgcatacccatttagcccacccactcttccttccttcccttcttcctttcccttcctccttcccccttcccccttcccrcttcttccttccttcctttcctccctccctccctccctycttccttccttccttccttcctcccctttcttaccatcctaatgagtgtgaagtggtgtctcatcgtggtttcaatttgcatttccctgatgactaaatgatgttgaacatcttttaatgtgctttttggccatttatgtactgctttggagaaacatctgtttaagtcctttgcccacttttcaattgagttctctcttttttgttcagctgtaagagttcttaatatattctcaacactagacccttatcactctaaacttttcattgcctcctaacctctcgaaagtgaagaattctttccttccttccatccttccttccctccctcattttttccttccttccatcttttcttattttttctttcctttctttgcttcttacacactgagagtattggatttttgttattagaagtaatgggtttttattttagcaaagaaagatataaggagtaaaatttaaattccccatcatcctaccatccagagagtttgttttgttttagagacaagatctcactatgttgcccaggctgaacttgaactcctgaactcaagggattctcctacctcaacctcctgagtaacaaggactacaggtacatgccaccatccctggctttttttttttttttttttttttttttttttgtgacagagtctcgctctgttgcccaggctggagtgcagtggtgcgatctcagctcactgcaacctccgcttcctgggttcaagtgattatcgtgcctcagcctcccaagtagctgggattacaaacatgcgccaccacacccagctaatttttgtatttttagtagagatggggtttcaccatgtgggccaggctggtcttgaactcaggtgatgcacccacttcagcatcccaaagtgctgggattacaggcgtgagccaccacgcccggcacctggcttaccagagataagttttatatcctttttctagtctttttaaaaaatgtataggataaacttgcatacgtatatactaagaaaattctgccattgtcatatactattttaatattttaacccttttttacatggcaaaattatagctatttgcatctatttatcagagcatttgttatgactggtgaaacaaaatattttcctatatttgttaatcatttgtattcctctcttaattgttcaagtctttttttgcccactttttctgttggcattttacaaacagtaaaaatctcttatcaatgattagctaattatatacccaaaatactagtccattttatctcatatttgttacaaatttttcaagttgttatctgccttttattatccttcatcatatgtggggcataaatttattttatattttttgttttgtcatatccaacatttttttcatcaatttttgtccattgcttttacatgcaagaagttcttatccatcaaaagattatataaatatttacttacattttctcttaagttgtttattattaaacatttttttctagttccatctggaattgttattaagatattgtgagatgagagaatcaaacttttatttttctaaacagttaaccagctttcctgatacaatttataggacagataatttacaataagtgaatcttttacaaaagatacaaaaccaattattttgctcaatttttttatttttatttttgagacagagtctcgctctgtcacccaggctggagggcagtggtatgatcacagttcactgcagccttgaccttccgggctcaagcaagcctcctgtstcaaccycctgaatagctgggaccacaggtgtataccaccatgcccagctaatttttgttttttggtttttttgtagagatgaggtcttgctgtgttgcccaggcttgagagcccaggctgggctcgaactcctgggctcaagctatcctcccaccttcacctcccaaaggcatgagccacaatgccaggccttgctcaatttttaaaatagtactttaggtaccagctgtatatgaagcaattcatttgtggtttgttttgcttgtgctcctattcttagcaaaagatagccttactctcatttcagagcagagtagcccacgtggcaatcccctagtcccttttttggaggccacagtgtagccagaagtaactggaatgcaaagcctctgtgtgcccttcgacccagctaaatcattccacgggcagattgatcaatttcctgagctttcatcatgatttctggagttcagttgtcttgcagttgctatacaatgtagtttttgtcatattccctcttatttcttaatgtgtcctggaaggaatggaatatgaagtctttgtagagtagtggctacagcactggctttagaggccgccctgagtgcaagtcttggctttgccacttgttggccgtggaaccattcgagcaagttactcacctctctaagcgtcaatttcttatctttgggtttaacagtgaaccgaccttagaaggttattttgcactgcctggtgcataacaagtgtccagtaagtgttattgttgatggtgctggttacatcctaatggtgagtttcctctgggaaaaactaattgtaattaagtacaagcattaaatacaaacaaagaacagccaagtttctaatgagcaaactttgtgttttatgtttactctagttaagcccatgctcaaaataggcacctagttgctgatgataatttactccaaacaataaaattactttcttaaggtctaattgtttttgatagaaaaaagaggaaaaaataataaagcaggttgaagatgtcacaagctgggaataaaagtttggtgggtttttaagatctgaaaaagaaatttttttaacaccttaaggaaaaaagttgcaatatacttttgtttctttttttatgcacagtaagtgttataggatgcaggtgacacatgtgctggtggggaagtgaggtagaggaaatgagaaggacgccccatgtagaaaatggcagaatcggaacacgcacccagcccctctgtgtgcagggtggcgttggatgagacgtgcagcctggccaggcctcatgtcgttgtttccccaggttttgatttaggcccgaagcccaccccatggagtctacatggcaaagggagcctgcagaaggcatgtgacattttgtatttgcatttggaattcagtgagctgctgatttgatgatggaagcaaataccaagcagtcactgtcagtgttcatgaaataagagaygtcagccatatttctaggatatgacacttttgtattatctattggtatttcaaaaaaaatgttatggtaaaaaaaatttccaaaacacataagctactagacatctgttttagaatagcaccgctatactcattcacaaacagcagttgtgtttcttgtgggagtggcgctttaaagaagtgtaatagggttttgttttttttttaatcagcatttctctttggagatgttaatgagcatccccaaatttaaagttctaaatgaaattataacactggttattgctaacaaaatgagcaactcttctaaggaagactaaaaggaaaaatcgctgtgaagttccctctatgtgatagcagggttgagaaaatttgattacagaacctgagcttctgcagcgaaggcctgacagtgtacggtcgctgtctggggtgtccacccagctcccggtgattccccctttgctagcaactgcttctccctcccaatccagaactgtgggccctggcagccattttgtgcagtgaggcatccttttaccctgcagtctctgctgattggacccggacagatgcttgacccacgaaggaatttacaattggcaatgatagaggtagtctttcattccacagtcactttccacattgtctgtttgccttgagcagcagcaaggcaaagaatggcagtctgcagagagcagaagcaagtttcccttcagagggaggcagagaagggagatgagagagtccagaggacattgaagtccccatttctgtgcctcgccttcgtctgctggcttctgaaacaagttccccacctggtcaagccaccaggagtagctttccactacttgccccgaggagttcagcagaggcaccctgggagcacagaggtgtcctgtttctgtcccttgagagcctcttcattagcctaagtgtccacctcgatcattgagttactctccctgagccactacgttgacagaagcagctggtgcggcaaagggacctcaggtagtgagcacagcgtgccccagggcctcacagggagaaacgccactgcaggcaccagatggcaagaagtccatagaacattccgagaagaagcaaagctctttgttttccataaacactctcagttgaagggggctttaggcaagagcataggaagaaaccaggatccagagccgaatagatgcatacagccctcccggcctcagtggcgtgagaggctcctgacttgcagagaagagaacccagagctgacagggagcgttccaattgccaagtcagacgaggctctccaaccattcctggtgaggaggccttagataccaagagcttcatcttccacatatcacaactaggtagttgtatctgatggcatctggattaactgggtaaaaataaaagcaaatctttcttgaggacaaggatcacaggctctagcaccatgccaaggcttttgcacgcctgggcatcactacgccttcaccacacccatgacccgtgcagcgttcctggctgcctttcctttatgaggccacaggtaaagcagctcgcccagggagccacagcctgtaagtgacagagacagcatcgcmctcagcagtcaaaatccaggaccatattcttaccaaatttctatgttgcttccagcgtattgatttaatcacttgtgagcctcttcttttcataaaaacccaacttgaagacttatgtatgaatttgctagggctgcataataaacaccacagactgacttaaacagcagaaatttatttccttacagtcctggaggctggaagtccaagatcaaggtgtgggcagrgttaatttctcctgaggcctctcttgttggctggtagatggtgtcttctccctgtatcctcacatgatccccgctccgtatgtgtctgtgtcctccacttcttatcaggacacaaatcagattggattaggccaccctaatgacctcttatctctttagataccctatctgtctctcaatacagccacatttgagatactggcagttaggactgcaacatacgaattttgggaggacacagttcaacccataacagatgcctccagggatttttatggatagccataaatttcagtccatctgacgtccaaggtgggtgatgaaagccaggagagcccttttggaacagcgacttctgcctggggatgctgtgccttatactgcaagatggtgctgtccagtcactctctgatcctatattctaatacagtacttttaaacaatgatatgcttggctctgctaagttacaatgaaaagagctactacaggtactggaggcttgcagagagaatatacaagctgttaggggagacttaaaaccatcccgggccgggcgcagtggctcacgcctgtcatcccagcactttgggaggccgaggcgggtggatcacctgaggtcaggagttccagaccaatgtggccaccttggtgaaaccccatctctactaaaaatacaaaaattagccggatgtggtggcacgtgcctgtagtcccagctacttgggaagctgaggcaggagaatcgcttgaacccgggaggcagaggctgcagtgagccaagatcgtgccactgcactccagcctgcctgacagagcgagactctgtctcaaaaaacaaaaaagaaaaaacaaaaaccatcccagtcttctcagagcaggcctcactgaaaactgaggactctcaggagaggctgccttgctagcattccaggaagcctgttcccatccccccggctgtggctcaaccgctgtggggtctgggcacttgacggggcctccctcagtggaccctgctgctcctgacgactgtctgtggcatgttcagtttcctcgcgcgagagaatctgattggtccatagagccaccaccaggataggggcctccactgggcagagctcaggccactcacagctgaatgcctggcacccagccctggtgatgaggtccaagcacagacttgtacaggggccttggaggtggcaggcactctaaagctgctcatagcagcactcataactgactagcaacttgtatagcctgtcaactacaagatgaagtctctgtcttaaagatatttctctaaaatgcatgtacggtgaaattgattgatgtagtagaaagagacctgtgttctgaccccagcttctctctcatctggacaagttacttagcctctctgagccactgatgtaataaccctaccttaaaagcagtattataagtctaaaatgagttgaagtgcttaaacgtacatccacatatttcaaagcaaggtactggatttttcattttgacatgtgtttcttcagcctttcggtggccagcatattcccagtgccagggcccagtctctctgcctttgcatttcaagtcccatcatgggagttaccacttaaccagaagccatattgttctcagtgattatttgaaatttgcatatgaaatgttaccatgtttacaccctgtacttaaaagaactcctaaagataggcactcatctgggaatcatgacagatatcttcaggatacctttggggattttcaagaatgagaagtagatttctcttgcttaagtagaggggtgtgtttccatggggtcctttgcataaatgccctatgggaaactctggtgcctgggaaaggccatattctgttgtaaactggggaatcagacctaccttcctctcttcttctatccacatttgttctttatttgcaaatgagtcagctaagaacagtgccaagcgaggctcttgagtgtaagcgcttgaaaagtgtcctattgtacttacaacacttcgttgatgaccagtggctgcttaccactgaagatggggtcagtgcctctgtgctggggtccctgttgctgcctgtcacatcctgggcattggctggaacccagaggtctttgaagagtgacctgctttattccactcacttcagagcattagtgccccaagtgggtcccctgcttttcctcagtggtctctttagtaaattctcagctcatctggtgggtttcggaaaaacgtttttttaacatcgggatccattttgccatatctgttccgttattgcactgagcttgtaaaagttgtattcccaagataatgtttaacttttgggggagtgtgtgtgtttcaagtccctttttcctttaatcatttgagggaacttttgtcaggkgtgtgtgtgtgtgtgtgtgtgtgtgacctgagaaaacgcgcacacatgcctggatgcacacgtgtacacacgtacttgcacatgccattgagtgcccattctgtatgaggtcccgtattatgtactggtactgtgggaggaccaaggctcagagcgtctgacttacgggtttaaggtctcacggccattaagcagtcatggcaggattaaaggagatgcagcagatctgaattggcttcatatcacggcaaacacggaagctaaatctgcgagttggccactcccagcccgagcttcccccgagttggagcacctaaatgttactccttctaggtccctataacagactggaggcctggtttgctcacatagttactgaggaagaaaaagaaacattttgtctgaggaacgtgagctacctctaaattatcaggcccagagaggcatgggattgaggcagcggccacatcccactgcccttttgagctaattaatcatctctcgaagccgcctgctatgcggcctctaggccgacttgtcacaagtagccacaaattaacctaacaatactgcacaccagacacctgacccataccacatagttcaactgcatatagccaatcactaatcaatgctatttctgtaaactaatgagaattcctgacaaacacctttctgacaccccactccttgtcccttttcttggcttttaaatcctgcttgtaacaagggtcaaatggaattcatatccaaggttacttgtgtctgagtcttctaagaagctcttatcttggccctaatcaactcccctcttattgattttgcctcagtttctccctttaggttgacatggctatgctaatggcaaagctttcctgacaaagcctcccagtgcaggctggagaggaggccagcttgtcatcctctggggaagaggagtactgtgagaatagcaaacagttgttctgcaacattgtctttattttcagaacacccttcacttccctgggtgtgtttcttgctcacagtggtatgccatcacagggccactgagaggcaagggcaccaactgattcagttcaccaggcatttctggtgaacctgcactctgtaaactgcactatccgtttcacgtgtccccagtttattttattttattttattttatttttttgagacatagtcttactctttcaccgaggctggagtgcagtggcatgatcttggctcactgcaacctccaccccctgggttcaagtgattcttctgcctcagccgcccatgtagctgggattacaggtgcccaccaccacgcccagctaatgtttgtatttttagtagagacagggttttgccatgttggccaggctggtctcaaacccctgacctcaggggatctgcccacctcgccttcacaaagtgctaggattacaggcgtgagccattgtgcccagcctcacatgtccacagttctaaggaaagcacctaggctgcattcactggatgccaagggcaggtaatgaaactcaggattgatgtcagccctttgagctaatatagaagatgtttgcataccccaaattgttattgataagttaccatacataccaagagcaggatatcaaagataaccatgtatcaaagatctcatacaccgaggcctctgggcaaacacctctaagatgcttctcaaggctacttctttagaaaagctttcatgatgcccctgttctccacggtcatcatccttggtggtcaccgtacctacatgtaggtccatcrgaaagctgctgtttgacacttactgactttatgtccctctcactagactgttaactccttgagggtaggaaatctgttgatgttatccttggtacttaccataatgcttgcacaattagaatattcactgaatgaataagatctccttagccaaggactcacactaatactacataggtgcatacatacatatatgtatgkgtatatttgtgtgtgtctgtatgtgtgtgtgwatgtctgtatgtgtgtattataacacatgcatatgtgtatatgtatctgcatacacaatacatattttagacgcatgtagcttatcattttgggaggaataggtttatttctctagggcactataaaggtagagtgatagacttaagcttgagctacattgatccaggacaatccatgggaagtgctcttctgagcactgtaaatccccaataggacttttttgttaagtttcttgtctaagctttctgattgcttggattaaggactaatgataccttatgccaaggtaaaaatgttactaaaaaaaaattgtaattttaaaaccttttggaatgtcttgagttattctttctccatctaaagcagtcattgagacttgacatcagagcatgccctgtcttccctcttgcatatggaatctaacccagcatctcaggaagaagaatggaagatgattttttaaatgtcaaaaaaaaaaattgaacttcctcctgtgcttttcacctcagcttctgctgcagaccttagatgcctgctttccagtattcgataagagaatgatgtatacagctgtaaacaacttcaaagaaggacacacttgaaatgccttgtgtgctgtagttgctcgttattttgagttcagtccactcttagggcaggcacagaaagacaggacctgtaagtaaactcgctggattcatcaaatctccacagaccatttgatgtcttcgaagagcccactggatcctgataccccagtcccctgcagccttgaagcgtgttcacgctggctgtggttgggtctggccctgcaatgcaggacatctggacgtgaacacagcctcttcccagagagatgagcttaaagagaacgacattatgggttcagagcatgagtttcaggaaaaagcttgattagtaatttattttaaagaaatatttacttacgattacttaaagaaataaatagcttcattctaaaaaaattcctgtctcccttaggatctgtcttcacacgcacaaattttctttcaggaggagggagcaaatgtacgtgggtgaggcaaagaactgaaataataatccacctttgatcaaaactccttgttatagtgttccctgtgaaaacgatttctaatcaatgagcgctgccacagcacactgaggagtaattaccttacacgtgcttcactctgagctgtgattagaaacaagatgtgggctcagaagggcagacgacgaatataaggagaaaaaccycagataggagccaaaacgtgcaggctgtgagatactgaataagcatggaggtctgctccagggagtgatgccgacattcgttcattcactcggtaaacatttcctcactgtgttgggcatcagtggtggtattagcagccacgttaaggtaacttatcacatgctacccttatatacaaagataaggcaactggctggctctcactgaagtatgaggttgacttcagaggtgctctgtactggaggggggtttgggttgctaagactacaccttctgaccagacttcccagtggtttggagccaatttccaagggtaaactgcttgatccacagtctaccagcctgagcattcattgtacctgggcttcatgagacactagggcctggaaaagggaaagaaagacttggaataattctacctagaagaaaaactcgaggaggggctagggtcaagtgtgtggcagacttattgagaaggtgaaggccatttggtctctgtagagaagctagaagaggcttttggcctgacagtgcttgctggggcatttactgtacccacgagaaagagtttccaaactctgataaatgttggatgcagatgtaatgaacactcttgcccactgagaaacagacatgcttgttgtgatggccctgcgcttctgggggtgtcttcatttgtcattaagacagcagatactgccacagcaccatcaccacctagccatagcgcagccatccttggcagtttccttcccttcttggagaggtgccagtcatgtttgttgtttcttttttcttttgctttttttttctttttttgagacagggtctcactctgtcacccaggctgggtgctgcagtcacagctcactgcagctcaagctccctgggctcaagtcatcctcccatgtcagcctcccaagtagctgagactacaggtgcgcaccaccacgcctggctattttttcttttgcattttgtagtaatggagtttcaccatgttgctcagactggtcttgaactgagctcaagcaatctgcccaccttggcctcccaaagtgctgggattacaagagtcagccaccrtgcctggcctgttgtttccttttaacccttgttttcagacagctgcaagaatgccagcagatctactctcatgaccttaaaaacatactcagcatctttagcccaccttggccacccaaagtgctggattacaggcgtgagtcacctcgaaaacattcttgttaggtgatgtgccccagaggaaagcttggacattctgaagtttgacctacctgttctaaactatcattggctgcttacttattgtgccatgttcctaaggctcagcctgcattcctacccctagtaggtaatgatccagtttttaaaattcttaccctctccaaaaggattgagagaaactagaatgagtggcaggcttattagagcagttgttctctggatacgtttacaaatgggaatagctgcacactcaggatcattgaagactcacctaaacataacctagaaaagagactgaacaaactctcagagccgactcagcacttatgattctgaagaagtgatatgcaggcacagaatagtaccttattaaacatctttgtgtgaaaggccagctaaccaacttggatgagaatattctccccaccttcaagggtgcttaagtttttattgggttacttctgcaaagcttctacccakcagtaaatattagccaccttggaaacagtacacagaatgacagtcattctccctctggtgtaaaattaggcactggacaagagtgcatttacctgcttgcaggcagaattaaaacagccagaatgtgctttaagtgtctaaggaaaaatttggccaaggctctgggccagtgcgtctgttgttattttagatttattcaattagagtcacaagcaaagtaaattgagctgtgtggttgatttgaatattaccttggaagacagtgtaaagagattaacaaaccctaagggatgagggacgagtgccaagctcctcctctgtccccacacacagtcgggccaggtttcacagattcatttaggaatgacgaaaatgcatgcagaagagcagatgtgccttttgttcagggccacgtagccattttcccgcttctccatcctctgaaacttcctctgtgtgcatgaactgctgcaaaaatgaagctggtgcatgtggaggctgtcagatttaagaaggtggcctgccctgagaactgggggagcttgggtccagtcgaatcctgcttttgtcttggcaaatgtattgtctggcacagccggctgcattcagttgacgtggtgctttgacagattggcatgggtgaaatattaaaagtaattgcacgggcctcatatgttttcagaggctataggataaataagccatgcatttcaacaaagaaccttttcagtgttaccatttttagtgccatgtggcaattggttgtctcacactcccttcaaagagtgaggcatttttacatgttttttacttagtttaacggaggtagggactagaatgatgccaggaagccatcctgtttttaggactgaagggrcatttttctgtgtaagtctcgtatggtttggtggagtgagataaggatgagttttcttagmataagaagctagaactgacatgacagagagggagcagcagggagataagagagggagcagcagggagatacagggtaaaaatggtgagatttgcttgaggtcaccgtgtgtccttaattaagactttaatgacattgttactcccatggcctctcactgttttccgagtatatctaatgctgctctaatatccaggctataatattgcagtgagaattagattagagaagattatatgcaggctgtagtggttctgacgaacgagctgtggtgtgaccttcgacaggtcactcagcttctgtgaacctgcttcctacctgtgcagtgagggcagtgggctcacacagtctcatggtccactccagcattgccggtctgtggtctatgcgtgatggccttggatttcacggctcctctactcttgaaaagaggaggggtttttaaaagaatgcctagtagggtgtggattatgaatctgttcgctataactacagttggactttggtatccataggggattggtttcaggacccccagcagataccaaaatccagggatgctcaagtccctgatataaaatggcatagtatttgcatataacctacacatatcctcctgtatactttaagtcatctcgggattatttataatacctaatacaatgtaaattctatgtaaatagttattatactgtattgtttagggaataatgtcaagaaaaagtctgtacatgtttagtatggaccaaaccatctttttcttttttcaaatatttttgatccacagttggttgaatmcatggatatggaacccatggatatggaggaccaactatattttgcttttcctagctccttgtaaagattttcatcagagaatatctagtaaggtgagatgaaccccctccatgtcccctttgcttattatcagctgtgacaagctcctagttgaaggcataggagcaggagaatgaaaacaatggcccaaatgtatttttggttttgttttttgttgtgttcctcaccaacggtaaaggtagaattgtctgctattgcttactactcttttgtcagggagggtcttcaccttcatcccatctcaagtagtgagtctgattctaggcctatctgccttttcctgcttccttccaccttcccgcctctcttcctgggggaaccaatgtcttcttcatctctgttcccttagtgtagtttggcacataccagataatcagaatatgtttgttgactgcattggtccaaagattagggctgagaaggtgagaaggaagacatggaactaaaactagaatttaacataatcagccatgtcctcaaaataaaatggaaactaacacgagctaggaaaggtagagcatgttcacttttaccagcctgggcctggaaggcacatttcctgcctaaatattgattagagttatctaaaaagttttgacaactgattgatcacttaggatttctgtatcaaaatggaagatagatgacttattctgtcaaactcacccaaatcactgccttcttcattcagaggtaagagaagcttgtgttttatatgtcaagcaccacaccttgaaatcaacagagcaaaacaggttcaaaataaaacgtggtgatggggaaaggactaacaaagacaggttaaatgcaaacacatgctttaacttgcacagaatcatcagtgcatgataccacatacccagtgacccaaaccgctttctaaatcctcctccttttttcatctcctgtaattagcacgtaacccaatggttaagggtatggaatctggagccacatcaccgtggtttgaatcacagctcggtattcactcaccattattttcatttctctgtccttcactttcctgatctgtagaatggaagtaataatattttctactgcattcaggttcttgtgagaattaaataaattaatatacatgaagtgccaggcacactgccttctggactcaatgacagttaagtttctcactgtaaatcaatatacttttgtttggtttgtgcatagtccacaagacctaagataattccggagaatttcccttcagtgaagtcacctactccaaatgggagtacattcctcaagttaaacacagtagcctcatgtcctttagcagccagccggcctcctttgcccatttgccaacatcagcaccttttcaaacttcagaaacagggctggcgtcttacgtggagccctcagtctctgctgtcacttactggcaagaatacagggtccccccagatctccatgtcgtctgtgaccccatcaactccccttggtcagcttgtttctctccctacctgggatgctgcatgtcagggttctctgcatcctgagtgggacccaaagggggcctccctctccctgcactggggatccattccctgtagggtgaagggaggaaaccagggtgtttggacccagggtctctaggtgagggtccttcctgggttcctatttcatgagcctcagagctccttcacttccttctgatgctttctttttttcccctttattctctcctcttttctttctctctttccatctacccttcataggattcaaatccaaaggctagatttttgggttacccaactctctttatttgaagtatgtaattcaattccactactatttttatagtaatttttagttatataaaaatattacgtattagcacatttggtgcccctctcccctcactggcaaacaccttttgtgggaagaaggattttgtctccattgtgcatgctccatccccagggcccagacaatgcctggcacttagtaggcgctcagtaaatagttgttgaatgaatgaatacagtataaaacaacattgtcctgtaatttataatgtctgtgggtcaatagttaaggttgggatttaggagctcctcattattctrttttgacagacttactacaaaatgtcttttcaaagtcaccaaagctcaccatgctgcaatttgttagagggttaatttttaaaattataatggtgcttggtaaatctccttgaattaatgagtcttgcagaattatggctgatgtgaaaaggtatatagttagcatctgtttgttctgtgcatatatctctcttccatgctgtacatatattttaaggaacatttctttgggtgctgtgtttttttctatttatgtcttcaccataaaaatataaatagatcatttatctccggtatccttaaagtagcttgcatcacttcactcttttaaacttttacataaccaaagtttctgtccccagtacacattgtttggaagatttgagtggttgggggcaaccctggaaccctgaggcaagcttctggtgacccttgaggtttacatgcagggccaggagctgagggtgcaggctgctgggggcttcattcccaggaacaccgtgaaggatactgtggtgttcgccctacctggcaccagaccagatattatacttaatgcttaatatacgatatctcatttaaactgatggcaactcaataaagtgaatactgcagctattaccattttatagatgagaaaaccaaggcttagagaactgagtaacttgtcctcagtccacacaagtaggtaagtggcaaagctgggattgaacccccagtccatgtgattctagagcccgtactcttatccgctaggctgtgtaggatagactgatggggacccacaggccaagtttggcagatgtggtctagggttgctcatgagttgaaagcagtaattgttggtgagtgaggcctaaaaatatccttctcattgcctttttgataaaaagaccccagactttttctgagaaggggcttcttagatttcctacaggtactttgatcattgggaaaggttcaggtgacaatcgtattatagggcaagcaagggaaagggccccactgccggacccattttctttcctgttaggaaacctttctaactaaggtcagaggaccgagcctggggttttaaaagaattcacggagcaaaagtgcaggggcattcaggagggggacatggaatgtggcacggtaccagcagtaggccgagagatgtcacctgaatcttcaaggtctaatggtagttatcctggtaccgatgtcaaagtgggccacatttctttttttttttttttttttgagacagagtctcaaaagcacccaaagaaatgttccttaaaatatatgtacakcatggaagagagatatatgcacagaacaaacagatgctaactatataccttttcacatcagccataattctgcaaggctcattaattcaaggagatttaccaagcaccattataatttaaaaaattaaccctctaacaaattgcggcatggtgagctttggtgactttgtaaagacattttgtagtaactttgtctggagtgcagaggtgcgatctcagctcactgcaagctccccctcccgggttcacgccattctcctgactcagcctcccgagtagctgggactacaggcacccgccaccacgcccggccaatttttgtatttttagtagatggggtttcaccgtgttagccaggatggtctcgatctcctcacctcatgatccacctgcctcagcctcccaaagtgctgggattacaggcatgagccaccctgcctggccaaagtgggacacatttccaataaacaattcctactggaagaggccccacgtttccctggagagggagtgtgctccaatgggaagggttggactttaggatcaggctgacctgatcctgagttcactttctgattcttactggttttgcgagcttccaccaattattcaccctctcgtggtacctcagctactgtaccagtaagatgtagggttaatagacttttgattaaagacggcagattgaacataagctttaacctcagttgcctctcaatacagtaatagtaaagggtttggttttttccctctcaggtataaagtaattagagactaagtgacggggagaggagacatcagcaacataattttggaagctgaaaagcagatggagaagtggagcagttaggtttcagtagacccaagaaagctgaaatccaagttggcaggggracaatcaagaagcaatccagcttgaactacaaaaccccccaaaagattcaggagttagtagtacaagcttcctcttgaagtagggctaacacaggactgtcgattgaaaatgtgtttgaggagcagaaccctcgattttctcctcactgacgtgtagcaaaaggaccactctgccaaycaccaacaggccttcatcttggtagaagtctggagatttattctctggagatgataaaagcaaggtgtttccaccraaacgagaagtaagctaagacaagatccacgaagtaagagttgcaacaaaaaaagcaaggcaagaaccatcccaaagcctcagctgcgcggtcatcatcagagggggatctgttcagactggagcagagctgaaggcttcagggacacttcaagaggattaagtaattgcaaacctaataacaaccattgcctcttctatttattgagtgttcattgtgtgtcagacacagttctaagcatgtgtgtattaacgattaaatcctgatagtagccctattagatggtagtcattatcctccttttatcagtgagggaattgaggcactcagtgcttaatcattagtctaaaatggcatagctggttagtggcaaaactgagatttgaacccaggctgtccacactcatagccagcataccacgcctcacccccttgacaacaggagaaaccaagctgatgacaagttaacacagctgggaaagctgggggaaacagaacgttgcacagagaagaagtcatcttagtttactgtggagctcagtagtgacctgaacaggtaacagtgtgaaaggggatctgacaggagtctccgcatgcccacatcaggaagatccgggaggggcacaggcatgggcaggagatgtgaggcatgaaggagctaagtgcttctcttcggtgatacagaggcaatgcctaaaacaaataacaaaccagaagtagcaagaaaaatagcttgtttaaagctacagagagacccaccaaaggaaccaactagaagagttgaaaacaggtctcctgtaggtcgtctgggcagactgtggcaggataggggatgggggctgctgtctttcaggaaaagtcctgagaattatttgacccttcgaatctgtgcaagtagaactttgataaaaataaaagcgaaactttagaagggaataaatacctggtagtactgtcatgaaataaatctgttttatcttcctaggaactcggtaaatgttagtttttctctttcctttttctttcaaaggacaagttcccatcccaggcagaaatgaaggcccrgygcggcgcagccgctgatggctcacctctctcagaatggcccgactgcccttcaggccttcatttctcgcttgccaacttccagggaaggacagaaaagcaggggattctgttgacagagacctttgatgagcgcttgttaccgtccgtggccttgtggggtgcctggattgaggcccagcaaatggccagatgtggggcatagctaatgtgggtagagcacctcccgcggctgtgggaagggacagtgacagtgtctgactgctcccgaggcgctagcaaaggtgccctcctggctgcaggtaatgggggagctgccccagacagtctgtaaggcagtgatcgtgtccasgatcctaagagtttccttttagccacctccaactagggcaagaggccagtatcttgaaaggcagagtttggggcttgtgtgtatgcaggagagagagacaaagtgtgtgtatttataaagcatgccatacgccgtttgttcagtgcaatatgccactttatttttatctcttcttacgtcaaagatagggaaagcctattaatcagtaaatctaatcataaatatatgcatatatatctacattaatatcaagtgtttatatattgataaattgatttaagaacgcttttcatttctggcagaaccttagacattaatgaacctgaattctcttactgaagtatcctcttattattttatagcagttcttcctactacagggtaattatgaacctgattttaacaaaaaagtacactgatctactgtaatctgctcagtaatacaagtgagcttttctatgcaaaccctattgctccaaaaagaattgaagaaaaaatgttttaccaattcagacccacaagtatttattgtgcacctactacatggaaggcgttggaccagctgcagtgggtataatgaygagtaaagcaggctcagcccttagctttttgcattttattttgaaaaggaaaatcctaagaactaastgaccacaatacaagtctgacgagactggtgtatgagaggaacaagcaggcccctcctgggggatcggaggggaagacatctcatttcagggatcaggaagagatagacatgagttgagggatttgcactattggaattataaaataacacatccccaaccttcattcattgattcatttacccattcaacaattgtgagtgcctgttacctgtcrgatgctcctctggaccctggggatgcaccaaagcaaagctcaccttcatggagtgcagggaagagaatagtggagaagggcaggctgcatcttcgtggagtgcggggaagaggatagtggagaagggcaggctgcctttccctgctctgactctaccctggtttctgtgaacattcagaagtttcctacgtaatgctgggcagtccttggcagtcttggagtttggctggcatgggtgctgtgtgtaagtatagtatcagtggcaccctgggttctctgacagcatcaggacatcactagtagagtcagcagtgtttctcagaagcttctgccctgaccctttgaccatggaatccccagtcacattagggccctacgtccacagaggagcagcaggagcagagaccttctgtggaaaccacggctgccccatcccagccgggtcataggtcagtgtggtctgctttaatgggacataacatcmtttctggaccaccctacttgccacatccatgggtttcctcctggcagactgtggggtcggatgcctcttctccaattatctctgttacagtattcactgataaccatcttagagggattaaatcagaacttacaaatgttttcctgcagttgatgtttaaaatatttattccaaaaaaaacaaagatgttctcagcctgatacatcctttgtggataatagcttggactgcatcaagtgcctctggggttaggatactgcccttccccttaggtttaactgaatgttcaacaaggatgagtgtaacaccgaaaagcattaagactcgaagacctgctactcttcaagggtggattccaggccttgggaagactgtgttaggggtatttacatactacctgtgtatgtcgggagccccatacaccactgcacctgagacccctcggtgggaggtttcagtatctatcctgtcaggaagtggttctcttttaattgcagttgacccttgaacaagtttgaacttcaccggcccacttatacgtggattttcttccgcctctgccacccctaagacagcaagaccaacctctcctcttcctcctcctcctccttctcagcctactcaatgtgaagatgacaaggatgaagacctttatgataatccatttccacttagttaatagtaaatgtgtattttcttattttcttagtaacattttcttttctctagcttacttgattgtagcagtatagtatatratacatacgacatacaaaatatgtgttaaccatttgtgctgttggcaaagctcttggtcaaaagtaggctatgagtagttaagtttcaggggagtcaaaggttacatgtgaatttttgactgggtgaggggttggtggccccaactcccatcctgttcgagggtccaccgtatatgcttttctctccttgagaaaaaatttctagccaaattttgtcttccttaaactctrtagagcttgagcttccagcttgtggtctgagaaacctctctttccttggtgtttgagcagtaatcctttttagcatgattgatttttttttcattcctttttgtgtccaggatcccacctttcactgcactgagtagctgtacaagtttcactgccctaacaaattaccacaaacatagtggcttaaaacaacacacactgatcattttacagctgcagatcagatgcctgaaatcagtttcactgggctgaaacggacttgttggcagggctggcaccttctggaggctctaggggaaaatccgtggacttgccgtttcctgcatctagcggtccctgcatcctttggcttgtggccccttcctcacatctcctcctctgactctggccctcctgcctccctcttataagaattcctgtgattatgttgtgtccacccagacaatacacatctccccatttcgtgattcttaacttaggcatggttgcacagtcctttttgccatgtaaggcaatattttctcaggttccagagaattggaggtaggtgtctttggaggatcattcttttacctaccacaggtgctaattaaacatttttaaaactcagctggttgtttcctttccccatctctgtctctgagtatttatggaccaggttttcaaaacacataactcacttccctgttataaagtaataaatgttagaaaatttctctcagttctttaaaacagttgggaaatgattaaattgtctttgcagtgattgtggcttattactctgaaaactggacttgaactccaggtrtgttgggtatcatcctagggaaccactaacactctagaaaaaccagtatcgccatttttcttggaaactctcctttcatctccaagtacaatggaagacaaggaagaggacggtccctgtgttgttgctgttgccatcatctttgttgttgtggattcttgccttctttatccccaactccagaattcctatctgtgccaacctgtcactggctttgctgtggaagccttgacctcctctcacacacatcagctgtagctggctccaatatgtcatctgccacacgtaacctagaattggaaggtaaccaagaactggaagtgtaaccaggtaacctagaattggaagtgtttgtagaggagaggaaataagctgagtgagtaatgtgcttgagctccagggtccacttcactgttacttaccttgtgattcttgccaccccccagagcaccagagcagtgacattaaacaaactcttgactctcaaccatgtttctccttaaccttgttctttgttttttttttggagacagagtctcgctctgtcgcccaagctggagtgctgtggtacaatctcagctcactgcaacctccgcctcccgggttcaagaggttctcctgcctcagcctcctgagtagctgggactacaggcgcatactaccacacccagctaattttcgtttttagtagagacagggtttcaccatgttggccaggctggtcttgaactcctgacctcaagtgatccaccctcctcggcctcccaaagtgctgggattacgggtgtgagccactgtgtccggccaaccttgttctttgacacaggtgttttaagcatacatgtggtgtgtcctaatgagaatgaaaattgtgtgggtggctaaccataccgtatatgtcttagtgctccagtgagtatcacttgagtggcttttgatctgtatttgacagatactttaataatgttatacagatattttacagatactaaaatattttatattttacatatccttatgtaatgcatatatgtatatacattgtgtatatatacatatgtatcacaatatgtgaaaatatatataaaggccttgtgaattcttttcaactattatctctttatcccctttttgtgggatgtgtatttagaaaaaataataatagaaagtaccctttattattgttcagcttccacccccctcacagttcagaagactgatccttgtatctttcaagctggaagcstttatctaaacgagggcctgtgagtttaaatttctctggacaaacccagatgaaagatggcttgttgaaatgaaggcatctcttccactgtgctgcactgattagattgaccaatcaagcttagaataggaaatgrcatggaagatcagatgcgggaaatcattgaaatatttgccctcctgttacaggatcactgaagtccacttattatgagacccagaggtttcccctctgaagatgcgggaaggcagtgactatgaaactggtcctggaagtctgttgttctggcatcctctgccctggctaaatgaggttctggcttcagaggggtcttggtttataagtgctccagggagatgtatatgcatttagctacacaaaacctgggctgcattaacggttcttaaaagcagagaatatgaaagggaggacagaggcattttcaaaaattgatgttcaattttataactctcagtttccagtaaaactttccgttatggtcagtagtttataaaggagcagttctgagtcattgttaagagtggaggctcgcaggcagattgcctagattcaaattttggttctacccctcaccagccatgttggttagaaggttactcaacttcaatttcctcttctgtgacatggggaatagtcataaaaatgccttcctcataattgttgtgaagattagaaataagataacatattaaaagcacttagattgggaggccgaggtgggcggatcacctgaggtggggaattcaagaccagtctgatgaacatggaggaaccccttctctactaaaagtacaaagtttgctgggcgtggtggtgcatgtctgtaatcccagctactcaggaggctgaggcaggagaattgcttgaacccggaaggtggagtttgtggtgagccgagatcgtgccattgctctccagcctgagcaacaagagtgaaactctgtctcaaaaaaaaaaaaaaagagaacttagaacagtgcctggcacaaaataattgctcaatatacattggtggttgttactgttattaagttattgttattacttagcagagattggaagcattaacacataatctttccaagactttttatctccagtaactaaactccaaaaacatatgggtacttcaagggggtgaccactgagctattcaaatgtacccttctattcccaagagtacaccagtgtgcactctaatatacacaagaataccctaactacataaactacattacatgtctactcatacattgcctctttaagaaatgtatatggcacagcattttattgtcatagccatgatggcatttatgttttataaactggagggaagttataagaatttttcatcaaagaactaatcttttctagaattagatagatggttagcaaaatgtatgactggatttctgtcatagaaattttcaaggagatgaattctaggagaaattaagcatcttccccccaccccaataacacaagttattggataattttaaatttgtgtcaaatggcttaatatcctttccacagaccctgaaaatacaaacatttgatatgtgctcgtatccaatttcaagttctgcttatattttatttgaattactgtctccttagctgccaggcgccccaacacgaatgttggcccctgcgttttacaattgttcctgatagtgctttgttatgtattgggagactttgatgcccagtgcccgcgttggactacagttgttcctttaccattcttagcagtacctcatatgacttgcggtatggaaggcttttcaaagtcatatgtgtcccactgggattagtgcaactgcttaagccctggctgtccccatcttttctctgcttgttcacatggttaattatggattcatcaaatgttagagctgggaaaaagatcttggagatcatctggtgctattktctcattttcagtccagagaaacaacgcttttccagccaagtgtaaccccagtcgttagtgcaagggcttagtctagactttgattcgttctgtaactacattaagggggatgagaagagagctcacgttcactctgcacaaggacaaataaaaaaaggccctgccatcccttgaggaactcacagtacagcgaagtgacagtccggtgagcagataattatctttaattcttagcccattgcttgctcccctgtactggtatgcctttggtatatactgtttcagcttcttatccatccacatggttgtaaagtggggagcttttgtttttgatgcctgtctctccatgtatccattcatttatttttctatctataagtcattcatcaaaaaccacttaggaatgcctgagctatgctgcacaacagagtcacttaaatgctacataccagtggagaaaaatcatggttcttgccttccagtaatttatagtctagttgaaggatacaagcatataaagaacaaggtacaaacatgtgttaaaggaactgtaatataaacatgacaaggtacatggcagacacagtttcatcctgcctaaatcctcctgagttgttcacaggtatttcatgtgttagttattcgaaggaactttacaatgcacctccttctttggggcatttacattttaaagtaggttgggaaacccgctttactaccttcctctcccttccctcttttactttctttcttaagttcgagactgtgtcccacctgtgttattgcttagaggaggtgggcctagccttgtgctccatgatggagttcaaagagaatgccatccaccaatcttgcactctctggctcacaatctgcttgtccccttcgttgattagttctttctttcattcatacatttgtttattcatatgaatgtccactgtttactaagccagtagtcactgtggaaagcaaaggcagacgtggctgatgttctcaaagagcaatagtctagactagaggggaaattaactttcatggaataatcacacatgtagatgtgagtgacagctgaaataagcatctrcaacttgatgctttaagagcagtgagcaggctgggcgccatggctcacaggcccgtaattccaatactttgggagactgagattggaggataacttgggcccaggaatttgagaccagcctgggcaatatagtgagacmcccatctctacaaaaaattaaaaaattggctgggcatgattggtgcatgcctttagtcccagctacttgggaggctgaggtggggggatcccctgagcccaggaggtcaaggactgcagtgaggcataatcacaccactgcactctggcccagacaatagagtgagaccctgtctcagaaaaaaaaaaaaaaaaaaagtaacagtgagcagtggagtcaaggttgagtgtgaggccagggagagaagagcattattcaaagccaaggagctgcctaagcaaagctccctggcaggaaaagaaatctatggatcagagctctggaaagaaggccagtgtggctggaaaagtgggggacatggtgttgaggctgaaacggggctgaggccagaccacactgggcctctttgaccatgtagggatctctcactttaccaagagcaatagaagcccctggaatgttttaagcaaggaatgtcacacgatcagatttggttttcaaaaacatgactctggctgctttgtggagggggactgaaagggaagagtgtggctgcagaaccagcgggaggctacagcacagctacacaagcaacaagttgttccaactgaggttgtggcgaggggatagagataactcagcagatcccaaaataaataaaacccaaaatttctacagcttgctacttagttgaacaygagggaagagggatgatgctgattatggaaccagatggatgatgctgccattgttgttaaggacacaactggttgagatttaggtttgaacacgtttgccttgaggtttactggaggcactgaagtaaacgtgttgcacagatagtttgaaacagtctggagcttacaggaaacacagagactggcatataaatgtgtgagtgatcttcattgagaatgtatttgaaactgaagtatggagaaggtggactaggaagcatggagtgagaagagcaaggggctttgcatgaatcttatggaactagggcccttggtggccagatagaggagagcaaatctgcctggaacgtgggggagccaggagtgaggaagagccagggtgtgtgagtgctggaagccagggtagtaggtttcaagatggcaggagtagccaacatcactgaagagccaatgacatgatcaacaaaaagccattgcatttagcaataggggtcactggtgactgtggggagaaatgatcactcagggggccagaagcaagattagatagagtgggttgaaaatgaagtgggaggagaagaaatggagacagtaagtagacaactgaagaaaagaagagagacaaggccatgcttggaaaggttgtgtgcagtaagagaagttttgtaaaagtgtaataaacttcagagtgtgtaaaagtcaggagaaggatccagtagagtaggagaggtaactatataagagagagagacagaggagagatgttacagtgttcctcagaaggtaagacatcatgggaccccacacttgaagagggtgagcagggttgaccttagactggacaaaagggtattttacattgaatgaaaaagaaaaggaaaaatattttctcttgttttgcttagatttcatcttgggcttatatttgacatggaactagtccactgtaatttttatggactttttaccatgggttttccacctaacgtatttttaaattcagaaagttggggtattttcattctttttttctttgtcagctcttttattacaaactattctattcatttgttatattttcccatccttgcagtgcattgcagacaatattattattacagttctacatgcatgttattactttagttttgcagggacttccccatgaatagcagaatgtaatttatgaaatccgaccatcattctcaaggcacctctgtgctatatgttaaactcactaaaacagcaatgtggaaatagtcacccacactgctgacttccagagcatcagtcacgttgccgcttgcatttggaaggagcctcccctgatccttctctggatgaagccctggagggaggcattacctacccaggccactcctcttgctggcttcaccgtttgaactaactcagggacgggtgtctctagatccatccaaatgtgtataaagagatgaacttctactttcagttaattatcaaaactataattatcttagaaagttatgcaaattagtcaagtgttaagcccttcatcgagaagctagcaaagtagaattggtgtgtgcggtggtcaagagggaagattctcagatcagatccccgggtttgaacgctggtcctgctacttgctggccgtgtgtgaccatggcaggttacaatttctttgtgccccagtttacttcactataaagcagacataatactcccaagctcatatgatcattgtaaggattaaattagtttgcataaagctcttggaacaatgcctgatgcatagtaagtacttaataaattctatgatagcatcttggatgcagtgatggtgcttcggaagcctgttaccttctgctgcctccacgtgttgcagtttcatttgggaaacacttattgttttagtcacatacaactctaaaaggaggtgattctatgtccagtttttcacaatgtctaaaataatatggttcacagtaataagattttatagcaggtgaatgtttacattctcatttcccagatatataataatcagtagccactccctttgcattaaaaacaagcccccctggctactgaatggctcttcaatgtagggagtatcttagccagcttggcacaaataaaacctctttccttttcagctgttttaaacatttagcagtcagatcagatgattgaactttcaaaaaaattyttcccaatatctgtttggatggaatcatttgccgtaaagatctggcattattcaaagctgctctgtgctcccttaattgaaaagccctgacattgacattggacagggcttgcctttggggccaccagcagacagctttcttcagtgcctcgtattgttaatgactcagagaatgtgtttcgatgagatcagaagcaatccactaaagaaaaagtggagaggacttgagagcttaaaagagcggagaggagagatgtgagaaaacctaaaaaaagacaaaagttggtgtggaagaaggggtggcgcgggctccatggcagatttgtcattcgtcccagtccagctatttagaatcatttttccagtgggaagagagatgaagagaaatcctgtccaaaagaacaaggaagatgtctttgaaatgatatgaggggagccagagacagacatggaggtgagcaggaccaggtcttgctccttagatctccagggaagatgtactcagcactactgtgcgcacctgggctgcactggtgtctttactgcaggcagaaaggatggatgcacgctggccagggccatggactgcaggtgcttaartggccccacagtagatggctgtgttcacagctcagatctgtggcccccctggcctcctcagcccctctgaacagtatcccactgttagcagctctgcagtgaaagtgcaatctgaacacaaattaagtggcagctttggggttttaaagaaaaaggaaaactttttcattttagaaacagaaagcttaaygtctcctgtgtcagttcattctatgctccctgaaatggtttcatctctatgctaattttatgctgaaaataggaaytcccctgtgctggagaggagagaaagggcttggaagtcaaagactatccaagtggctgagaatcaagtggacccccttgactcatttccacttagaaaatgctttcaaggcagccagtgttacaccgagggtcctgccargggagccgaggcctttgcctgtcaccctgggagctggcttccaggccttgggcatggatccctcgcccagagtctgcttggtcttgcaccaatgatttcacaggttatatccagacctcatgcttgataataaggtagtaagctgacttcccttggtttcctccacttctgttttaaatgaataattaatccattaaaagcatcatctcaaaagcacaaaatatcctataatctatgactataagttctttgaataagaagtggacattgtgttatgcttacttgtagactggtctgtctctcttagtaggacatgagatgttgaggatggatctcatcctagtcctagtccttaagagcaccaacatggacgcttcctcagcgtaggcatataactgtgatctctgaagattcctatgggtctatcattcagtagctcaagggcagctggacggagaagagattagaagtcytgttcctgctccttaacttgttcacaaagatacttcatttttattattttggtcctgccagttctcttcatctggtttcctgtatcctttcatatacagtgatgctgaggcattttttcatttgtttgttttatttgttgttttaaagagaaaagggagtatacttgttgcttcagggcaaaacaaagaccagtgggaagaaagttatcaaaggttgatttcagctcctcacaaagagctttctaaggacaggctatttgtgaagggactaaatgtgtttaagtagagctgggcggtcacatgagaccattgtcctgaggaagctcacccaaaaaccccgatggccaggatgttgactgatggctcaccctggagagttgacatctggagcctccgctgacaagcagcatggtccgctggcaggtgaataggggccatggttctgcgggctctctccaggggtggctgaggctggcactccacagtgctgctaagcacatgggtcacagctgcaagaatgctggggtatgctgactaggcaggtgtgcggaggtcacgatgcagctccatcttcaaaacaggaagcatttctcggrgctgtagtctcacagactctagagagatttgagaggagactgtcagagagacacagaggcctgggtgtgtgtggatgaggtgatttctaaccggttgataataaggtagtaagctttatgtttctatcatatttatttcccccctcagatcaggttgtctgagccagaaccacatatcccagagcaggcatgttagtgatctgggatagagagaaggacgttctaaacaatgtctggaaacataaggggctgagatgcatttagccatttgaaaagataatggaaatttctttcaactaattcctttgaggtttaactgtatagtattgcctttttcatcctttcacaaaacagaccctggaaggactcaaattggtaagtgagaagccakttactaccaactactgggcagcttcttggcaggaggtgagagctttctgcttcctttttaggacaattccacccttccttgagtgggaggagttggtgaggtggctgaatgtcatgagggtttggagaggaggtggctgtaatcgcacaggcactggcattgaagagaccccgggaagggaagtacctctggctccatggcaggatctggagggaggaagggaagattcatagcatagcaggtctagsgtaccgcacttgaaaagactatggtatttattggttcattgaactcaactaaacccaaaatactgggtacctcatgtgtgcagttcttagtgccaggaatgatgggctgtgtaaggaagaatccagtaactccctcaactaacttagaatatttatttcctaactaaaagaaacataagtaagagtcaacaatattgtttgttttgctttttatgtagtgtcaggcacagaaatatgctcagtaaacacttgctggttaatggccactgcaggtccctgaatttgcgttgagttgaaagaaatgccaccaacctgcccctccactgccaggagttcaagtcaggagagcagccagcctgactatagaagaactacacagtgcctaaagttccaggaaaccttccagttgcaaggagagagagcagtgctattttaataaatagtacatgatagttttgctgtataccaggcctacacagtgctagacactggaggcaaagacagacaaacagacaaaataattaaaatgtggttaagatcatatccaaatgtaaattaggtccaccactgtggaaaacagtgtggcagttcctcaaagacctaaaaacagaactaacatttgacccagcaatcccattgctggatatacacccaaaggaatataaattgttctattataaagacacatgcacatgtgtattcgttgctattcaaaatagcaaagacatggaatcaacctaaaggatcatcaatggtagacgagataaagaaaatgtggtacatatgcaccrtggaatactatgcaaccatacaaaagaatgcgatcatgtcctttgcagaaacatggacagagctggaggacattatccttagcaaactaacacaggaagagaaaaccgaatattgaatgttctcacgtacaagtgggagctaaatgttgcaaacacatggacacatactggggcctatcggagggtggagggtgggaagagggagaagatcaggaaaaataactaatgggtactaggcttaatacctgggtgacaatataatctgaataccaaacccccatgacacaagtttccctatatgacaaacttgcatatgtacccctgaacttaaaataaaaattaaaaaataaaaataaagattaaatttggctgggcacagtggctcacgcctgtaatcccagcactttggggggccaaggtaggcagatcacaaggtcaggagttcgagaccagcctggccaatatggagaaaccccatcgctactaaaaatacgaaaattagccwggtgtggtggtgcatgcctaaagtcccagctgctcaggaggctgaggcaggagaatcgcttgaacccaggaggtggaggctgcaatgagccgagatcaygccactgcactccagcctgggcaacacagcaagacaccgtctcaagaaaaaaaaaaaagattaagattatattctttgttgaatataacaaagtgaatataaacaaaatgaaaatttgggggaaaagtaaaatatcatttggcattaaagataaccccttaagaaaatcactatcagtaccaaacatggagccatccagccaaacccatagaattctagaacatcagagctggataagcccttagaacaatctgtccaaatctgttattttgcagagggggaagtggagacccagccatgcaaaggtattagcaacagttagtttacatttctttctggctgcatttacagtgggtaaatacatcttaactttagtgggttgaaaaagacaggtgctatttcctcaaacaatattttggctgctggtgatcgactcttagagcaagagaaacactttctaacatygatgtgggattttgtgtgtgrtgtgtgggtttcctgagctgctgagcttttccacaatctcctgctctattacttcgtagcccactttcctttaatacccaccgtcagagaggttctctttaccattcctctgctcagctccttcagaagtctgtgtacaccgacaataaatggtaggtctgaaaacagatgagaggtttttaaatttgaaaacagatgagaggctttcttccctcaagggatgatgtggggtttagtagcttcagctatgttgaattttacttataaatggtgatgacttgcttataatgtgaggtttattttctgttttatatgtatcttataagcagccacatgagcaaatatttaatttattgtcactcttgtactgttggacagcagcagctcatgtgaatgatactataccaattcaagctcgggaatgactattggacacccagcacactgttagggttatctgcgtgtgtccatgtgatactgaaatggctggtcccctggtcaaatagccagagaaaccagagggaaagtgaattcctgaacttcattcaattaaatgaattgaggtttagatgttttttactgtttaattcaggcgaaacatttgttattctttatgtagaaacagctgaggcaaaaatggatggcttagaaggaatatccaagtttgaatccaggttttacctcttcattgctatgttaccttgagcaagtttcttttttgtgtgtttgggtttttttttttttttttttttttgagatggagtttgtctcttgttgcccaggctggagtgcaatgacgtgatctcgactcactgcaaccttcgccttctgtgttcaagttattttcctgcctcagcttcccgaggagctgagattacaggcacccaccatcacgccctgctaattttttttgtatttttatagagacggggtttcaccatgttggccaggctggtctcgaactcctgacctcaggcgatcgacccgccttggcctcccaaagtgctgggattacaggcatgagccaccacacccagcccacgttgagcaagtttcttaacttctctaggcctcaagggctttaaccacttgtaatgatgataatagtgcacagtgctttcaaggttatattttaataatcaatataaggtacctagtgcagtccctgaaaaaacaaacagatgttaattccctttctcctaagaaagtagtcctggaatgggaaaataggagccattccttgacacggagcagacgtgttatcctggcctcctatgccattgccttctgtggtcagtacttgaacattgtgccctcggattccatcaacagatcctgagaaacagagaaagttgctcctgcaggtcccatagtaagcttgttgagtgttgtccattcctatcactcagcccacctccccccacccccccgctgcctataaaaccttttgtgggaaatgttttaaaaattaagcaccaagggttagtgtgcctcaagataagggtaaatttgaccttaagggttttgtaagtgaccatttttccttcactgtggctggggagagccaccgtatacgtcagcccccagggcttgctgttgtgttgctcttttccctgatctcagtagtcctgtacttgctaatattttcgctcatcatattgcagtgtattaggagagggctctgatgctgttctgtggtattataggcccaagtcaagagctcccaaatcctgccctgctagtcatttggcctcctgatgkcaaasagaggtcctgagattcggagagtgaagcggagtggctgccggcaccaccttctcacctgcaagagcacccagagccttgtccggagttgggcttattggaggagctggtgaaggagaagaggctgagttggcttaagcaccccttctgcctgcctctaaccccacaccttcagatccctttagctgcttgcacagctcatgacctrtgaacgggggtggggaagaagtaggcagaatggagtctgacatgagaaaagtgtcaataacatcccatttcttgtgttgattcttgatttctgttcatattcaaacattattttgttgtatattttctttcgtaggcctccttaaaattctcgtagaatgaggcaagatataaacacttacatagaagttaacagcagtgtgttaatgatatatgcagccaagcataggcgcttatgcccagagtgcgcaagtatacagaggacattcagtggccaaagttggctagagttgctttggtccttgatcaagtcctgtttagatttctccacccaaataagttacatcaatactgactagmtaatacatattcaacaggcagtacaccccctgatcattgtggatatcacaattcaggaaatcatttacttactaaacatttttacttactaaacatttacttactaaacttttgtgtcccctactaaacttttagcttctagagagtagaaaccatgtcctgttgttctttatgcttatagtacttggcccacgactgatgcacaatggatcacgaggggtgactagataaatgagaattttttaatggcaagatgattcagagtaaatgaaatgtagaatatcataatattttataaggaatggcattttgggcaagttattacttgtacgtacttttagaaacagtctcttcctctaaccaaatgcttctgagtaggatcctgctttaatggatagaaaaacatgagttctcattagtatgcacagcactgaagcccagttacattttttttttaaataagcacactttttaagtgctgccatgcagtgtcatcgctccaaaagcttatcacattgttcattttcttagcaggctcagttctactgatggtgtaaagtttcaaccggggctcttcataattattacgaattcttaagactgaaatcaggtggctttttatttttagtgtccttattgtgctcactcaagactatatattcagcagtgtgcagtctatgcctgactgtataaaagactggaatgttcacacactataatgaataatgagtgtcagtgaactcattacagtaaatccttaggtaattactttctgccttagttgggggacttatggtagcataagctaaaattatttcatctccagacaaaccctgaggtggctgttggagttaaatataattcatttgcagcatgtttattatagttaaatttaactaatttagggcctgttgctggccagaagctgaggaggaggaagttgcagtgtccatgagtacctcagaaaaatgaggcttcatggccgagctttcagagcatgacgtaagagttactcccactctgtctctgctcttcctgtccccagagctggatgggtttgttcatgaaagtgattggctaatgagctcttcargcataggattaatgtggtgtagcaagaggaagtctcagcgttgagctggggctctgctcagttctctcctctgtttctgccggaacttcctggtgttacagaaagaactatggtgttcaaggtcactgttgtatgaatggatttatcagcagatggtgaggctcccccttctcgtgccccatttccactcaacactgtcgggccagtctgggcgttatttcttcctaagccttccagcctggaagacttagctctggaaaaaataggaaaggacttactccaagaaccaagcacatgtttacagaggatggtttaacctttaaagatgttgccactgaagagtttttagattagattttgcctcatgagagctcttctgagctggatggcttgctctaccaaagatgttacagggacacccgcaggagaaatcgcatcaacgcggggaggtgaggcttctgagccatcgcttgtgtctaagaacataagccaaaaatcactgtagggggactgttccccagaagacagggaccttgccaggagaggaaacacaattccgatcatcgtgaggaacgtgcatttgcggaagacattgtcctacttttccacaaaaataccatgtctccattctggaaatatgtgcactgtgctaattgctcaagagaaggtagcagttggaaaaagtccagagaaggatgagtagatgaacacaggaatcagtcggtagccgtgggaacagcaaagccccttcagtgggaaggcaagagtaaagagaagacagcactgaagtctgtggaatctaaagcggctttggtggggtttcctcaccgacccaaagtgcagagctagcagggtaggcacacccacccgtgcctgtggtggcccgccctaagactctatccaggacagccacctcagcctcactatcccctggccacgtcctggccgttcagtcccaccgtgacgcagcttacaagctgcagaaccgtctgcctctcaagccagtgttcctcccactgtaccacagttgcttccgttgggtccagactcttctgaaaactccccttttcaattttactcaaacagattttggccatggaaatggtttgtgactttaacgggcaagctgtgatataaaaagtaaaccatgggttacataacttcaggggcaggttaacttttccagaattctggtctcaaagtaaagatttagatttagttgaggctataaaaattcaggaaaaaataataaagcatttctacacctccctccttccccttgcgagccccccttaaaaatagcatctgaagtttcattgtagctgagtcactgcttggtgcgatctagggctaggctgcaactggacctgtcagaatgaggccacagtgattcatgatgaagctaagtttggttgccactgacaacatgtgttcctctctgttctttccctggagtttggagacactgtattttgcctttggattagaaacgcctttgagtggtgagagtaatgggatgagatgggccactgcaattaaagagccctctgggccctctttctgtgacaccctagccatttgttaggggaaggtaggagtaattaacataaccaaagacctttggggctgtgaagggaatttatctcctctgcctttgcagtttagcatcaagtcagtctaccaaccaagagccccccaacaccttttctgggccccaaactgtgcttcccattgaggaaaggcaaatgatagaatatgcggtccctaccctgaaggaatttggggaagcacaaaccaattagagaagcactgtctacttcccacgttgattataatcatgtatgtgtcagtttccacgtttgcgcctggagggcagaagccacagctggttttgctgtgcatggcacctgtgttcctggagctgaagtgaatgggtcctgcctccagcacctgcttccccacttctgccatcagaaagactcgttcgggaaaacattccttcattcccttcctagggcaccacagttaataaggccacaaatttgggcctgtccatcctggtgcaagtatctgaggaagcaagaagagatccgggttagcaaggatacgattacaatgcttttatttttttaatgggacttgggcggtgaggaaattctatgttccccgtcatttatgcagactccagctaaacgtatgctagttgaactcatgccagctctgtggaagtgagggacagatacaagaaacatgggaactttccaagaaatgaagcttctttgctgccatgtcgatgatgcttgtttctgagaaactcaaatgtatggaagtgtagagtagagcttcccaaacagggtgccgtagttcacagatttgcacacaggggtgccagcataatgatctctgcagctcttggcacaccttggtatgtctggagtatgagatggacttaacatatgaatatacatataaatatatataatgtatctgtacatcttagggactagacaaacaaggtgttaaatgtgttcctctctggatggtaggtttatggaatcctttaatcattttacttatttgcttatttaaacttctgaatctgtaacaatttattgtgtgtgtggaagaattctttcagcccaaccaaatactagccaaaatattgaagtggaaggtatcagtgttcggtgatccagccaaaggtttatgtatatgttttattcaaacactgtcttagaaaccatttgccctgaggatgtgtcctctattttgtcagtttaaaaaggattcttttcagttagtgcattctcattaaaaaaaaaaaaaaaaaaaaaaggaaagaaaaagaaacagtaaagcagatgtcacatatcagagaaattgccacatcttgatagattcacaccatttattttctttgcctgtaagcctaatactggcaacagcccaaactgccaactttcttcatttattgacattcttaaaaagttaacttcctgtcgaggatgtttttgacagggatattaagagaaaracttgttggtcagatgtaggttccagctggccacactgtaaaggccactgggaatcggaaccttggcagatccatgcagaggtaatagtttggaagttgggaattcttatttcccggcaactgtagacaaggagcaatgatttgctatttgtattttatatcgtattacatttgcaaaatgtttgtggtcattcaaatttgttttttttcacagtacttctgtgaatgcctgatttctctttgcctaggctctcagattcttgagggggtggatggaggtgtgatatttgccttcttctcacataggaatgcctataacctaaatgagatcaatatcatttcgttcttctgggagcagtactatttttgccagttaccaacattataaaatacttccatatttggaactgtggcattttgtacttggagggattttttaaagaaattgcctggtctagttccttcattatacaaatgaaaccattgagaccgaacaggcaaagggaagttctcagagtcacaagaagtggtcagtggccaggctgaggccagactgtagtttcctttttactactggtcatactctgtgctttctaccaatatttcccaattactatggggaattaataaaaaatgttttttaatctgcattttttgggggaaagataaaaatacagagtttgtcacaacataggtggtcaataaatatttggtgaagaaggtgtttgataaagttgcatatatttacctcttgagtcaataaaaatgcgttatatttgcagatagmcacacacacacacacacacacacacacacacacacacggtgctatgtagtagctggtaaccacatgtgtgctgtcagtccatacagggacttgattgtcatgtatcccagtctttgtggctctgttcaaaggaagaagctctggggaggagtaacagagaattttaggagacagagaaaatagacttcttttcaatggaaacttatcagaattgttgaagtgagaaagccatacacatctctatgtgtattttggtatcagtgtagtattgtctgcagtaactctttgtttagtcatgaaatatgttacttgccattccacatgtacccaatacagtgttaaaaagagtcctgttcagctaggataaatcacagaacaagtatagtaagaacatcaccaagtaattatayagtatgtctttgagatttgtgtctccaagtttctgaatatttcattttgaaagagtaacttagaaaacgtaaagagaagttccacagaagtgcctgggagagctgatctttaccaaattcagtaaaaatttcagaggtgaataaaataaacctggacaattcataataacctacagaagacacatcgttttcattgttttccattggctaacatatccggtaggaagttaaatttcactgtcttttgcatagcacagaatttgttttcctaatcacctttcctacatattgaacaacgtctcggtcataatcatggcatatgctgcattgaacccaaggtgaaaatcattcttttttttctcacctgagggaaatttcactttttttactgaatgaaggaagcacttaaagtataaattaaaataaagataactactattaaatttggttaggctcatataaaaaaaaatagtaaaatggcagtcaaaacaacctgactcaagtttgtgacagaaaggcttaatttagcacagcccatttatgtacgcaagaagcttttcttaaggacactcaaagatgtcagctccagtcctaaaggaaacacacttgaaccragcgtgagatgaatgaagggattctgctcttgtcttttatagatgatttcatttatttgattcttctctttcctcctacattctcagattaggcatggccttcarttggattttgtattcgttaaatacaaacagtacacatattagactggatacatatttgcaaatttggatttatataatctattttaaaattatgagactaacgatatattttattgcacatgcctgtggtgtccgagtctgggatctgctttaattctcaataacattcaaataaaaccattgcaaagagcagagctagcaataaggacatttacaatgtcacatgaaggtggactgtatgccacatgccttataatcatatattcaatgattgcaaataggatttttatagaaagtgctcacagcagttaaaagaattatatctgaagtcatatttctgaatgtgagactttcattttgtttaattatctattgaatgctcccaaacttactaggacttagtgtgtgcttttattctatgttagagaaaatcttggtagtcaatctcaagtgtatgccccgtcttatgactgcgagattccctctctcattctggtattgtcctgtgatatttgctgctttctgcaatcaatatagacagacttgagccaacttaaatgttgtctcaatatttacctagtacaaagaaaattccatttgagaaaaccacagagtatagtcattcctggaacaaccaggagatggttattatcattggaaacaattatttttaaaaatcaatctcaattcagagccatatgtgtatttaaagtgcccacacatctaaaactgttttcaattaatttcatgaaatgttattttttcatttaaaacaaaccaaagatgattaatttttatataaccaaagatgattaactttcatataaatttgtgaatcataacaaattcttgagcaaaccatgtgtcttgctttctttttatattggcatggtataaatactgagaatcaaagcaaccataattaaaaaggcctggtctgaagaggaaccgtaaagtaggtaaggtttgtgttctgctttcttctatctcctcctagctcccattcaagttatttcttccggctttcctctctggcaaggtacaaatgctcctgcctctgcctcgccccttcacactgtaatattggttaaagaacttggcaatgaaccagcgtaatcaaattcctctggctagacttctctggcagtagagcatttaagtgttctgctccaaatactttccaacaatcagaaccaagacacctgtgtgggagccagtgccacaggtaagtccctgttagtgacagtggccttgcagtgatgctttgggaaattatcctggcttcaatgagtaggacagagaggagtggctacccagcccatgcaaagccaagcaaggggctgtagtcaaagagtcaaaggcaagagtcattgttcttccctgtgagcttatataacagagtgtgtgttcatttctcacacatatagttttatctcgcagctacttgaagggttcacatgtctgtttgctgacttgattgtgaaattcctgagggtaggaattatgtctcatgcccagcaccaaggaggagtgcagtaaatgggtgaggaatgaatgagtgaatgaatcagtctgtcaggcagtctgttaatgcagatggcaacaatgaaagtatggattcgaatggcatctttgaaaattgcaagaaatggatggatgtggaaaactgagagagaaaactaagagaaaagcaagagagatcaaggcatcaaagcctccgaggctttgagctgagcaaaacgaagagcctgggaagcagtcgtagaaagggggaactcagtgagaaacctcatgagggaagccaacacataaacagtttgtcacaatctctttctcaaagaagcatcctctaaaaggtgcctgtgtttctagcctcccacgtcccctccccttaccacacctcacccaagttcctggaggtctgataagcagccaagactattttgtagacttagcagatgtccatgttttaagggacatttccatcaacgcttgaaggttgccatcctttgtagacttgggaggaaaggtggatgggagggagataggaaatctgagctggtgccttgaggagacgctttggcctcctggaagagggtacttgttggctgggattagcccctcaggccatggcttctttcagaggcactaagtttacatcagagaggacatacttttatagtctgcattgtcagtgctgcgccctcaaccactgctgcagatagcctcttactttataagtaaataatctctcagggaagagattcacctcatttcacacatagccatcctttgtaatacgagggctgcttgcactcttcttggcctctggagcttcaaacatgtctcattcccacatccttcagaagggccaaagagggacctacctggctgagtggtatggaagctaggagggaaacaccctggtacgtgctctttaaagtctgtgagttacagagagaatatgataaataattcattttctattttaagcccctctttctccaaagttttggaatgagctctgtaaatttcccaagaacttctctgaaagttctaccagctgaccgaatgcggaaatacctgctgtgtgcttcctggagattttccccactgtctgttttatgacctggtgaattaggctgcagtcttgtcttgatcsagaagtggtgccccttggatcagaaggaatgtctgaaacacattgatttgtggctggaatagtaagctaagctctaggaacatcctgccagaggcttgtccttaggaaatagtctcacaaatttttttgctggtgaagagatgacatgctgcaattgacctgttgaaggccagaaaaccgaggtgacaaagcaaacctctcagtttctaatgcttccttcaggctatgctttctaggggtgataccctctatatcctgagagaccttagctgcacaagacattaaaacttggtcctcaaaatgagtgataccagcctctggaacataattgcgaccaaaatgtgtcctggggtcaccagcctccttctacccttccctctaaaatccaaataaaaacattaagccctactgcactggcctgccctgttgagtgcttttgcagattgcctggggttatttatgtcctcctgcctcctccagctctaaattctggcttcaagaccctcctccatcacccctctgtcaacactcmctgggttgttaacatgtccacaataytgatcgccttacctccctcttttcccagggtctcctaaacagtacaatgcctttcaaaagaaataatggagaggaaactattaaaattgaatttccacattgcagttttgacagtttatcagtgattcatcaccataatctcttactctccatccttgccctgtgaatagattcayacctggaagcagccgtctctttagaaaagcttctatcctttcctgatttttcctgagtgcctggtcctcccaaaactcctatcttttttgtcctgactcagaggaaccctcacttcccccacccccaccccccaacgcacacatttccttcataacaacaccctagagtgagatccttttactttccgttttacttccyggttcctgagggcattacttttcataagaaaattcatcaaagtgttttcctaaagagttgttctccctctaaagttgaatttcatcctccaacccaatatggaaacagctattgccaggtatatgtccacagcaatctttccttcttgctacataatcacagttattttaatgattatttgattttctacagaatgtagcgtagctctgatgctgttagggtcttgatgaaggcattagaaacaatgcttatgctcagagcacttgtgtgtgcttggacgttgtgtgaatgtgagcaaagttgtacttcagtgaaggtgcccaaccaacactgagacacataaccaggaaaacaaggctgcagctgatggtcagagtagccacgggttaggcatgagtagccatgggttacgcataagcatccacaccaccagcttgggcagctgtcacctgccattgtttatccacagggccagctagaaaaggatttctggtaggcatctctatcaacaacacaggtgaacatagggaaaacgctaaatgagaattatgatcaactagaaataaaaggaaaatcagtcctccctgtatttcccatacagctgccccatcggtcctgccatcagcaccacatgaggcgtatatggaagatggtttattgttacctttttattaggctgcttctagaaaattcagcaagtacccacagtcctaccacctaatccataacccctggtcracattttggtatatttccttctaattttgttttcatgcacctcttgtttgttctgcaaaaagtacagacgttgtcttttttttttttttgcttctacaaagtactgttacagtagctccaacaaccagtgaaaacaaaatttgttctaatagaaaaatgagcagcagctcaataaaaacagttcactaaacagttgatctacacttacagccagaaaacaaaatgtaaaagttttacctcaccagtaatcaaagaaatgtaatttaaaataatgattccatttttcatctacagttaaaaatataaaaacaataatatctgcttccgatgaggaagtagtgacataatygccctcatagaaggccgtgttgagtgtaaatctccaagtttgtgttttgtcaacacgaatcagcctggaagtgcccatacccttgatctggtaattctgcttcttaacaatctgtgctaagagatttatctgagaaaggttcaaagatgtctgcattcttctttattagactgaaaatttggaagcaacctgaatgttacctattgagaaacaaatacattatagtttattcatctggacaaggaactattttgcaggtatttaaaacatcttaaagaatagctgtgcacctttgaaaaaaaaagttcacaatataacaatgggcttaaagggtaaagagaagaatatgtgacctagttcacattttataaatattcatgttatgtccatgagggagagcgggacagcagatccagttttcacaatggttatccatggctcacaggactacaggtgatttttactttctttatgccttcccgtagttcccaaattattttcaatgagtatttcatttgtgtacagggggaaaaagttacttaaaaaacggaaaaagaagaaaatcactcctttgcagcagcttatgaagcattttaacaacgaaaggtggggaaatccccaagatagacaagccctttcttcccctctgactttggctgatccatctgctgacaaactgctgactgtattctcaagagatcgaagaaataaaacaggctctagcaaggcctttgttgaagtcttctcagcttccttagagctgttgcttctccccctcccttccttctctggatccctccctcttttggtgcttttcctgaggctggtggctacatttgtttggtgcttgaagtcattctttcatcaataatttgtaaagtgatttagagctttctaacagcaacctacagtttgctctaataaactaacgtggtaaagagtcggaattcaggctgctgggtgacagaccagcatgccattttactctgccctggtcagcatgtggttttggttctgctaaaaggacacttccgactctacctccatttgtttagcatttctactctcagtgaacttttagtaactgaatgcccaaaggaggagactacaaaaagcaaattatagtacatcaccttgatggaatattacctagctgttaaaaatgacaataactaggttgcascatcaaaaagtattaccaaagaaaaacaggaaacaaattaatatctatatatagttacaacaatgtaaaaatatacatttgtattggaaggaaatagaggaagcagggaaaaagaaaatttaatggcagatgagaaattttttaaattcggcaataaatattgaaatttcatcatataccagacactatgcaagacccttgtatttttttaaggtagtttaataataagttgtaaagaagtataaagtaggggtggtggaattcatttgcaaagatgttattatgggcagcctggctctatccgaagggaacactgaatgtgtcattcttttccacactgaatttatgtaaaacgtcctgtgctggactccagttggtctgttcagtccttagtgagcagatggggcttttcccccttgccttgcatgtcattcttttatccatgcactcaataggtacggagccctgctgtcagccaggtcctgttcagctgcagctgatacatagggaccaggatgacaaggctctgccctcatggagcttccaggcattgcgaaagacagacactaaactaaataagtgaataagttcatctgcagtgtgatttcaagtagtgacacccgcagtgaagaaaagtaaaggagtgtgtggggcagagagtgaagtgaaaagcagtaactcattttaaggagagtcagggaagactcctgagaaagcagggaaktaagggaccatggaaaggctggggacatagcgggaacagcacgtgcaaaggcactgaggcagaaccgagtttgacatggctgtgggaagaaacgtgttcagagagggaagcaggggctgggacatgtagggctgtgtrggcctcagcctggggtctaagtgagatggagggttttaaggggtgggacagatttactcatttagcatgtgatctgacttattgagagaatggactgtcagagaagagggtagcagagggctgttagaggctttcagccgtctgggtggcctggactgggagggcgggcacaggaatggagagagtcagggtcactctgaaggcagaatgcacagggcatgctctgtagggtgtgaggaaaagccaggagacaaggacacatcctgggtttgggactaagtgagcaggtgaatagtgatgtcattttctgggaggaagaaggaataggttttattattcctgggtgaacatttgcctagctttgattccagtgtgctaagttagtctgggagctgctcctcactcccagaattccctggctgtctcttcagggcaggaaaaggatttctagggatacaggagagaccaccagcctaggagctgggaaacgtgagtctggtccacctctgctacaaaagagcagtgtttttttgtttttgtttttttctttttttttttcttttactttaagttccgggattcatgtgcagaactgcaagttatttacataggtatacatgtgccatggtggtttgctgcacccgtcaacccgtcatctaggttttaagccccggaggcattagatatttgtcctaatgctctccctccccttgccctctacctctcgacaggccccggtatgtgatgttccccttcctgtgtccatgtgttctcattcttcarttcccacttatgagtgagaacatgtggtatttggttttctgttcttgtgttagtttgctgagaatgatggtttccagcttcatctgtgttgctgcagaagacatgaactcattcttttttatggctgcatagtattccatggtgtatatgtgccacattttctttttccagtctatcactgatgggcatttgggttggttccaagcctttgctcaaaatagcagttttatagagagattataactttccccctcagaacgcggtttcttgtatacctgcccagcttgcctttcagagctttgtcaaccgcttaaagcctaattcaggtgaataacggtgtcatcattgttacctgcattcctgtgcatgagcagtcacagcctgggtcctcagaggaccatccccgatgtgccagctgtgttcataataaaccccactgacacgtccccggcccctcacctggttctgccgcacgcccatcacctgcccagccctgcgcactagtatgcaaaactacagctgagaaagagtcccttcaagagtgagaccaagggatgatgtccttatgaatccctgagtatccagaaaattaaactggcatgtcattctctgaggatttctgccaactaaggtgattcgcttgttttcatgatcactgccctcctatgttagcaaatgctgcgctttatttccaagagctatttccatcacccttaccctagagtaagccagctgtataaacaaaaagctgcaacaaggagctagcttcaccctccaagcactgcttagtgcttccagtcaggaagcttctttctstctcttaaataccatctcaaaaatcccagtacctgtcacctaaaggagacatcttacacattgagtggagaggtggaatggatgttgaaaggacaatttagggagctaatctcagccatcagatgtttttcttgctaacaggagccgaattctattatgtttgtgaaaggactctattaagacaggtttctgtgactcccagcactctatttaagcttctgaagtcattcagattgcccattcaccagccagggaagaatttgtgtgccttcccccttagcaatcaaggaaaaaagattaagtggagccggagagcaattttctttataatttctcttcttgaagtaaagaaactcagaacccttgaccctaaacaccgtggaacccatggaggctcatgatatcagtgtgtggggttgtcacttggaggcaggaggctcttcacagccagcccaagaagcagcagaggcagccgcaagcagaatggaagcaaaaggggagggttcctatcatttggggccagaaccaatcaatagtttcctcacatctgccatttcaaggaagaatttttttcccttgtacgtatagttgctttttcataaaggattcattatttttgagccaggtacaggaactaagatccccccttggtttcctctgggtctcttcacactaaagtattgaaaagatttaggtggggagatccaatggctggcttcagaactgccctgtccagtccttccaacccatcctaaatcgtggccacgcaggtgagcagttaggcctctttgcaacaccctgcaagtcactattgcaccagggtggctttagtcctgaggtgactggcccactgtgtgactgcagtgaatgaggggtgtcctcaggacctggcctactctgctgcacagtgtaggcagaacttggattggggagcaatttaagccagagtgactctgggctggagaaggcattttaaattctacctggagtagataaagcgtacgaggtttttgctttaggcctagggggctggacgctggggtaaggggaacatgstataccctctcttggaccagctaccataggcctcacccaggaccagagctgaggccgcactcaagggcttcctagaagaggcccatattgggccccttcctattcaagtctagttgcttgacaatatttcctccaattttaaggtgagaaaactctccttgtattagcaaaaatgaagactgtaatttttaaatgatgttatttagattgaataactttagaatactcttcccacaagaccactcggaggatattcagatcacttctgctgcctcaggattcccacgtgaagggtgaaaatgatgccggagctgaatttacagctcccagaagcacgcccaagaaagactggtggatgatgagatttcatctgtttcccctgcatttcttagcacagtgcctgggccatagtgagtgctcaatagatgtctgcagaagtcatgcaggtttgatattgtgggtgataacagtctttctttctatgaactttttaaaactattattatacttttaagttttagggtacatgtgcacaacatgcaggtttgttacatatgtatacatgtgccatgttggtgtgctgcacccattaactcgtcatttaacattaggtatatctcctaatgctcyccccccccgctgcccacaccacgcaacaggccccagtgtgtgatgttccccttcctgtgtccatgtgttctcattgttcaattcccacctatgagtgagaacatgtggtgttcggttttttgtccttgctatagtttgctaagaatgatggtttccagcttcatccatgtccctacaaagaacatgaactcatccttttttatggctgcatagtattccatggtatatatgtgccacattttcttaatccagtctttcattgttggacatttgggttggttccaagtctttgctattgtgaatagtgccacaataaacatacatgtgcatgtgtctttataacagcatgttttataatcctttgggtatatacccagtaatgggatggctgggtcaaatggtatttcagttctagatccctgaggaattgccacactgacttccacaatggttgaactagtttacagtcccaccaayagtgtgaaagtgttcctatttctccacatcctctccagcacctgttgtttcctgactttttaatgatcgctattctaactggtgtgagatggtatctcattgtggttttgatttgcatttctctgatggccagtgatgatgagcattttttcatgtgtctgttggctgcatagatgtcttcttttgagaagtatctgttcatatcctttgcccactttttgatggggttgtttttttcttgtaaatttgtttgagttcattgtagattctgggtattagccctttgtcagataagtagatkgcaaaaattttctcccattttgtaggttgcctgttcattctgatggtagtttcttttgctgtgcagaagctctttagtttaattagatcccatttgtcaattttggcttttgttgccattgcttttggtgttttagacacgaagtccttgcccrtgcctatgccctgaatggtattgcctaggttttcttctagggtttttatggttttaggtctaacatttaagtctttaatccatctcgcattaatttttgtataaggtgtaagaaagggatccagtttcagctttctacatatggctagccagttttcccagcaccatttattaaatagggaatcctttccccattgcttgtttttctcaggtttgtcaaagatcagatagttgtagatatgcggcattatttctgagggctctgttctgctccattggtctatatctctgttttggtaccartaycatgctgttttggttactgtagccttgcagtatagtttgaagtcaggtagggtgatacctccagctttgttcttttggtttaggattgacttggcaatgtgggctcttttttggttccatatgaactttaaagtagtttttttccaattctgtgaagaaagtcattggtaacttgatgggtatggcattgaatctgtaaattaccttgggcagtatggccattttcatgatattgattcttcctacccatgagtgtggaatgttcttccatttgtttgtatcctcttttatttctttgagcagtggtttgtagttctccttgaagaggtccttcacgtcccttgtaagttggattcctaggtattttattctctttgaagcaattgtgaatgggagttcactcatgatttggctctctgtttgtctgttattggtgcataagaatacttgtgatttttgcacattgattttgtatcctgagactttgctgaagttgcctatcagcttaaggagattttgggctgagacgatgggattttctagatatacaatcatgtcatctgcaaacagggacaatttgacttcctcttttcctaattgaatacactttatttccttctcctgcctgattgccctggccagaacttccaacactgtgttgaataggagtggtgggagagggcatccctgtcttgtgccagttttcaaagggaatgcttccagtttttgcccattcagtatgaaattggctgtgggttcgtcatacataactcttattatcttgagatacgtcccatcaatacctaatttattgagagtttttagcatgaagtgttgttgaattttgtcaaaggccttttctgcatctattgagataatcgtgtggtttttgtctttggttctgtttatatgctggattacgtttatcgatttgcgtatgttgaagcagccttgcatcccagggatgaagcccacttgatcatggtggataagctttttgatgtgctgctggatttggtttgccagtatattattgaggatttttgcattgatgttcatgagggatattggtctaaaattctctttttttgttgtgtctctgccaggctttggtatcaggatgatgctggcctcataaaatgagttagggaggattccccctttttctattgattggaatagtttcaacaggaatggtaccagctcctccttgtatgtctggtagaattcggctgtgaatccatctggtcctggactttttttggttggtaagctattaattattgcctcaatttcagagcctgttattggtctattcagagattcaacttcttcctggtttagtcttgggagggtgtatgtgtcgaggaatttatccattgcttctagattttctagtttatttgcatagaggtgtttatagtattctctgatggtagtttgtatttctgtgggatcagtggtgatatcccctttatcattttttattgtgtctatttgattcttctctcttttcttctttattagtcttgctagcagtctctcaattttgttgatcttttcaaaaaaccagctcctgggttcattgattttttgaagggttttttgtgtctctatttccttgagttctgctctgatcttagttatttcttgccttctagcttttgaatgtgtttgctcttgcttctctagttcttttaattgtgatgttagggtgtcaattttagatctttcctgctttctcttgtgggcatttagtgctataaatttccctctacacactgctttgaatgcgtcccagagattctggtatgttgtgtctttgttctcgttggtttcaaagaacatctttatttctgccttcatttcgttatgtccccagtagtcattcaggagcaggttgttcagtttccatgtagttgagcggttttgagtgagtttcttaatcctgagttctagtttgattgcactgtggtctgagaaacagtttgttataatttctgttcttttacatttgctgaggagtgctttacttccaagtatgtggtcaattttggaataggtgtggtgtggtgctgaaaaaaatgtatattctgttgatttggggtggagagttctgtagatgtctattaggtccgcttggtgcagagctgagttcagttcctggatatgcttgttaacttcctgtctcgttgatctgtctaatgttgaccgtrgggtgttaaagtctcccattattattgtgtgggagtctaagtctctttgtaggtctctaaggacttgctttatgaatctgggtgctcctgtattgggtgcatatatatttaggatagttagctcttcttgttgaattgatccctttaccattatgtaatggccttctttgtctcttttgatcttgttggtttaaagtctgttttatccaagactaggattgcaacctctgcctttttttattttccatgtgcttggtagatcttccttcatccctttattttgagcctatgtgtgtctctgcacgtgagatggtttcctgaatacagcacactgatgggtcttgactttttatccaatttgccagtctgtgtcttttaattggagcatttagyccatttacatttaargttaatattgttatgtgtgaatttgatcctgtcattatgatgttagctggttattgtgctcgttagttgatgccgtttcttcctagcctcgatggtctttacaatttggcatgattttgcagtggctagtactggttgttcctttccatgtttagtgcttccttcaggagctcttttagggcaggcctggtggtgacaaaatctctcagcatttgcttgtctgtaaaggattttatttctccttcacttatgaagcttagtttggctggatatgaaattctgggttgaaaattcttttctttaagaatgttgaatattggcccccactctcttctggcttgtagagtttctgccgagagatccgctgttagtctgatgggcttccctttcagggtaacccgacctttctctctggctgcccttaacattttttccttcatttcaactttggtgaatctgacaattacgtgtcttggagttgctcttctcgaggagtatctttgtgacattctctgtatttcctgaatttgaatgttggcctcccttgctagattggagaagttctcctggataatatcctgcggagtgttttccaacttggttccattctccccgtcactttcaagtacaccaatcagacgtagatttggtcttttcacatagtcccatatttcttggaggccttgttcatttatttttattcttttttctctaaacttctcttctcgcttcatttcgttcatttgatcttccatcactgataccctttcttccatttgatcgaatcggctaccgaggcttgtgcattcatcacatagttctcgtgccgtggttttcaggtcctttaaggacttccctgcattggttattccagttagccattcatctaattttttttcaaggtttttagcttatttgcaatgggttcaaacttcctcctttagctcggagtagtttgatcgtctgaagccttcttctctcaactcgtcaaagtcattctccattcagctttgttccattgctggtgaggagctgcgttcctttggaggaggagaggtgctctgatttttagagtttccagttttgctgctctgttttttccccatctttgtggttttatctacccttggtctttgatgatggtgacgtacagatggggttttggtgtggatgtcctttctgttcattarttttccttctaacagtcaggaccctcagctataggtctgttggagtttgctggaggtccactccagaccstgtttgcctgggtatcagcagtggaggctgcagaacagcggatactggtgaacagcaaatgttgctgcctgatcgttcctctggaagttttgtctcagaggagtacccggccgtgtgaggtgtcagtctgcccctactgggggatgcctcccagttaggctactcaggggtcagggacccacttgaggaggcagtctgcctgttctcagatctccagctgcgtgctgggagaaccactgctctcttcaaagctgtcagacagggacatttaagtctgcagaggtttctgctgccttttgtttggctatgcatgcccccagaggtagagtctacagaggcaggcagacctccttgagctgcagtgggctccacccagttcgagcttcctggccgctttgtttacctactcacaccttgtcaatggcaggtgcccctcccctagcctcgctgccaccttgcagtttgatctcagactgctgtgctagcaatgagcgaggctccgtgggcgtaggaccctccgagccaggcgcgggatataatctcctggtgtgctgtttgctaagaccactggaaaagcacagtattagggtgggagtgacccgattttccaggtgccatctgtcacccctttctttgactaggaaagggaattccctgaccccttgtgcttcccgggtgaggcgataccttccgctgcttcggctcatgctcggtgcgctgcacccactgttctgcacccactgtccgacactgcccagtgagatgaacccggtacctcagttggaaatgcagaaatcacccgtcttctgcatcactcatgctgggagctgyagactggagctgttcctattcggccatcttggctccaccccccttctatgaatttcttaggctgtttaaaatttatctcaacctcagctgccaaagtaataactagccctttttgtatcttttggcaaaccatatattcactgctttggcctggggttccctttcccgtccatcaaaacattggctaagtactcactctgcaccacacactgggctgggcactgtgaagtcatgctcagaactgactttgataataggatttttgaaaactagattgaaggaaaatagataggcaaaagctaatgggcttaaaaaatatactgcttaatggttaaaaatcttaatctgtttatgttaaacaatgttagcagaggaatatgaaattatttctataatgtataaaaatcgataatagatgctggtgtgaaaatacatgtaatgacgaatgtattgaatttgtarcctgtgaacatgtgggayatgatgtgtgtgcgtcactatttttatatccttgtatgttggtcaagatatttaaaaggtgtcagaaaggccaaatcaggggtgctgtcaccaagcccaccaagttgctgccaaccctcccaagcttcagaggtaatactctggctctttatcccacctcctttttttctccccaccagaaatgaggatccttatagattcaggttagtcaataccatatttcccttccccatcccgttgttttgtgttagactttgtattagagaatttgtatttcatctgttttgcaaaacaaatattaacaataagttattattgtactcttctggcatagtaacatcctgttagtttactttacacatagcaaatccagcctgacattcatctttaatgatctcaggataaatggttttaaggttaaacagccacagagacaactgtcacacgttgtcagctggaacagatgaaagagaaaaatgtggcatctgaaaagcaacttgcaaaatgatctaaatattttactttattttcagaaaaccctcaccagatctgccccctcaccactaatcctggagcagcctgatgacttatggggaatccattgcttagctttgatgtagggagggagagatgaacgactgcctcccaaagcgtggctgctgagcaggatattaatgggcaaggcggctaatgcgtttgcattgttctgcagaagttttgcactgctttggggaatcatttatccttagcagttgcaaggtggcctgttttcaagtaaacctagagtaaaaatctggttatctattgccatgtaacaaactgcctcaaaactttgtgacataaagcactgattttattgtgctcacgtgtccttgtctccattctgtgatgctggggccttgtctgggaagactcgaagactgggagtgactgcttggctaggctgggatgaggcatctttacttacacatctggcactggacgctggctggctgctgggacttgctggggtgatggctggagaacatttcacctctccaagcggcctggccttccttactgcagtgtcttctgaattgttagcttccttatatggtagcaagtgtgcaagtcagcaggtggaagctccgctatctttgtcacctagcctcagaagtcacatagcatcatttccaccgccctctactagcgggagcagtcataaaagcccacccattttcaaggcaagaggtcatagcctgcgcctctcaaagggaggattgtcaaagccgcactggaagatcatgtaagttggatgatagcattgctgctgtatttgagagattgtgctgtgctctatgtagaggtttctgtaggaaataaacaagttgagttctctggtgaaaacacatctgaaaacatgttaataggaatatagctaatccttagcatttcttatagtagctaaggtcagtgtatgctaggcctggtacctgagcagcagtcttgatgctaagttaacaacaggtagccaacaggagtgttttctagctatttggaaattgaaattcaaccaaaaaagctactgccactctgaatcagttacatcatgataccttagatctaggctaccttttttcctgaataatagaaggttacattgattagaaattatggggaaagtagattccttcatataagaattggttaaagtttgactctgttctctgttaaagtaagcagctttttaaataattgagttctttggaggagtttttatattttatatattttttacctatttagccatgataaatagaatcagataagagaccgagtgtgaatattcagcacgaccttcaaccaggtgtatatatttctctctatgttctaaaggactcagcaatgtgtagtgcctatgagttctcatttgaaaaaggaggmatcctatatggaatgccatgtaacggccaggtgcagtggctcatacctataatcccagccctttggaggcctaggcaggaggattgcttcaggccgggagtttgagatcagcctggcaacatagtgagaaccccccacacctctacaaaaaaaaaaaaaattagccaaacttgctggcacgcacctgtagtcctgrccattggggaggctaaggtgtgaggatcgtttgagccctggaagagttcgaggccgcagtgagctatgctcacactattgcactacagcctgggtgatagagcaagaccccatctctaaaagaaaaaaacagatatatataaatgccatgtaagcttttacacttgtatttcttgtctcaattctggttttttcttgagcaatttcttcttttcattctcatgaaagttaaggtgatgacgctgtgcttacccacaaactgtgtatccacgtagccttcactgccatttgtcctgagccttttcaagaagcataaatcccagaatgatcgaaacatctcttagatcccagagtgacttaagatccatgctaggaattaatcctgcttcctaggaagttacacaacagcagcatttgtgrcagtgccacagcaagccagggactggcccacgggcggtacgctgtcattcccagtgctttctctgccttccagagaaacaggaatttgccacatgtctgtgactcatttgctggagctgttaagtggtgatggtgtttaaaatctcagggaagtaaagccaccatttactgaacacttcctgtgtgccgtgcactcagttgtaaccacattattttacttggtcttgacgagaagcctttaaaggcacttttattatcccaattttacagatgaggaaattgaagttctgggaggatgagtaacttgtagaaggtcacaccatatataagtaatggacccagcctctccaactactctcagctgattatagagattaaattagaagcagttcttcctttcttggaaaagtaaacctaatggggaactcagaagccataaaggaaaagagtgattaatttagccacgtaaacatttaaggcttctgctcaacaaaccgcaccaaaaaattggatcaggaatgtataacaaactagtgggtggggaaggagactgccaggctgtgataaaaggccaattttttaaaacataacaaaaaactcttcaacagtcagtgagcacgagacatacagactgctgtgaacatgggacaggatgctcagcctcactcatgattagagaaatacaaattatttgctgcaaatgacattttcagctgtaggtttgacaaagattttagaagtggataatgttcagtgctgtcaagcgtgcaggacaacaggtaccctccatctacattgtctgtggacatgcaaatcggtacaactctatattaaaactgaaaatacacactctttgactcagcatttatttattccacaaatattttaatataggtattcaaagatacgggtactgcaatattcattgcaatgccagaaacttcatcaatagaagactgattaaataaattgtagaatgtttgtactagcaaacactagtagccattattattttttatttgaatcttgttttatattttagcactttatacagcttgtctcattaagtatcacccagctaagattttttttatagggcatggcacatatattttgttttgtttccttatatttttgctctggatctcatgtgtagccagtagagatatgaaattaaatattccacaataggtatggcccctcaagtagccattataaagtattctrtacaccattaagtaaagaaaacaaagatgtattgaaagaactaaggtataaaatattctataaattattcyattttttgtttgtatgaacatgtaaacctttgtgcataggaaatatctataaagatagaaaggaaatcattaacaattatctactgaggactggaattgagggtattatctactttgcagttcatatgcatacaatttaaattttttactatgaacatacatcatttttataataaaatgctcatttctaaaaatacaatgtggaagacattcatttattagggccctgtttgcaagaagcagcataagtaaatcatcccatgttgacagataaaacttatccaaccatggagaacagatatcagtgacttaataagcagtaaagataataaaagttttagcaaaaccagctagaacctcttgggagtgagtttctctagctaggtgagttcttcagcctagcagaaataggagaaaatagtttttttggaaagatactttctgaagtcttatccaattccatgtatacgttaataccttttttttttctatttacaaagtgacacattgattgtcaaaatttggaaaataccggtaagctcacatgggctttatttttaacaggctacaaatttaaatacagataacaattgcaagattatgtctaagcaaagagagcaaattgatggccgaactgatgattgattagaatgacttttgtctttttaaaattgagttatataagaggtgaaggaaacagaccgatggctggagaatttgacaacgtataagagaatctgagaattcctttgaaaaacgctcagatttccagccaagatagagtcacatccaccattgaagggaatcttaagccatcattgcataaaactttggagatgaaagacttctaactccttcattttacaaagaaaaaattgggctctaattttttcattaattcaatttaaaaataatgagtatccaatgcaatactctttccacttcctgaccctgtctgatgcaagaagaatatttttctaggacattcctcattattgacttgagaaataagtatggctttcaacaaacaaaggcaaaatcatgagatataactaaaattgatgattcacctttgaagtagtttcaggtcattgttttaataccttgttcacacagaacctgttttgcattcatttgcagacttcaaatatctcatttcagggtgaagtttagctgagtggcattagagccctgtgaactctccttggttgggcatgaagtgagaggtctgaaaagaatatcaagctaaatcctcaacttaaaagcaacacttgtttttttaatttaaaaaaaaatccaatattatttcaattttcttcgcagcagattgtgtcatgctctttagttagaactcaatgtagaaaatgcagcatgggttgaagtagacagcagaagtgaaagccaaataatgatgtctgattctcgctcgctgtgatatgggaggacaagggaagaaaagataaagcacyacagccagcagcactgatttaggaaatatcttactcacaaggtttattagactcttcttgcactgctataaagaaatacctgagactaaataatttataaagacagaggtttagttggctgttagttctgcaggctgtacaggaagtatcatgctggcatatgctcagcttctagggaggcctcgggaagctcacaatcatggtggaaggccgaggggctgcaggcacgtcacatggcgaaagcaggagcaagtgagagagagtagggggagggaggtgccacacgcaccagaattcatgagaactcactgcgccatgacggatccacccctaggatccaaacacctcccaccaggccccacctccagcattggggattataactcagcatgagatttgggcagggacaagtatccaaaccatatcacaaggaaagcttccggagctgaggcaacccttctaacatgtgaggtcttgccaagtttcaccagtggtcctggaggttaggtgagttattaggatcaagatcttcaagcaatgtcccccatataaatggaatctgggcagttctccagcaggctcaccaggcctcatatcacctctgccaggctcctggacctggcccacagggtgtgggtccggctgattagtgtatcagtcaggatcgcccaggcttgtgttgcagtaacaaatcacctgagaatctctgtgaactcacccaacagaagtgtgtttctcactctggccatgtgtgggtggggtgccctctgcatcattctcacacacasagctggtctgtgggggatcttctctctcggttgttcctggggctgctgggctgcagggaaccaagccacaccacctgcgtgtcctgccaactgctaaggggcgggcacaggcaattcccccatgtgcctggaagcagagggaaggcactgtgctgtgcaggtaactcagactgctgggaagggctgtatatcaaagtagactacagttcacagggtctttgggatcctggtagggccttttacaagcccaccccatagcaacagccccctgtagagtggcattgaatgtgatagggttacttctccacagggagcctgctaccaggaatcattcagacttctcaagcccttctcttgttctctctcattaacttctttaatggtctccttcctcattccttcccctttaagtctacttctgctaagggatgcttgattcctctttgcacagttcagctttggttacatcatttcctcacacagaaatgtttggaggtttccctttctctacagttttgcaactcaaacttgtccatagaccagcagtatcaacatcagctggggtcttgctaaaatgcagcctctcaggccccaccccagacctgcagaatcagggtctggatcttaacaggatcacaggagatttttttttttttttgaggtggcgtctcactctgtcgtccaggctggagtgcagtggcrcgatctcggctcactgcaacctccgcctgctgggttcaagcaattctcctgcctcagcctcccaagtaactgggactacaggcacacaccaccatgcctggctaagtttttgtatttttagtagagatgaggtttcaccatgctggccaggctggtcgagatttcatacattaaagtttgaaaagcacttatgcctagtactgggtctcaaatttggcagcacagttgaattatctggaaggcttcaaaaactgccaattcccagtttccaggtctggactgggrccttgcaccgagatcttttaaagctctcaggtgactatcatgggtgagaatttgagaactctggagtttaggaactcaggggacactcccaaccacctatagtgtggctcccaaaccttccctgtgccrtctttcactctaactatatcgactgacctccagtccccgaacgctctatgcttttatataatgtgttttagactattagcagaagtcaccaggcattgtacatgctgccttctcatgactggagagggcctaggatgactgcatctaaatttttcattgaaaatgccacgrctacaagtcacggagacataaatacatgcattcactcaattgtacatttagttttccttattagtaaaatgtaaggcttgattcatccagatgacagcttactgtggtactatgtatctttttttgttttagtcttattgaacgtcaaaaatatgatggggaattggaagaatatgcttgtttcattgagttaactttgggagttataaactgaggagcttttaaaaatatatatatctcagtagcagtggcaatttcttttttttttttgagatgaagtcttgcgctgtcacccaggctggagtgcaatggcacagtctcagctcactgcgacctccmcctcccgggttctcctgcctcagcctcccaagtagctgggaatacaggtgcgcaccaccatgtccagctgatttttgtatttttagtagagacggggtttcaccatgttggccaggctggtctcgaactccggactttgtgatgcacccrcctcggcctcccaaagtgctgggattacaggcgtggccacaactgcttttcattactctcactgcttcacctccacctgtgatcagtgacacacgtttgagagacacctggctttggagacagaaatcaggatccttgacctctttattacctttcctaatggaatgaggttgcacacgtgggccgcgctctgctgcacaccagcagttcagagagtcctgtcgtttgggggagcactcctctgtcactacagcacctattgttgtaaaaccttacccactattttttccaaacgacctcagataaatactttacttgatgtttttattcgcgcaaggtgttaatttctaacaagacttttatgagcacagcaagcagcagttgctttttcatgtgaacattaaataagactcaaggtatgaaaagcctgctgcaaagggtccagaaggatctatgggatttggtgggctgcagcagacaaatggcctgccagtctgtgacaagtgtgcagtcaccgtgggcgccagccttgggaggcacaggatccgctaagtcgtcgggattaccgggctctgcccctagcagcccccggagagttagggccccgtgtgcacatctctgcaaaggctgttggtcaaacacatgaaaagccggtgttagtggtrtctgcctgagccaccgtaaatcacctctccctctgggctgccactgcaccttgtctgtgcacagtctggaggcgtggggcgtgtgtcattgggggaagcatgcagttcagggtcctgttatgtccatatgaatgtgaacgtgaaagcatttcctggcgcctctgtgctgggctattattgggaccaaggactcacacacaacagtgacatcatccaggcgcagaatagattgtactgaaacgtcagaagccagataccaggttctctctcacaaacagttgttttaagtgccaatatcaaggcttgacagtgttagtgctggcaggacttttgtttttcattatccccatcttcatccctaaacgaacagtagcaatgcagagaaatagtcattagaatgaactaaattaaaatcaggaagcagttaactttatgtcgactctaagataatgttagtaaataaaaaggctaattggaattctcagtattctaataagaactttttattagtaggttatttgtgctttaatgggctgctcgtggcatgtggttgagtcgtgatgcttttcattactcatttttattaacatatacggtaaatattaaaatagatctcggcagcaataacataggtagaaaatgatgggtggcttgtcagatacaaaatacagcagcatacttacagatgtgttctcatgattttcaaatttatgttggctattttttaactttgtcaagcctttctctgacttctgctttattgtactgctgttcttgacattcctccctttcccaaccagatggaaactttggtgtagcttatagaaggtgtcccaaaagctaggactttgacagccaatgatatgtatcttttttaaatatttcattcagagtaagcaaatgagcaacagcaagggaaaaacacattttagtatttttctccctgttagacattgcttggtgctttttaactaggataccagaaagcgaagtatttcaaagtgttcctttagcaaactatatatgctcaaccagatttctagtagcatttttcttcagtgtttaaaaaagtgaacttttaacttttactttctattcttcttatccttctgtaagtgatatgtgtacttttggccctgtttagaacagataaaatataactttaatttttcttggataattaaaatgtttttctaatgggttgtaatccataatgtttctagaatttggtggaaagtcaattcactaatttaatggattagtgtaggtcagttcttactgtaaactttaaaaggtataagagctccaggctagattggaacttgtccctaagtcatagttggggagtttttgttttattttgtaaaaacactcatctcacgtttcctaaaaatgaaataaggcagcaaaataatactcatccaaggattctggttacttgggttttatagctaactaggattttattttggttttcctttccctttcatgcccccaaacatttaggactaagagaatgaggagggaggcccaggctggagggctcctggacagggtcttggggggacttatctttcctgtaccccctgggatgtctctgtgttcacccttggggacaccaagaaatttcatatgaagggactttggtggaactcccacaggccctgctttggttttgtggatatcggcttttcagtgttacgggatccttctgcttcaaagtaaaactaggtctgaaattttcaagctcaaaaacttccataggtaaaacttttaatggaaacaaatwactttttttaaaattgaaacatttgtcaaaagcaaatatagctgccaagcctgtggattatacattttggttccaaagagtgatgaacctctggtagccacagggatgggagattttcacactgttgtgattctgaagtcaccaacttaacaactggaaccaagcacaatccacgctgttcagtgccttctgactgtctgcttactctccgctgggtgctgaaaagcccagcccacctgttgcttaagacccagtacattattttagaaaataaggtttgtgggtccctagtggtctctgtgggctaactagtgggtctgctggcagcttggtaattttagaggaatatgaaatataagatcaattgtgatttttgcagctatcccattgtattcttagtaacactttatagcagatatacattttatcccacaactctgggtgtgagaaatgttgccaccttctatttgtctaaatttgatttcatctacttcacactacctcttcctccctctacccacacacagaccagatttggggaaggccttgggaacatttgggaaaacgccctctcaacctaccatcttggcctgagagtctcttcaaggcagacagctcctctgcttccgtgcaaaggtggacacaggggcttttcactagggccccagaagctccagctcttgmtgttcagtccgtcctgtatcccagagctctcccacagaggccctgccacccttggaaaaggctgtgcaggcctgggttcctggcttctccttctcttaggatcctccaacctcttgccttcccggcttgtgcctcctaaactgtcccgatctagctgtttctcctccctctctgagctccttcctccctcttcctccttcctctgccgcctcctccctttagtgagctttagaaacataatgctgggttctccttcctacagcagtggagatggggtcagatgccaacgctggtcagcttagttttcatgatgatggtcttagtccatgctggctgctgtaacaaaccaccatagactgggacaacagaaacttattcctcacagttctggaagctgggaaggccaaggtcaaggcaccagcagatttggtgtctgtgagggcccacctcttggctcatagatggttgtcttcttgctgcatctttacatgtcacaggggcaagggagctctccagggcccctttataaagacaccaatcccttcataagggctctgccctcctgacctaatcacttcccaaaggccccacctcctcagaccatcatcttgggggttaggattttaacatgaatttggagggaacataaacactcacttcagagtaatgataaagtatattgcccatatgctacaaggactgtcttggtcacttttcagctgacatttaagtaaaagagtataattctctgcaactatgttttgtctcattcacgtgtcaatatatacatatgctagatttccctttgcaacaatggttggatcagttcaaagtggttcattgacgtccaaaaaaagtgaaaataatgcgtaaatcctagaactcaagacatacgcaagaggtaataattaagcttctactgtgcctgtggattgtgaatctacaagagtcatgattttayaaaagcagccccaaaaggaaaatacaaataggaaatataataaggaacatctgaagattcgaacttatttgcactgcagaggcactgaactctggcctttggtagttgtctgttaacggaattctgttaaatagtttcctcatttgtaaatgcagatgataatagaacttgcttcagggtggttgtgaggcataaatgaggtaatacatgtggcatgcttgtgtacatgttgatgtgctgtctgggctgtcattattatagttctcaaaattattattattaatataaaacacagccatctctctaagcctatcaggtttttccagaatgaattaaaataacagtgctttrttacggaaatgctacatttggtcattcaagatggagaaatggccaaaattgtggcagtaccatgaatagttgtaaaagttggtccaagttacaatctgaccaaataagccataaagtaaatagaaaatatagtttgaatcatgaaattgccgttttttaatagtcccaggtagcgaaatattagaaaatccccatgtttcttctcgacttcatgctcagaggaaaagcagagtgagctgctggcaaaattcctctgctaagtggcagcgtggaggccatgcgaaatgagttgcatgcgccatgaagagcgattgcggtgtgctgaagccacagatcatggcgcttcacacaggtgggttgagagtctgaagaggcactcagtaactgccagtaactggtttcctgtgcctgcctccttacctcgattcaccctgaatttgctgtgcagccagccccctcgatggcagccttgacacctggccgctaaagagggcacagtgcttccgcattctccccactgaaacccaggggcctcgcctgtggctcactgcccttttggtcccatcatattcccaacgttatttccttttgtttgcctatttgcatagtctctgctcgagccatttggaatgttcccatttcttgaacacctccatgcacccatccctcagctcgcgcccctgtgcctccccattctccactttttgagcttatgcccatctttccttgcccatctccagtgcaaccgcacacacaaagccaccccttcttttccagttgcctgcgctcgctgcctcctctgaacctcaatctcactttgccattttctcctcattggtgatcattatcttagtcctctgtgtccagcagtgacgtatttgttttactccatctgttagagaagcagtccccaacgtttttggcagcagggaccagttttgtggaagaccatttttccatggatggggtgggtggggatggtttcaggatgaaactgctccacctcagatcatcaggcatcagattctcataaggagcacacgagctagatccctcgcctgcgcagttgacaatagggttctcactcctatgagaatctaatactgccgctgatgtgacaacaggcagaactcaggtggttatgctcactcacccaaccctcacttcctgccacgcagcctgcttcctagccggacacaaacgggtactggtccacagcccgggggtgggggactcctgtgttagacgacagctctctgagggcaggggctgagtcttgatcaccatcatgattctcccacatagtatgctcgtggtcagtagttctaatcttaaagttggccagtgctgtccccattactctagggccccttcccattccatggcagcattgctgacttcttatggactggaggctcacagggcctggctggtaggtgctacttaccctgcctgggagtcctgacagtagcccagggaggttcttttaaactcgtggctacatcgactgttgggtttcctacaaggaagaccatatttagcttttgaaggaggccttcagctgctaccccaagcaagccagctgcgaatcactggccatgttttaactttctgtgttgttgctccttgtgtatggactgagaaatgcattcagcaactcctccttctgttaatcctattgctacatctccagccttgagatttgccaaatattgctgaatgaaacactcagaacagcattcagacaaggctttgtgagactttgatgtggtctgagaaatttcgagctttccatccgttgatggggctcctgttgtttccatgtcacagtcagcggagctgtgatagagtctgagcagcagcagctcagctttctccagcgcgccttgatgaaccaaaatgttttgtttttgttttagcagaggcacgatcagcacagaacctgtaagcacttgcttgttctcactcacttctattcttccatatgtgcttttcctgcattcttttattagagacctgttggatatcatcatcttgttgccrtatttgccgaaaggaatgaatgtgtccgtgcagtttcctgttgatccctgtctggagttagcagcatggacctaccccaagccgagctggcaatgagggtttcactcataaaaacgactcctcgttaccagttgaggaccaaccattattccaatattacatggatttgaaaaacagattcagcacctgagaataaagtggtaccagggcctttcacaagccgctaagcatctgaaaaccttggtgctagttcaggcttccccacttaggaacacgtggcctaaggggaggcgtagacggttgcaactggatcagagatattgtagataattccttacagcccaggcccacagacttgctcacagtcacccagaatactctggaggaaagccaaaactagagctcaagtctgtatgggtctagtttaggactccgggcagcatcagkctccctctcatttcacattttccaacactagtatccttgtgagtggagcatgaataataccttttctgcctccccaggaggggaagggcaaatctgagcacacatgccagtctactttgaaaatcctgaagccctacactgccagtgtggagcagccacgtccttccgtccacgtgtccatccccggcgcacatctcacagagccccatcttgtccctgggtagcctcggggccccagacaggatgaatctcaggccctgccatcggggcctcacagtccaaaacagaaggccggagttgaacaagcagcggggtgccgccgtgggagcccggggaagaaaggcttggctactaattccttatggctgtggcaaatatcatggaatcttagggactgcctcacagggaaggtgccattggaattgaaccttggagaataagcaagaattcccccaggtggaacaggtcagagggggctactgtgggtagaatgaaaacatgtgggcctcaaagtcatggtgtggttgtagaacagtgaactgtctgggtggtagaagggccgggtagcagagctttgtacaacattgccctggaggtaatgatcagttattgtagaaaatagccccttaattttgtgagaaattttcattccttagatttgcccgggagatgggatttccttatgggttgaacctaaatcttgcattggatggatttttcttttttctttgttttagcatcatttcactctcttatcaggatgtgagatccaaggggacctgtcactggccagctcacacattactcaggaagtcctacatgatcagtgagctccagtttgtcctgtggtcccctaggctgtgggagtccacagctatggccccaggcaggtgtcctgaagggaatcaggtgaaaaggaggctcagtcatggaaactacttcagtttcatccagcagagatctgtaagtggcaaccgagtgtaaagcctctggtcaaaccactcaaagcaggcttcctgctgaagctgagctcatgacaatccccccaaatccttctacacccccacacacccttccctcactttatggtttttagagacagggttttgctcttttgcccaggctggagtacagtggcactatcatagctcactgtagctgtgacctcctgggctcaagccatcctcccacctcagcctcctgagtagctgggactacaggcatacaccaccacacccagctaatttttaaattattttttgtagagacgggacctcactatgttgcccaggctggtcttgaaatcctagcctcaagtgatcatcctgcctcagcttcccaaatcagagaccctttcccttcttaaagatgaatatattaattaactctaaagccagggttgctggccctcatctgtcttaatgggacacttcctcccttgtcgtgaacaacagtaaacaggtcttgaagaagctccatgtctgaaacaaggagttccacggtcatttatggttgcttcrctaattagaagtcttttttaatgaggagaaacattttcatttctcgaagggctttgttgctttgggtgggccagaaggtgtggttggtgggaggtgtggaatgagactgaaggtggggttgaggccatagatgctgagactggaccttaccctcaggacagtggaggcctggcaggtgggcccgagcagaggagggcagtgcctctccttggcaccttttccatcccagctgcacctgccctcacagctggttgaaggaggacagagaatgtggtctcattaactcacttggtgatggctttgtggttcttactgcaaactacaggtaaatctgccagttggaggaactctgatgtacacagtgagctgcttgaagaaaattttctttgcactcacctttggaaagtattctttcctttagtgtaaggttcctggatttaaaaaaaaaatggtttgcacatctttaaagcctacctcactgttttagaagaaaagtttcttaagatcggaagacaatgacattgagaccaagaagaaaattatggtcccctgttgatgttccaagagggtgtgtgtgtgtgtgtgtgtgtgcgtgcgcgtgcatgttggggggtggggttgtggtgtgtgtgtgtgtgcgcgcgcgcgtgtgtgtgtgtgagattctgatgtagtggagctgaaggaaagatactgagcagaggcccgggggcattcccagccctattctccaccttccacccttgttagccaagtgggttttcaagctcttggtgagtgctcatattaaccwgcacttcttagcttgcccaggatgagggggatctcctgtgaaactaatcgttctcctgggctcttgaggctacttgtgctgccacgcatatcayttctatgggccattttcatttaaaacccrtggtggctgctggccaacgcagacccttgtctcctgagatgagtggttgggcctgcccagcagccctccctgcagccaccttctgatggtcctggaragcaagtaggaaggcctttggctttcagagcctctcagtctaatgcattcccattttgcaccaccagcaacctcatatgtgatagagacagatgagcgccgctgtacaacgcwgcrtggtccaagccacatccctcccttggtcaggagattcactgtgggtcactgactgtgatgagactacttagcatcccaggaaagtcagtctcattgctaaatgggaccctttgtgtagtaaatgttggagtcaattagaagttctactcaggccaagatagagtcacaaggactggatttaccttcccatcttaaacaactaaaaactaggcaaaataagtgcaacaagggttttcagacattggacatagagtagtccaggacggtggtcgctgagagggacagcratggaggtgagccctgcggcttcccccgctcacttccccggggggcttcctaggccacagcacggggaggggaccccacacaaagcccaggagtctctcaattcacaagacagagataggaatctgggacgcggaagcatctgtaattctcaaggcagagtgccagacaggcaagagctgcccagagagagggctctggatttccggagaggatcccctggtcctcggctgggcactgatcgatatatgggtgagcataggggctcacgtggcaactgcggaaaaaactccagaaaggacaggcagaaaaatctctgagctcatgtgcatcagggaatagtttgtgctcccagcagccgcgggaggatgaactttgggtatgatactcagaagggtattacttcaatggtggcgaacaaacagccctggactgaaagctgctaacagcttaaaaagcaagtctacaagtcttcttggagaagtgattgattctaggactgggccaggaaatatataagccaatagttaatgcagtaataatataatacaaatatctcataatgccagaaaataagaaagtgctccaaaaaggccacaatattggggaatgggggaatgtcaaaggggaacaggagccaactgaaagagttccaacagccagactggaacacgtaagaagcaaaataaacaatagagtgctggattataacacaaagtataaaataaaaatccatccgattataccaatataaatgaatgcgggatggdtgaatgaatgaatgaatgaatgaatgaagagagaaatctcccatgcacaggaattccaagtaattcatactcttcccccaacaagatggaacataactccccacgctttagtgtgggctgtacataaaggcttccttccagagagaacgggttggaaagggaggaaagaaagtaacttcacagtggaggaagctgacgaccactgcttccaccacgtgaccaaggccaacgtcaagagtgaagccaggctgacagtatgtcccctagctctggtgtgatgagaatggtactcaacctctgcgatcttccacaaaaaagaatcccataaccccggtctaatcacaaggggaaaaaataagacacatgtcaatagagggccattatgcaacattcctgaccaatgctcctcaaaatagtcaatgccacccaaaccaagggaagtctgagaaggtgtcacagccaagagaggctgaggaggcatgacaactaaatgcagtgtgggatcctggacaggaagaggacagcaggggaaaagtgagggaatctgaataaagcrtggatgctggtgaaaataatgtagtgacgttggttcactccttctgactaacatactcgtgtaccaggctaatgtgtgatgttaatatcaggggaasctcagkgggggaaatatggggactctgcagtatctttccaatttttctgtaaatctaaagcttctaaaataaaaagtttattaaaaagtaattatataaacttaattacataattaaaacaaaggcaataaatattttttaaagcgttcactttaccagattattttaaatattaaaaaaataccaagatgaaacaaaatacacagcacagctgaagtagctacctcccccttattctttacctccttctcctttccatcctcactatgacagcccttcctaatatcacaagtgatgttagtggctccatagagtaacataatgaatttagattgaaaaacctgagttacttcattacaaaaataaatcaggccactcagtgccttcagcttgagctatcccttgagataagcagtcagcctgtccaggacccttctggtttccaggcctcccagtctcttgcgagtggcaagtgtccatgagggagtgggtaggtctgggtacctggcatggacctccatggcttctgcacccaccttttagaaccaccgtttcccctactgttcacctgctgttcactttccatctcctcagcaactcggaaatgtagacagttcctgtttctcatgtgagacacacagggctaggagaagcgaattcactcccctacttacaaagctggaaagcggcagagccaagcttccagctaaggcacgtctgatcataaagcctgcagyctttctgctgcagcacctgcctgtcttccagctccctccccacctgtcccagtccttgccgtccttgctttgtaatcctgaacagcttggcctagggagctcctgcactcacactgccaaatcactgctctgtagctgctgtggtcacacagacacagtcaggcatgcacagaggaacctgttacgaatgcttagtcctggagctcacacagtagacacacctagctgtatctaaaatggagtgtacaaaaagcgtacctgtagaactttcactgtcaccgttgtgatccttccatctgataagctttctggaagtaagagaaagagccatgttacaatgtacagtgtgtgccctaccttatcctgacctttgcctccagtgtgcagtcacaaacctttaatggtcctggcaatttggcattatggtggagctgctgatttgtgattttgtctttaaacttttactctctttaacttgacctggaaatggatacatttgacagggaagaaggcaagttatacacagtgtatgtcaggttacactatgtacctagaggtggtagcgttttggttgtaaaacatcagtgtcaatgttgtatctgggcaaagtaatacagtacccagttctatttcaatttccaaaccaggggaatacaaagagcttatgcaagtcaattgtaaaatcactacttattttggcaaatgcttaaaaatgtgtgaattctggatattatcacagaaaaatgaagtttatttctggctcattcttttgtaggacagacctgctcaccttacaaaaggaatagaggtctggagacgttgacgcttaggaaaataaatttaattaacaccacctttatttttcactataaatgacaacctcttactcttgtagcatagcaaatgcaggcacccacagaaattcaggactccggattgctttgctaatcctggtgtgtccatgggcaggtcttgcatgtgagtgagcattgctcaaggtgcaaagagcaccgctaagcagcaccgcagagctttcaaaggggcttttgcatatttgcacaggccattgttgcagacaggagggtggcgctttgagcaggagccccaggatgattcggcccaggtgtaacacggcccctccccagccaagtggcagccccagagaacagtggaaaagcatattgccgtcttgctctactgtgttctccaaagacatgaaatttagtccatatgtttaaatctctctttggctgattgccttgtgcagttgatacatatagtacaacaaaataaaattaaaaaataaatcagtttggaagcaaacttgaaggggagaaaatgctgcagccctgtgcagagagcacatgtgagcatcttaaacacgccattgtgtgtgtgtgtgagtgcgcgtgtgtcgagctttgctttcagagtgccatttataaaatatttatcatagtttcactgatgaggttcaaaaagagcctttgttattgacaaggagccaaagcactttgctagtttaggaggccatcgttgggttgcaagagtgaggacccaggcagaaggcaatgttgggatccaggggacagtgggcaggtctggtaatgtcaggaacagcacacagctgcctccaggttgagccagtcttctaatggcatcgccaatgggaagggtctggaaggacaatccatgggatttattatcctttgctgtccccgcatgtatggccctggggaggaggagtcaggccctctagcacagagtccatgaatgtggctcagttggtcttcttctagctcttgctgctactcctacattttcttctatagcctaaaatcacagagaaaacaaacttattaagtcacaaaaaacagaaccttttgaagataaggagcatcataaaaactaaaaaggttagagccaacaaaggaagacttttgtgagcccctactaggtttcctaatgaccgtggtttctgagggagatgctgaagaaatgggcactcctgaaggagctgacccaaagcaagcagatgagagtaataaaacttcacatccggccaggcgcggtggctcatgcctgtaatcccagcactttgggaggccgaggtgggtggataacctgaggtcaggagttcgagaccagtctggctaacatggtaaaaccccatgtctactaaaaatacaaaaattagctgggtatggtgatgggcgcctctaatcccagctgctgaggaggctgagatgggagaatcgcttgaacccaggaggtagaggttgcagtgagtggagatcgcgccactgcactccagcctgggcaacagagcgagatttcatctcaaaaataaaaaataaaaacaatttgatgtccagtgaacattttacatgtgcaggacactcttctgtgtgccttaaatatatcaacttcatttaactcgtgcacgcccatattactatcctcatgttacatttgagggaactagggttcagactggttaaatatcttgcccagggtcacacagctcataattttgagagtgaggatttgatccagggggtctgatgatagagcctacacatttaaaaactttcaacacatggatttcacctgtacccctgcccacaccctccccagcatgcgtttttcaaagcatacaactcactggcttttcgtatagtcacagagttgtgcgttcgtcgccacagttgattttaaaacgttttcatgaccccgaaagaaacccaagacccctcagcaatcaccgccctttccctgccactgccccctgtctccttgttcctgacaccacagccccaggaaacccctgatctacttgctgtttctacaatttacctattctggacatttgtatataaggaatcatataatatgtggtctcttgtgtctggcttcttttactcagcataatgatgtcaaggttcattcatattatagcatgtatcaatatggcattcctttttattgcagcatagtagttcattgtatgaatatgccatacttatccattcattatttgatggacagttggactgctttcacattttggctatttatgatgctgctatgaacatttatatatgtttttctgtagattaactttaatttctcttgggtgtatgcctaggagtgcagttgctgagttacacatgataactatgtttaaccatttaaggaattaccaaactgttttccaaagtggccacactgttgtatatttgtactagagtgtatgagggttcaaatttctccacatcctcaccaacacttgttattatctcttttttattatagccatcctagtggctacaaagtgttacctcattctaattttgatttgcatttttccctgatggccagtaatattgagagtttttcatgtgcttatttttccagctattcttttgaagctaatttgggatgtcatttcatctataaatactcatatagtatacctataacaggataaagacacttttaaagaacataactgcaatattgctatcactaccttaaaaaagtctctaattattacatatagagtgctcagattttcttgttttccatgtttgtctcatacttaaaagaaaattaattggtttaatctagatccaaacaaggcccacacttacatttggttaatatttatcttgggggtcttgttttttttccagctcaggggatcccccctacccattcccctgagcttgaaaaacaaaacaaatccccaaaatgttgttcctctgctctcattccacaacaatctacacagaggacttctgtggccagatgtacagggatttctccccgccaacaagcaagcaatcagttctgcagcaaacaccagcaggtgtcctccaattcagttctgacactgtctacctggagggcccacaggttgagggctccatctcaccagactgcttccacttaagatgacttcacaagcctcagctggctgtaattcagggaacccacaactccctccttgggtttgattaatttcctagagcagcttacagaactcagaaacatgtaccaacatctactggcttattttgaaggatataacaaaggatacagatgaagaagtgcagagggcaaaatatgggggagggggaatggagcttccatgccctctctgggtacactaccctccaggaacctccacatgctcagctatctggaggctctctatacaccgttctcccaaagcttgtgtggagacttcattggataggcatgttgaagcatggacaaccaggtagatatgtgattggacaaaaagggtgtgatctaatactaatagactgagtggggaacccagcaagtcctgtctcttcagattcttcttcgtctctctgtgcagcattccttccccctgggatgaggcagggccccttcagaaatggggaacttataacctacagtcagacaaggtagataagagaaatgtggggrtagattagagtcctgccttggggagaaaaaggagcagggaaaaagaaggtagaaggtcagagagagattctgttttctaaggcctgcatctgagacctaaagtgccccaatgttgtaacaaaagactgtaacaaaggtcgtgggagttatgagccaggaaccgtggatagaaacatagatatgtatakgtgtgtgtgtgtgtgtgtgtgtgtgtgtgtgtgtgtgtgtctatgtgtatctctctcacaaccccctctctagccattctgttgtttttgaagaaactgggttgttggccctgtgcagtttcccatgtttggaattttgccagttgtatccccatggtgtcatttaacatgttcttctatcctctgtattgcctgaaaactagtagctgaatctagaggcttgatcagatttaagttcatttggtttgggttttggcaagactacttcatgagtggtgtatctacttacttccatatatctctcctttcatgctattgagattgatcaatagattcaggtgttgttaactgaatatatttaattataaaattcccacatcagctttttacataatatattccacagccattgatgagcactgcctaagtccattatccatcagggagctggctttcctcataactctagtaaatgcctcctaagaatgcaacagtgctttttctaccatgccctagttccctcatattgcaaaggcatgaaaatgagaaggtatcagcayatatatatatatatatatakakakasagagtctcactctgtcgcccaggctggagtacagtggcgtgatctctgctcactgcaacctccatctcccaggttcaagtgattctcaaacctcagcctcctgagtaatgggattacaggcgtgtgccaccacgcctggctaatttttgtatttttggtagagatgaagtttcaccatgttggccaggctggtctggamctcctgacctcaagagatccacctgcctcagcctcccaaagtgctgggattacaggtgtgagccaccatgcccggccagtatcagctattaaagggccattttatttttgtattaattatgtaataatttacttaacccttccatgctagactgaaaacttcccaagggcaggcactaggtctgtcttgctagttctcagtgcccacccacccccaactgggcccatggtgggatcttgctaagtagttgttgagtaartgaatcaggtacttgttactgtataccctttttgaagatttcctgtgatacaactgttggcggcatttttgctgatagcttttcaacaacttccctattttcagacgatgccactgttcaacagtaaaccgggtgaaacaggctgtaacttacatatacacacaagagacatttgaaatatcaaatttaagcctggcaattcagaatgcaagctcattttttttttaaaccaaagcctcttttacctaattgagccagaaaatatgtggcccttttccctcccaatttgcagcttcagttctccttgactgagtagctaatggaagatggggcctgttcctgctctgcttgtgaaatctgactctcagcccgaggctgtgtggcttcatattttggatctgaaaataaaatgcttttatttgatcctggcgtattaaattcaggttaggtgtgttgcaaaacagggaaatgttatctagaatcttcctgctaatactgaatctttggttcttctgagccactgtgtcttaccagtcttcctgtggaagatggcgggaatgtttctaatcccactttgagcctgagtgcttgcaccttatgcagaacaaatcacaattcgtatcatagtcaggatctgagatttgtctctcacctcactccctctcctacggatttagttatgctcatctgaagtaaaggctgcctgactgggtgcagtagctcatgcctataatcccagcactttgggaggctgaggcaagaggatagcttragcccaggagttcaagaccagcccgggcaacaaggtgagatcccctctctacaggaaatttaaaaattagctgggtctggaggcacacacctatggtcccagctacttgggaggctgaggtgggaggatctcttgggctgaatggtcaaggctacagtgagctgtgatcacacyactacactgcagcctgggtgacagagtgaggcaagaccctgtctcaaaaaaaattaaaaaaaaaaaaaaaaaggaagaagaaagaaaaagaaaggaaagaaagagagaaagagagaaagaagagaaagagagaaagaaaagagaagaaaagaaaaaagagctgcctgctgtagctgaaagatagcacttagatgctaatgtgggattttgaaagcgggagacctttcttcagaaatctcaggtaaggcagttgcgagggcacaactcaatgccctcgtgaggcctcaactctctggggcctcacacaaagatgagctttatgtggactttaccagaagttccagggatgcggccagccaggagctgtggctgtcaccagtttgtcattggtgtgacactaacagagagaaggtacatcttaccaagacaaggtagttcaagttcaggttctgtagcatcattcagctcatctgaaagcttgtagttgattttatgtattgcagcccattcaaaaataatcttgtaaagcatagtgtttgcttaaacttgagacagcttgcaatgtggcttccgtttagtgtgacacaaacctgttgtggactctctattataccacagaaattgttataaccaccacgtctattgtcttccagaaggacacttgagagtcacttgtaaaagttggcctgtgctttcctattaaaaactgctgtttaaatggtagttagtctcctgtttagtatgcggtgtagctagatcaccctgcattcacaatgctctacataaaaaaaaaaacaacactgctgcaataccaatagttaaaagcaattccattaaatacattgcgaactagttttaaatttttatcttgatgtaggcacttaagaaaaaggaagggataaaaaatagttggagacatttatagtgattctgagggtaacttctgagttctggggcttacagactcttgccattgggtcttcatctaagtagcgctactcaaacgtgtatgagccctagttaaagcattatggctcacaagaaaataaaacaaacacatcagttttccagatgttaattgatcagttttccagatgttaattgatcagttttccagatgttaattggagatgttttgaaagagagaagcttcagaaggcagacaaatactaaagagaatgtgtctttacaatattcattcagcatttattgtgtacctagcatgccctaggctctagagcagcattctcagaccactagttttctagatygcctttacattcataagtctcaagattattaaatttaaatagcctcaagatcccctttacattcttaaaaattattgaggaccccagagagtttttgtttatttggggttatatctactgatattgatcatattaaaaattaaaactgtatataaatgtttaaatgctttgcctgggcatagtggctcatgctctatagtcccagcactttgggaggtggaggcagaaggattgcttgaggataggagttcaagaccagcctgggtaacatagcaagacccccatcactacaaaaaaaaattttttttaattagctgtgcttggtagcacatgcctgtagtcccagccacttaggaggctgaggtgaaaagattgtttgaggccaggaggtcgaggctgcagtgagctgtgatcataccactatactctagcctgggtgacatagtgaaacctgtctctttaaaaagaaataaagtttaaatgttttaagtaaaacattttaaaagattttattatttaaacatatcaataataaaaccattgcatattaacctaatataattctatgaaaaataactataaaaatttttgtgaaaagaatgacattgatttatatttttgcaaatctttttcgggtctggtctaagaagacaactagcttcttataccagcttctgtattcagtctgatgctcttaagttgttttggttaccccagatattttgttagaaaagggaaaagtgtgttaatagacttttgagaaaattgtggctattcattctttgacactctaccaaaaccggaaaagtagtagttttttraaagttagttgcattgtgaaatctgaaattatatcaatgactgatataatttttcacttgttacattgaaatcgattagtctatcttgcaattttgaatggahcattcactctttcatgattgtgtgaaatcgtgcatcattcaattagaaatattggttcagtgagttatgtaactcttttaagygtcgacacatttcattatctaagatcaaaaaatcacattcattagtatcatcaccaatcctatcaggaatgccttaagtattgggaaatatggagacacattttccaacgttgacaattttccaaatttgcttgaattttatcattggccaaaaacactgtcagttcttgaagtggcaggctcattgcatttattatctctgccatcattggtctgtcagtacttcttccatgtaaaaataatgttccatgaaaaagagttgctggttcagctcacagttgaatctcagatgcacatttccttgagacaaccttgtgcttcagcgtgtaccacgggttctctgtgtgtgtttcccactgagtcacacagaatataaaaaagacatatcaagggttgaaacttaataaaggtaataatttgtagtgctttttaaggacgttttaaatattctctttttttccagctttaatggatgaaacaaattgttgtttttttccttgtaagtgtgagatggtaaaaaatgcagtgactgccagtataagctggtgccactaccttgatcccggctaaggcacccacagttttatctactgttgcttttgcaccaaagatgtaagtggcaatacagcgaaaagggcaaataaagtcttaatagtatgaaaatgctttgaccttacaaatccctgaaagggttttggagacccccacaggtctgcagaacagtcttttaaaactcctcactagatatacagtttgacatagacaagacgtttttcttgtaaagggggaagatagataataaacaaaatacatcaggggtgctgtaaccaaaacaaagcagtgcgctgtgacagaggggttatctcaggtgggatggccctgaaaggctgcggaggcagtgacgtttaagatgaaacttaagagcaggtcgactgggatagccagcccaggcttgatggcaagagctcacagggaatgttccaggggcagcagaagaacccctgtgctgagcatggtgaggagggggaagcgcagggagagaaawggtcagtgaggctgtcaagggctacactgatsgggcctgaggaaccaaggtgagagctggattttattctgagtgcaacgaggatgtccttggaggggtgtgaagcaaggtgaaaggtcatgtccaccttgtagcctcaggaagtctcccctcaccccacttccacctccattcttctctagggggccacgactgggtttgaaactctaaaccctagttatgaagttgtaaatataagtraaaaagaaaatcccaaaagattacatacagcatggtattcattttataaaataaacaacttaytaaaacctcagagctatctacaaaggaagtcaagggagcaataaamaaggattcagaacagtgattccctgagagagggcaggcaggaggatgagttggggaagactccacagatggacaaaagtcctcatccgagttccggttctgggggtgagtggkgttttgtgggtgtttgtgatcttattaagtaagggtgagtgagtgaaggtgacaggccaygaatgggccactcgcgagtgtgtcgggagccgtgggtcatgacagacccaagtacgtgcccctgggtttgatataaaaagagaataagggtagaaaagaaacaaagctcatatctatatatttcatttatttacatgccgtttgatttctagcttgttcaaccctagttattgcaaatatcaagtgtagtatcatgggtcatgggaaaaggctgctggattcaaaactcggctttgtgtgcacccttggacacgctgcagacccttccaggcctcagtgtcttcatcttcttcatctatgatgtggaataattgcaggatccgctcataggcttgttgagaacatcgaacaggacaatgcctgtgaaccgctgtcacaagcctctcagtcacgtttactgcacaggtggagattctctctcctgtatacactgcctctctcgatccatttttcctttctttatgtaactgggaaaaaccaagaatgaagcaggtttgtttttgttttgcgtgtgaggaaaaggttgttgaatctgttctcaagaatgtttgaattaaattctctttgcctggggatggtatttttatcttatatgattgttctttgaacaagcagtaagaaaacaaaatgaaattgggaggctccttgctttcttcctgaaaagaggcttcagggctttgggccaaactgtgccttgaaatgaattttagaagcggccacagcaggcggtctctgttgtgaggggcccagctagtracaggcacactcccccaagacagaggaaacaccctgcagagcggtggccacgctgggctgtccaccgcacaggggctgtcagagaaagagtgggctcggcgggaaaggaagggccgccccagtgggttacacgggaggccgctccaggcaagggttttcaatttcagttcccttttccccacactgcrtggtttcacttctctgatggggcttagaatctgcgccattaggcagcttccacagcttagacgcctttcctaaggaagggttggcacagggctgtcagccatcagagacctgagagggcaaccaccggtgccctccctgctggattcaagaggagctgggtgattctgggttccaggatgaagaggagctagcagggacaaggagtaagcagaatgtttgcacacaggaaatgacaggggactccgttgctggagccatcccttccctttgtggtcatcacgaaatatccatgaccatagtagtgccactgtggcctgagtctcaggattgcctgtgcccatgaggtggccagagccagctctgagtccccagggtggcccacagccaaggaacagagcccccaggacgcaaaaagaaaccaccactagttgagaagggaggaggagaactcctctcatgactgtgcctggcaggagacagcgcatcctgcagcctgagcctggtgctctacgggggccagccgaggctaagactgtccctcacggaaggatcttgaggcttctgtgtcctccccgacactggctgcactcacctcccctcagcctctgtgcatagcagcccaccgtacttcaggaccactctttgtaatcagggaattcttctttacattgagccataatctgccccataatttccacagatgaatcctaattcaggtctccacagtaacatgaaatacatctgcccctttttggaatatatgttaggtctactctgtgtcctgcaccatgccaggcagcagacaagacacagacatagacctttccttccaggagactaaaacgtagtggggcagatgccattaaacaaataatcacacaaaattctaaagatgaaatgaagtttctcgctattaccgtgttaccacacgtggaaaacagtcagctatgtcttctgtctaagggaaggtattttgcaatggcctgacttaaaagccgtgggatttccatgaaatctctggatgatgcggagcagacaccccagtgctgagcagctttctttagttgaaagagagggttagtgatggccaaattcgtagcctgttttggggatggcgtgatgactttgaacatgggcgctggggtgtatggaggaaggtgaagggtgtccgtggggagaaaattggaaaggagctttggaggcaggttgggcaaggcattaagtgccagagtaagaagttggaactgcgtttgatgatcatcaggtgagaagacctttgagcagggagggaagttaggtctgagttttgaggcagttattttaaaatggttccaagcatggcctctgcagcctggctgcccgggctccagtcctggccactggcagtgggaagagttacctggcctccctgtgcctcagtttctacatctgtaaaacagaaataatagtggtatgtacttaaaagagcaaatgagttgatgcatgtgacatttttggagctttgcctagctgtggaaaagtgctttaaaaaggttagctggggccaggcatggtggctcacacctgtaatcccagcactttgagaggccaaagctggtggatcagttgagctcaggagttcgagaccagcctggccaacatggcgaaaccccgtgtctactaaaaatacaaaaattagctgggcgtggcgcgcacacctgtaatcccagctactcgggaggctgaggcaggagaatcgcttgaaccagagaggcagaggttgcagtgagtcgagatggggccactgcactccagcctgggcaacagagcaagactctgcctctaaataaataaataagggtaagctggtattataatcaccaccattgtcatcatcattgttggaataggcattggaaggaggtggatgaatttgggtcagtgggtgtcattcacagtagggcacagtagaggcctgactttaaaagactaggtatgctgccaccttcctcaaaacggcacctgcactgtgttcactcacatargtagaaacctggctctttttttctttttagaatctttttttttttaatcctcacttgggattaatcacctccagaaggccctcatcaggggttacaatacacgtgtgcatgtttgaggccatgctgcccacgcgtagacttggggaaggaatttgcagcgcctcactccctcaccagcaggcccagtgccagggggctcctagrtgatggctggagcccgccagtatgatgctaagaatgaagactctgctgcagcatgggcaaatatttaggcaatgatgataaatgaaataaagcctgaaaccacacatgcatgatggtcctcacgatgtaaaaacatggttgcacatgagccagggccgtaaagaaacacagataaacagtggcactcgtgttaagatgggcagcgcaggagcacatgaattgttttcctttaatrtttctgcaattgtcttaacgatatttttaaagtagaaaaagtaaaggagggagcatgtgcccaggatccctctatgcctcggagaccacaactgcagagcagccattgttttagcagagatggagggctccagagggtggggcatgtcagttcttaaagaactgctcttgatctgcgaacccctctgccctctttaagccccaggggcaccgccatctctaggaatggaaattcccagccaatggctcctgcaccagagacagtgggcccttcccttcctcacagacagtgcttcctcaggatcatggcccttccagggtgagcttcccgggtaactggacaggggctgaaagtagcatccttaggctatcccattgatggtcttggttaaaacaagcacagttcaaataccttcgtgaccgctgtcaactgcaaatggtayggccttgggtcagatacttggcctcattgagcttcacttccaccgtctgtaaaggagcaatgcctctgcagtacctaccttcctcaccgggctgttactggtaggaaaagcgtgactgcagtgcatggcacccaggaagctgctcagtcaacagtaacggcggctgctgctgtaggggtgggcatgggaggggctgttcctctcatcactagttttattcagtggttcagatggttcaaatgcagcctcctctatgaggttggaccccgttcctctgcacagaactttccctcctcccttggtctcctggaacactgcgtttgtgcctgtctcacagcgcctgctactttctctgaggcagtggtgtcacttatacttgttacacttttcagaggcagggtgctgactggccagaacgtaggaaaggccaggtcagagactttctgtttaaataaaatgccacgctagcgggtttcgggtaactgaagaaagtgcattccgcggtctccatgtggtcaggacttggctctgtgagtctgcagccttgttcagccctccctgcagctgttactgtatccctgtcttcctactgaggccatgcttgggccattgtggcacctatacatctttaatacacgccccaattaatgagttaagtccagataaagtgggtctgaggagttcacagattggagtgccacagggatcatattttcaggtgcattttcttccaatgcactctgacagctcaaaacacttcctcgagcttctatacattctgctcgttgccatgtgtccccagcacttggatatgtaatgcgagggataccaacagactgatttctaaatgagcttcctgcctcaaggcaaaggttgagttgcccgtgcagctgggagggccaccaggtgaatgacgctgttagaggggaagtgttggggtgaaaggtccctgggagcttcgcttaccaccgtgggcacttaatggatgctaaatmattgaaagaataaagtgagagatgagtggatgccgccttgatggcccctcgatgaactaacagggtccgagaacatttgcaaattggtcattaatgtttcatcaacagtgtctgcctcctttgttcatctcaaagggtagccagggtttccgatcacagggatagtttcctgagaaacttaaatggaggaattaggccgggcctgcaattccacccaataatttgggtttgtttcaaaatagcctaatagctgggaatgggctggtttggcttgctaatgtgcttagaagggtcttgagtgctttcactcagtgacatttggagggggattatggattttggagcattaaagctttattgtttttgttttttgttttgctttgcctgtttttggagtgaggtttgctgacgctaaaatgactgtttattcatgacagggagggggtgaggaggtatagggaataattctactcatggaaaaaggatgccttcttcaaaatgatttttgctgttggcaaagctgagaacacactcacatgattctctgcctgcagtaagtgacaggaaaaacacattgtgcgccgtggatagctataactagcagcaaattggtttaaatcataaagaaaggctcagtatacacagctccctcttcttcagggaagtctagctggaggaaagaaatggaggctgggtttagagtactagaagtggcaagtccagccttgagcctcccgcggtcgggtttcttcagaaaataaccaggtactctcccgatgtgagcygtggatttgggtgaaactttcctctctcagccactgcgctggcctccctcggcaaccctacgttgcagggactgcctgccccgaaaccctgcctgagctcaccactgtcccttcactgacttttgaaggtggtagacggggagagatattccttgtccccagcactggctggtgtgctcttgacagtggcctgttctgaagcctgctaggacgcccgctacctgggaagctggcaggagattccgatggctttcggcatctgcagtgctcactcatactgcagatgactcttatttccgtttttcacaacttaactgaaaagggcacttaagcaaagcaggcatttagtcccaggtggaatcaatcttcctgctgcaggaaagagccaggccctgggcagctggtgtttggagttggtcttsagtgtgtgttgactcaccttcctctcgaggtaaaggaaatgaatagctcgtgctaatgaatgaggtgtccccagagcatcgtcagtctctggaggtgtccagttaggccctgtgactgtcccagccctcccacgggcacagcagaggcgaggctcagagcctgcccctggaatgggggcgtggacgtcccagagagcaggggctgaggacactggagtggggtcactggaggaaatgggcaaaggcagctgagtagacacayaccttagaggctagggagcttgtccagaaaaagcagcctgcacctggccgtaagattttccaaagatgaggtttatgctcattgtatttttctcttggaaaatgtttagggtcttttgcaatgctttgtcctcctcggtactcagaggactgcatctgcctttccctcttctttccccttcaaggatggacgtgtaggttacccacaagtacctgtgccctcatttttttaggcacaggcttctttctctgctttgtttttgttttttgtatgtttgctttcaaggcacatattttcaagtataaaatgactcctatgctccttcacttaccctgaaaacacctacctgtttcctaagagccacctttgaaaactctatggacattttgaaccagattattctttatcatgggggctgacctgggcactgtaggctgtttaccagcatccctggcttctgctgactggatgccaggagcagccccctgaccccagttgtgacaaccacaaatatcttcagccgttgtgcagtgccctctagggagcaaaattcccttcagataagaaccactggtctacaggaatcacaccaaggcagcccacccattttaaagatatgccagtctgtttgtttactgaatgtttaataattgttcatttattcacctatctgcttacccattgatctgtccatctgtccatgtagctgagctgcccaatatccatcctgggacagcagtgccttgggagctaaacatactcaaactgtgagcctttctagaaagagagagagacagcgagagagcgcaattgattgattgaggatagaggagataattactgagcaagctggataagatccaaggtactaaatagttgggggaaggtacttgggaggaagagagatgctgcttttttgagaccagagggaaggaagaatggtaaagacagaggaaaatgttttggtcacagggaagatcacttaccgagtcctagatctatttatgtagaaaaaggattttctagattacaaagaggtttttttttttacaactagaactgtttttcttagatttattttccaaagatgtgtcacaaggcagtaattcaccatcatcagttaatatgtccgagcccagggccagtagagaggaattaaacctcctcctaagaggagcaaaatattcatcacaaaggacagattttgcaagagttggcaatcttctagaggtcatgagcaaagtcttcacttactcttattaaatggttcttttggtagtagtaatcttacctcccctaaccactgcaatgatgattgccagttctactgtgtgcttatgtttcaagcactgttctgagagctttatacggattaactccgttaatcctttcagccctagatggtcttttagagatgaggcaactggaacacagcaaggttgagtaacttgcccaatgtcacacagctactaagtggtagagctgggacacagacccacactgctggctctgaaagcatcaaccctaatgactacacgctcatttgtctggagaaaacactgagacctggagcatgtgtgtacatgctcaccatacagcccgcccccgatgattgtcaggagagtcagctgatctgagaaagtgacaagcattggtcatttcagagaaaccgggagttgggctttttaaaagaggcataaagaaactgggaaaatgagactgagtatattggacagatcccaggaactaccactcagaggaagacaagccccgctcctgtttttccttccttcctcttcctccttctcttccatgtgccttcttctttcccttcttcctcctctttgttttcagctctcctctctctccatatagccctccagactctcctcctctgtgaggctgtctccttggtcccctcagagaccgtggccccagatcctcaatcctcttgctccccagattcgttccatgtctcctgcttctgcactcacgccctgggctcctgccccttggattagaagccatgggcgccattctttgagcacttttcacacaccggagtatggtttttaatgaacagttttattctgttgtaccctttgatcycctgtgtactcctctatgagtagcaccatgtcatagcagggcagaagccagggcgtatcgtgtacttggagctcaaagtccctttgcagtgaaattccaccaaaacctatggatctttcactttgggacacgctgtttgatctctgtctgtcttctccaacatcctttctcattaaactgaagatcagaaaaaatcagaaaaatagggccccttggtccctctgaggtcctcaacatttgctagatggctgggacccttccccctctcagtgtcctgatgtggtttattctttcatgtttcatctgggctgtatgggcctggctgtatgagactctcacgcagcccgagctaggagagcctccctgtagagccgcacctggcccccacactctctgcctccctatctcctgtgctcctcctcagggtcctgctgaccccgtcactgagacagctgtccccgatgatcctcatgcagggttttgtgttcttcttatgtgagtgtcctttcttgttggattgaaagtcgcttaaataacacagcaaacattgctcagcacctgctatgtaccagccactatgctagatgctggggacacaaaagtgaatgaacagtcgttgaaagtgacagtgtcaacaaatggctctagtagcaggaaacaggagtatcatgattgagagaggtacgtgtcggtgatatggcggtgcacactctagccctccatggagggcagtgacccaggtgtgttcagcctcctagggaggcagtaaggattagacaggttaaggcttgggaaagcctcacagtcgggcctggcacgtagcaagcatgcaacacctgttagatctcgttgttctcatctctgtagctcctctcccttctgacccgttcccccagctttcaatgtcagaccacacagattgtgttcagcaaatgaataaatgaccatgaatgaaatgaatgttgggcccatcgagagagaattagagaacttggaragaagagtggacattctcaatgaggagggagaaaaacagcacagtgccaaggggcggagcccgggagcaagagccctgatccccggacacatcaagctttcctgccatgggtcagccggactccagccccagtcacgagctcctggacagctcctagtgagtctcctcttcgcttccctctttcttttttccaccagagataggtaggaccttttcatatccttcaaaaaaaaaaaaatcaggcatgattcaaatcctgttcttctattcactctgccttcacttcacatcacttccacagttgctgaattcttccttcatgccacatactgtgcaaggctctgaaaatgcaaccaccaggagacagtcctggccccaagcccccggctaggtggtgcccaacccaacctcaccttccacaccaccaccaatggccagacaggtgaagtgaggggttgagcttggattcccttttcccagaaagaggttttgtgtgattttaacttatttgcagataattaacctcagggtcaaaaaatcctacccttctgcctctgcggagattgaaattagatttttgaagagaagcaattgctgtatagaattaaaaacttcttgatgaatactgccatcatgacatggggaggaaatcacagtagcactttctactgtgtaattaaaaaaccaaaaaagcaaagatgaatggaatacccacaagtgaaaatgggatttcgttttcaacagaggaaattggagttctgtcagttacacatggagtgtgtcctgaatcatttcaaattacagcaggaggtcacgtgggccattttctttaatctatgcaataccacggaccaggaaagggaatttttgctctaaaaagatgtgatttttttccatcctaaccattgactctctttccaaaataccaaaaacatttcatagccccaggtgggtttatattttgtttttgttctccctcctctccactgccttgccctaattttaatcatgctgactctccagtctttaactgcctttgctcaagaacatgtaaggattagtagcccagagttgagtcttggcaacactgtggagtccatgctgtacccacctatctgggttttcctcagtgtcatgaaatcagatcagagatctcatagctgccacacactgataggtcccactgaccatggaggacaccggctcctaagtgagggagaactgagttttggtcccagcctagttctttgctgtgtaaccctgtgaaatcactagcctctctggacttcgttttcttacatgtatggagtagggattggaatagccttgctattgcagttgttgtaaraattaaatgaatggatatatgaatgtctagtgcatggtaagtccacaagaaatacctgctattataatcaccattgctgttgtaaaaagtaatcaagggatccaagagtgctaaactggtgtaatagctaaggggtttgggattgccgaaacctgctgtggacaatgccgtcccttcttggcaagttccagtggtagatggaaatagagccctgtataattcttgtgagaattctagaaagctaggctggagcaggacccctgtcctaaaggccaaagagacctcttcctgccccccgcagaccagcactgggggtctgaccagaggagcacaagagcctgcaatcctgaatccccattatcctgagaaagaaagccacagccagctcttgtcccataggaaagagctggtcttctttaggacttcaagcacatgggagaaggaagcaggscttgtgctttcagtcttgtttccactgtgacataaagcaaggagagggtgtcaggaggggccatgcatctgtgggcaccgtttcaacacatggccagcttgtgctctctatttgagagccagctggacccagaatctgacccatcagatcagaatccctctctgtagagagggagcaaggagatgatggtgatgatgacagggaacacgtacatagcacttaacatagccagatagtagtttaaatgccttgtataaagtatcttactgaatcttcttaataaccctttgatataggcattatattatattcatcttatacctagggaaattgacacaaaatgaggacagttcattagagcctggagagttcttctgtaaataagacggaaagatagatggttgtttgatttgtagatagatagatasatacatacatacatacatacatgcatacatacaatctgaatctatagtgtagatagaaactgtgtctgtcacacagatagaaaccgttagtgtagtacactgtatctagctgtaggtagttaattcttcttctcacaactgctgcatccagaaagaccamcccaataaactaagcagctttctagaagattcactccgcgtttattgccagatgtgtcacctggtcattttgtggattatattaaaatgcaaaacagtattattagttattaattttaaaacaaagtctagaaactttaattttcaatttagccaacaagggcttttttactctacgtacccctggctacatttattatacatttattatagaattacatctatgcaatatgtctatgtatgaatgactcagaaaggttaagtaacttactcaaggccacagagctaataagtagcagaactgtagtttgattccagattctctgattctatccactgctatttccacgtcattttcctgtgatccttcctttggtgtgtgtagctcaccaggtcacactagtggactggaccaaggaaaatgctggacactttggtgactaagggcttggagctttggaggaagacagctccaggcccactcctgactccatccgctccatcrctccttgctgcctgggtccttgacctctcggggcctccgtttctctcgaggctgttgtgaggatcagatgaaagaaagatgtgaagtgtcagcacataagtggtcactgtgattataattaatagtacaccatacagtcctggctgttttctcccaagaattctttatctttcgcctgctaataaaacagtatgaagtctgaaaggcctttgtgaagctccgcgtatttgctattaataaccgtggtcaatagcggtaatgttctaacccttcaaattcactgtttgggagctgccttcatccccagcctatcgaacacatgctgtggggctggacctgtctgtggcaccgtgctttgtgacttgccaaaactcataaggaagttaagagtgtcctgacagccactgatgctcttcttttaggaaactgttctcaagaagattagagagctggcttgaaccatttaggaagtgggaaggatattagatgagttatttgttgctgcagaatgaattaccccccaaaacagaggggcttggcaggttgattctggctgtcgatttctcacggggttgcagccaagatgtcagctgatgctgcagggatctgaaggctcaactggggctggaggacccccttccaagctcagtcagtcggctgtgccaggaaaggctcggttcctccctggctgtaggtcagagacctcagctcctcaccacctgggctcctccacagggcaagcattgcagctggattccccagggagtgacccaagagcagggagaggccacatgtcttgagtagcctggctttggaagtgacacaccatcacttctgccatattctcttgaacacacagactgaccctggtccattgtgggaggggccacacaagacaggaacaccaggaggtggggatctctagggggcatctctggagattgccaccacaggtggcacattcttgtctctggagagctgagagaattctcctcctcctcctcacaactgttgcctctaaaaagaccagcscaaatagggcaagcagcccttcagaataaggttatgtccacattgattctaagacatgtcacctgattattttttggattgtattcaagtgcaaaagctcaactgatagtagtttaaaaacaagctagaaactatttttccagcttaaccttaagggatttttttttttaaaaaattgcatgtaccccttgctatttatcctagaaatggctgcagagctttaaatatagaccagcatgaattcaactcttgcataaatttaaaccacataggtgctagaataccccttttttaatccagaagggagagttatctaagagtgatgggtaagtacatggcaaaccaatttactgcctcagctgctgtaatgtggaataayttgcatcccatctcactcatctctcttctgtctccaccatgcccattagcacgtgagtttgctcccttcctctcgccctccacactaagscagattattttggatgaaaacattcatttaaatttactctactttcccttcaccctatgaattaatgtaagraaatgaaatcagacttcacaggtaccatacattagcaacacagatgaccctgcgtgaagggagatcacacagttacttccatcagaagtaaaactgagcctcgaaaacttcacagaaatacactcagagccactcaaaagggatcctgaaaggcaatgggggaaacaagaaatagaataggcttcagaaataagatcctggccgggcgcaatggctcacgcctataatcccagagcttcgggaggccaaggtgggtggatcacgaggtcaggagtttgagaccagcctggccaacatagtgaaaccccgtctccactaaaaatacaaaaattaactgtaygtggtggcatgtgcctgtagtcccagctactcaagaggctaaggcagaagaattgcttgaacccaggaggcggaagttgcagtgagccaagattgtgccactgcagtccagcctgggcgacagagcaagaccctgtctgaaaaagaaagaagatcctatgggaagggaagtgagccccctccctgctttctggaatagtgtgagtggcagatggcattggtcagctgacctagcctgcatgcataacttccccatcccagcctagaggtggtcatgtgacccagttttggccaatgagaataagcagaaatttctggatgaggttccctgagggctttttgtctggcatgcccctttggccttttaccatgtacccttcttccgtctatctgtgcattgctgataggaggactggagagggagcagccatcttgcaacccatgaagaccgtggcttgcttcctaaggatggtgggacagaaagaagagcccagattccccatggcactattagcagttgctttgttctgcataccttcagaattcgttgttattattcttgttgttgttgttgtttagagaccacatcttgctctgtcacccacgctggagtgcagtggtgcaatcatggctcactgtgatcttgaattcttaggctcacgcaatcctcccacttcagccttctgagtacttgggactacagatgcacaccaccacgcccagctaattttttaatttttttgtagagacagggtctcactatgttgcccaagctggtctcaaactccaggctcaagcaatcctcctgccttggcctcccaaagtgttgggattacaggcataagcaccacacccagctacttctagaattttttaaatgtgtcctttttcttttgttgaatgcagctgccctcatcagaagtgacacagtatgccagagctctgaagagattgaatatgttgctgtactgcaaacagtcagaggaaacagaaccctaaaagatgtatgaatagaacaggttctttcagtgtacattactacgatccaaagtgaggtcaatgagtaagagattcagaatatgtccaaagatgaatgacagagagcatcatcatttcttagaagtaaaacagcaagaacagagtttttcctgtttactgggtacaaagctatctacataattataagggatgtttttattgccagaaacatctaacttttataaaagcttaaagtagtttttttaatcattatttctgtaaaatgtttttattaaaggaaacaccatatggtaacagcaagaagagttggttacgagtcacgaagctagtcagatttctttccaacagttaaaataaaaaaacttaacacagaccatacatttagaaaaaaaaaatgcagtttcaagactcctgaaagcataaaactttaaccaaagagttgcgtgtgtatcgttgtcggtttttttcattttctagaaygtaagacaaaatcttggaacgcttaggggttatattcataatatttaacagccagcgcagcctggacaatgactcgttagaacaggcatcagtcatgccacattctgtcacgaaaaggatctcccttgtgctagtccttatcacacctgctctccttacccccaccatcactaccctctggcacctactaatctgttttccatctctataattttgtccctttaagaatattatgtacacggagtcacactgaatgtgaccttttgagatgggccttttgcactcaacataatgcccttgggattcatccaagytgttgcatgtatcaaaaaatgaagaatcctggccaggtgcagtggctcatgcctgtaatcccagtgctctgggaggccaaggtaggaggattgcttgagatcaggagttcaagactagcttgggcaacatagtgagacccccgtctctaaaaaaaaaaaaaattgtaattaaaaaaagatcaagaatcctaacttctagcatggccatttccaattttggcaaagttggaacacctgcctgttgtttgaccagttattcctgggaagcaataataaaaaacaaaataaagcagtggattgttttttatgtttaaaattaattcaaaatggcttaggagaaggaatttgtgacctggggccctcaggtgcccagtggcctgtgtgtaggaggcaggaccatcttcacgggaaatgtctacaagacagatgtatgtttctcaggctagcagcgatcactttgcttcttacagcaaaattctggagtgttagaaaataatcttccttctaaaccttcttctgtagtccttgctttgaatccaggaggacagtgggtgaggggttcccctacccagaacggtaggtcaggcaggayggtgcctagtgccgccacaaggtcacacagcctttgtgagcaaaggcaggggagttgacctgggtctacatccagaccctcttcttggagcctgtcatgttcctgccaccccgctaaacacactgcttgcatcatttgatttaatcccatcagcaactctacgaggtagatactattgctgacccaattatacagacaaagcaattatggcttagaaaaattaacacatcaaggtcatacagcaaagccaggacttaaaccgaggtttaaaggcccccagagtccatgcttccgaccactgcatggttttagtccaaagtgaagagcaggtcaaaccactacatacagtggcatctgtctgctgtgtgctggtagggaatgtgtcctggggacactggaagtctagagtatctcctccaggcttatcatgggtcccctcctagagtgggttagggcccttcaaagctttttcatctaaggcatgataaaatacacacgagaaagtttcagctgttgcttaaaagtaaggaaactattcgaaataagttttttgggaacctcattgtagagcagcctgccttgatggttttttgaaatacatgtgacctttgaggccattttaatttttaccaatgaggtaagtaaatagtagagatttcttaagcctgtggacgcacaacctgtgcaaaggttgttcctaatcaaaatgaagtaccaagtaagggttttttttttttcaaaaaagcaaaatccatcagcttggcttcagcactgcggatatttacaaacctccctcccaggcttgtcgtggagccacaaaagcccccgtttccagatgctatgttttccgattgctcaccgcttacctgcaggaagaaagcgtgcttcacctgggcaaagagaaaccctcctggagacctgccttttatccccagtaagcaagcacacattatccaggacattgaaggcagggaaacaactcgttagtctgtaacctggggggaatagccccactgctagagacttcagcactccaggatccgtgttgtacttcattcccaggctccgtcttttgtagaccagtgcctttgagaagattactgctggcacactctgcccttcatggcctgttctccttaccaggagccttattgaggcagaatatgcatgacagcttactggatctactaaagggaaaatggactcacttctgactgccacactgttcaaacaagtcagtgctaacacagactgcggcagggtccccaagggcctctctggaaatgcctgcccttcctcccacaccaacctccgcatcccgagagagttggtgcacatccagatcttaaagcatcctgagagttggtgaactaattcctgttaaaaccaacagtcactttaagtttgaggaagaaaggtttaaccaagtactagtaagattcacatttttagcttttgttcttccagctgactctgtatactgggcccacagttgtacagagagttaccctatgctgactgcacgggagatgcacagggcgtgtggatgctatgggaatggagagcattggtcatgcaacagcttcgcctatgatgccgtgtctttccctgcccttctatatgttcttcatgtatttccaggtctcctattgattcatccacactatgtacaggattagaatgcccagcagctgggggagcctttccagggtatggttcagcgggtgttaccagtgacccttgctcactcctgtacctttgcttccacgggaccactcccatggggtctataacccctgtgggtatgcaccagcagccaggcttgcacaacagcctcctggcctggctgcgctgaaggacttctttttgttttttcctgttgtttgtttttttctgatagagtctggctctgtcgcccaggctggagtgcagtggcacgatctcggctcactgcaacctctgcctcctgggttcaagccattttcctgcctcagcctcctgagcagctgggattacaggcacatgccaccacccccagttaatttttgtattttttagtagagacagggtttcgccatgttggccaggctggtctcgaactcctgacctcaagtgatccgcccgcctcagcctcccaaagtgctgggattacaggcatgagccaccacgcccagctgggacttctctttagttatcagggcctctgtgtcaacaggctcctgggatatttcctcagtctctctctctgatgtctcagccagctattctgcccaagacagaaagtttctctgtagatctggccttgggaaagacagatcagagtctcaattctaagatgaataggtacgttggcgtcagcttttgccccaggattgcctgctcctacattctttcctattatttggttaccaagatgctcacatgcagccggcatctcatgtcccacagatcccatttggggtgcagctttcacccttccacaactttgcttttaatcgtcacgcttaactcccatctcttactttgaaaccttctctctgcgttgcttcttttcccatatttcttatccctttcattctaaacagtttctacaaaagaacaaagtcagtctacgggatgagagcggggagagggatgacaattctgaagaattctagtaggttgttttttattaggcactcagtatttttttccccattatatgtagtaccttctaagcyctgacttcaatgagaatttcactggtagaaagcttttagagttggagacttttgttgttttttctgtacaaagtttcctcttattttttatctggcagagtttttcattttgttttcttggtttggttgtttggttgcattttcctaccctcccaccaccccgccacttccactcttctgcttgcctcttgctttttgagtgtctgaaaaaaagaagatacgtttgagggtattgcaaacaaggaaaaatcatcaggtgacattgttctgaactggtaaactttctatcccataagagtttctttaaatagaaaacaaagcaaaacgacatagtattgaaggaattcttggatctaggaggaaaggagcaagtatccacagccctgccaggaaatgggttctcaggaaatgggctcccaggaaatgggctcccagtactcctgagagaatgtgtgtgtttcctgaaggccagcagggtacctccaggggtgcgtgtgtttgtgtgagggtggagtggggtgtatataaggctcacagggcaggggcaggatatatgggccccaaaaatcaatggcattatcaattttgccttgtaggctatgtccaggtatttgaattttgaaaatccctcccggctgtcatctcaagctctcttgggaacctttaaggatgccaatatctgattaaatggcaactttagctccctcttgaacctttcacttttctcatctctaaaattctattgatgggccagccttaagttggtgactcacatccttcaaatgaccacattggaaatggcagagacctcctttcacccaccccagccctaacactggaatccacagcccaccctgttttgggggtgctggccacaagctctggatgccaacggatgaggccaggaccttacatcaccttcctgacagcagctgaaaggccacagtgtttgtattgatttacaggagcacttcctagttttgtcgtccctttgcaactgtatagaacagcttgaatattagaaggtgaaagccatgctctataataaccttatgaaagtttcatgctagcatttgatcagtagcaagcctggcttagaacaaaaccatgttccttcgaatgctgttgttgaaggctcacactggcaccgaagctgttttcacgttagggtggcttcataagggagcacattgttggtagacaccactgtctggaggagttgggggagaaagaagatgaatggaagcttggaaagcattgtcattgaaaacatgctgagttcaaagtcagctgtttcactctccttggaggaagttaaaaacaaaggtattctatcaacaggcatttaataactgtcttgttatatactctattacacagtaatagtttccactcattgagtgctaatcacatatgtgtgtgtcacactcaccgtgcgtttctcctcaacgtccttcctgtcttacctcttatataggagctcggccatttggggcattaaccccagctttctcaccaggtctaagccagtcagtgcacactacttcctgtgagacaggattggtttaggaacaggggataacccaaatgggaacagtggtttgtgaggggaaggtgtgcgagatctgaggacctctgggagtgatgcctcactctggagagagaagcctggggagggtgagcagctgggcctgttacaggcctagggacgaagctgccacaaagaggacagcagaggtgaacaggggtggagagaccaagccagaaccactgcggcaggacaaccctgtcctcctcctcatgaatcgaattcagtccaacacagttctgcatcctttgaagctgtttggattggaaattctgttacccacgaccaacagtatgttcgcattggtaacaatcagtgttagtaaattacccattacagcagtcctctgagataagtaccgttaagtctccgtttatagatgaggaagcagaggctttgtggggttagttaacttttccagatcacaggactaagtagcagagctgggttgcaaacccagttctgtctgattcccaagcctgcctcttctgcccagcggtatctgtctgttcccacatcctcagcagcttatcgggaaggcgctcactttctgggaagcaggaggaaacccactctggctctgcccttgagccaaaatggataaaggccagaacacagggcaagtgttcagtggcttctgcaacacacctcaaagctcagggcagtcccgtgattggcgcatagccaaggaaacctaacaggaggcagcacattaaatctttcagtcctttttatggctagatataacacacatgcataaaaatgcataaaaaataaatacataatataatgaacaattataaaaataatgcccgaatcaagagctgtttggatttggcaattaaatgttggtggcaaaggaaatcaagatgatcatcctagtcacgaccttacctgtacctgtagcatttgacactctttaggaaaagtcatggtgtttataccctagtctgtaccattcatgccacaatgagcatccacaaatatacccacaaaatgctatcctagaaaagagccattaatgaaataaaactgactgagttagggcgatagcagcaatgaagctattattagccctgttctactttctatctctcatgatgcccaattctcagggaaaatggcccctaaagtgatttcttggaaatccaaagttagagagtggtttccaaggccattaggagggacatctgtcatgccacccatggccttgtgccagccagagcgcactaacagttgaggtaggccatcttaaatagacacacttcattatgtgtgtctgtgctttaatcatctttccatttgtcaggagatatcctgcatagataaataccaatttctgtttgtgtatatctcttgtaattgattctttattagttcttttcaaagacagtgtaatcagaaggtctgtttgcagaatgtccatttgctgcaaagaagagaataaatcaatcgatgagtcttttttattttgagacagggtctcactctgtcacccaggctggagtgccactgcatgatcttgagtcactgcagcctccgccacctgtgctcaagcaatcctcccacctcagccttctaaggagctgggactacaaggcacgcaccaccatgcctggctaatttatgtattttttgtagatatgaggtcttactatgttgcccaggctagtctcaaattcctgggctcaagtcatcctcccacctcggcctcacaaaatgctgggattacaggtgtgagccactgcaccccaccaatcaatagatctttacagccacctttatatcagggggagccctctgtgaccctgtgtggtacagagtcggaggagaaccctggggagacctcgtcattggaaggaaccccaaaaggctgtgaggaggcaacaagcctccaactgcatgcctgtaattatgagatggattaataaggatgttcctctccaattcatattttagcccttctttagagtcttcaattaaaaagataaaaaatatcttctagtcctgatgattcttttcattattttaattactaaggtaatctatttgataccttacattcccaggcggccggcagataattatccttttacactgctgagaccaacccaaagccaggcaggctttccactaggagcagtcagaacctgccctcatgaacaaagacagtgacacgatggccacgtggtccttagatggtgcgtggaagaggggattttaaagagcgtgtgtctgtgtgtgtgcactgttactccatacggatggtatctgctttatgtgtttgacaacggcaggtttttgtctgcttgccatacattcatttgcacttggagtgcaatccagacagcagcattctgtccccattgtctttgaggtcctgccactcagagtccccgagccaagcagggtgacagggtgctcttcattttttcaaaccaaagttctttgcaagcagcatctccttgggccgagggcttcagtgaatattgtcctggcctccaggtggcagcaggatttggctggtgagactgcgggctctgtcaggagaaagcagggtggagaataggcagaggtgggggtgggggctgagcttccttagggcaagagtcaggtcttattcatctttgtcgccccagtcagtgcatggaactgtgcacatcactaatagtgatcagtatcaatatctgctagtatttattaaacccttgctgtttgccaggctcaaagacaacagaagagaacaaaactaagaaggagaaagctctgtgcatgtacagctggcaagtggggaaaggcagaccataaaataaatgggaaacatatgtaggacctttagattatgatgggagagcgtgtgcagttttaaatgggacagtcaaggaaggctttgcagagatggtaacagatgagcaaagacatgcaggagtgggccagatggagactgggaagagcattctagacagagggagcagcggttgcaaagggtatggcggcatcatgccccaagtttgaggaacaggcagtggtaccayggacaccagccaagagaggccacagcagttagagcagggtccatgatgggcttcgcaaagagataaggtcacaaagatcaggcgagagccagatcacatgggcttgtagccactgaaaggatggcctctactctggaggaagtgggaagacgctagaagattttcaggaggarggatgtgatgtgccttgctttagcagcattactttggctgctataaggaggcaagggtggaagcagggtgcccagttagaccattgcaaaaatgtaaacaagagatggtggtggttggatagcagtgatgaggtggtgagaggtgctcaggtgcaggatatgttttggagatggagcctgtgggatttgcttctgggttaaatgtagggtgtgaagtaagtgacaccctgtcctgtctgccatatgctgttggtctcacaggccaaccccagtacgatgtgggagggactcaggccagggatgagtgccagatggcaggagttgttgggcactgtcttagaggctggatgccacaatggatggaggtgaatggatgcctgagaggcacccagcagcccctgcagtgaggatcggagggttcagtcacttgttgaaactgtgcatgtaatcttgagagctggaaggacagaggtggcagtcacctgacagccttcacttcattgctaaataatcttttcctattgattgctgaagtattttgagttgtcaacccattttttatacacccaagatgcttctctttttaaaattattcaattcagagatcaactgatcttaaaaatctatatctgaagcctccattttctctgattctaagctcattcctttctgaaatattgtttcatcctggatcatttcttgagatcaagagttcatctgaaatagctttaacaaataatgttgctcaaaatctgcctccaaacccagttcaacccwcatcccaagaaaactcccattgctacccctttctgcttccctcacccctcctacccactctcacctctcccctcggcttcccatcactatccctgctgtgggagcaggaatctgcttcctgaggcttgggccttctccccttcaccctttcccactggtacctggagcccctttctttgtggttggccaagggagaaaatgacacctctcattttttcaaaagctagaaataagtgtgtctcagggactcatctcgagtggaaaagatggcatgtttggtacaaagggcacagccaacctcaatgcagaaaatgtaaagagaaaataacctcaaaagctttgggactctcaagcctcaaagctaatgtgcttggccatttttttctccccaagaatggtgagggccaggcatgagtccagccagccatcatggccacgggcaacaatcagggataagagtaaaaactgataaaataaagagctagcattgattatcagtgtataccagacaattgctaagtgtattacatccagtatattattttgtcctaatggcatggctggggccgagagaggctgagtaactcgttcaaagacacactactagtcagtgacagagcctggagcagtaaccaaaaatgagttagttcaactattgccagccagttctgaatacttttcattcactcattcaaccaatacaaattaagtgctgcctgtgggcgaatgctgtggatgcttgctgctttgctttctaatttgtatatgtgagcctgcaactgtaaaagattgggtctgttgatgttttgagggggacctatcagtggcatccctcttcctttgctgagttcagatgtcatgaagagtacagacaggaatcaggcgaagatcaaatgttcattactgttatgatgaaacgagaggctatggcttggtttatagccacagtcaggctccctaacctgccttcccagaagtcacctctactgcaactctgaagagatggccttgcaagccagaagatgagctggtccaaaagggggctgagccacgggcccagtcctctcctcccgtcccctcataccagccctcccccagggaagggtccaggtctgggagtgggagcagcctgtgagaatgcctccaagaacacgccaaagggctgtggggctccagctgcaggagtgaggcaggacaacagagtgaggaagtggctggggacaggcaggctggctaagcattttcagcagggtgtgacatgatcagattgatgtttttaaaggatctcaccagctgtggtggggattggaagaaggctgcagtcagggtggggaggaccagaaacagagaccctgctggtggcctggatggaaggtgccagtggcagtagaggccagccaggggcttctgtgtcacctcctgctgccagctcctccttgggactggcactgacccaggcggggcagatacagctgctggtccttcagaccaaccgtgctgtgctcaggcctcagaccctggcccgtgccttctgtgctgaaggcccctgtgaacagtgtttgctcttcaaggttcattctcagcctgaaaacttcttccttctggcatgtttacagtttatgaagtaaaaagtccataaagagatttatcctccccatcccaaagctgtaacctaggtgcagtcattggcaggctaccagcccgacttcctcccctggggaagaaggcttgtcactagggaaggcatgcatgttgctaatgagagaacatgaagcaatccaggtccacatctgtgtgctgcctccactcacggctgccacgaaggtgctccagctggccgagcggagtggcccttgggaggctgaggatattgggcctgcggggagttacacgcattccacccagtaaggaagtttgttcatttgccattcaccaggtatctgtggagcccctcctgtgggccaaacatcatgccaggtgctggagatgcatgtgaaagtgaagaaaggcagagtccctgccctctccgagttagtgggtctgggactgggggaaaagacaagtgtcagaccatcatgatacgacagcatggcaatgccaggggaatacctagaagagtggggcagggaaatcttttccagggaggaccttccaagcagaaacctgaggaatgagcgggaattgatgaaatggaaggtcgggggtggggcaggatatagaggaaggggaagaacatgccctcgtgggagtgatgactgggcacccttctctcctcggacgcagacccagccctgcacctgatgcacaaaccggccttcagttgctacttgtacccttgatcagacaagatggcagtgggctggacaatggagatattttcaggaagcttggttgagaaggacaggcaagagataaacaagacgaccagagaggaggcccagtcaggagtgagttcggcttgtctaagtgctggtaggcgggaagagaagggtcccaggtgaaagaggggttgcaggtgcaggaggaagaagggatcaatggtagacaaggcccctgaaaagtcgaaggcagtggaatgcagctcgccatggtagggttagactcaggaggggacagaagagaacgaacaggattggtgtgaatgcaggaggcgggggagttgtgattttggtggcaggactttgaaagcgtttcttggtggcttcttatttctgcctggaaagaaaggctagaatattttaaaacatgactattaataggctctctttcaacttccccactcatctgtgatcatctctcatggtcaaccccttcttttaggatttctaagtctttcgtcaccatcattttggatattgttttgctagacacccaattgactcaacctagaacttgatgcttccattttcccatgctaaggtgaacttcgtaaatataataagttaggcgggttttggggggctgggccggaatcctaacaccatatactgttcaatgttttttctgagttgtacgatgcattccaggcccaaactcagtcttacagatgatattttggaacataactctctgtaaggactctccctcgagtgattttaattgtattaggaaatcatataagttgaacctccgcaatttgtcagtcttggaaggaaagccatgagtagccaatgaatggagtcaggctaagtctgggctttccatctacttttagttgatcaggcaaatggcatcttctggccttgggtttaggtgctgttatcctgggcacttgatggctgttgaaataatacaaatgcatcaattctcagcaagcagtagacaccattttcctgttgggcaaaaagcaagcttaagaaggagccattgtgtgaactgcctttaactctgtcctcacccacattcattctagtgaggaatcctttaaaagagtccttaaatctaattgcaatcatggatcctttccaagcttctagagtagaatatctcctccctctccatgcccaactccaaaggaggcttttggagtaaatgcttttctgcccactagtgccaggggtgggcctagtggaagcctgtgctggcctgggccacccccaaccctgggctgtgcacaggaagacaggtcctccccacgcccttgttctatggctctgattccacacagtgaccctggacatgccaagcactgacattcctccttcatgataagccaatgagatcacaaaaaaggactctcagtttcttccatttaaaaatgatttttccacttcagtttgtgcctgagtgccctattaaacatttctttttaaggcataatgacacatttctcccacttctcaccttgtcagtgctggaagattaaaaaatcaaagtcccccaccagctctgccctggcccctcttcatggggtgtcctgggatgcrtcatgtgcccggaggtggtttagtgaggagccaggctcacttcatatctctgttgtgccgtgcaaagatcccaagaagggaaagtaagtgatttatacgaaacactcaagcttcctccctaccctcctcttccaggaagatgtcataaccaatacatcagggtgtccagcgctctgtttctcccccgcccccatcagaaatctgtgcaaaattagagctaaaccatgggacatatttaattaaaagactaatggcaaataaggttctggtggaygttgtctaattgcggtctgttagattttaattactcatggtaaattgtgaaaactaatccacaatgtgtctttgcacactcctgttctttttaatcacaaagaaaatgttctcggcagctgacaggatgggcctcatcatcagcacagagcaacttgatcttacacgacagtgactcagcaacttgccgaatccaattagcagctttgtagctacttattcagaatggctatagcaaagtctcgcttcaaatgccacaaacagccaggtctcccagcccctgattcacttgtatgctaacagcaaggatcactgccagagtgsaacagaacagacgggttctgcgatgagttagaaacatgctttcccctggatcccagatttttgtctgtcctcaccagagattgacacagaagcgctaggaagctcttggagacttttagagctgaggagccagagagagatcttagtggtcacctggtcctgatgaaggagctggggcccagggatggaaggcagttgctcaggattacacagatgggtaagaagaaggcccacatcataggaacccaaacctcctgacaccccacgccttgccctccccaagaccccccccaggtctctctcccaggtatgtcttaggaagggacagtgtggtgtccggagagaaccgtgctgactctgccccacccagcagggtgaactggcaagtcatgaccctcccagctctcagtttcctgattgttactgtaagcgtaatgctctgtaagagagtttgagaagtatatgagatagtcatatgaaattgcccaaaacaagtagaaactcttgttttaggcacctaaaatcccttcgttcttgatttgagggcaatgaggtggagagagggtgagggaggagagagagagcaagaacatgtgttgtgtgaaaacattatgaatcaaagttactactgcaaactttgaagaaagatggtggccagaggggactctactttggacatcaatttatttggtagataataaagaaaaagggtgccctctcggacatttttctctaggactcagaatttatatttaaacctctgttccagctatagagctctgctccgtgcctgccaacaagatattagatccctctgcagctttctccttggacacttgcctgcatttgtgagttgctgtttttgtcattggaatagaccagtttctgtacctggaggctaaagtgaatgagtgtcttttaatgaatcgcagaaatgatcagctgtggcacggagctgtcagtaacccagcctctcttgccacctatcacctccccatgtaacatgcatagacatttcatgcctttgtcctatctgttgaaaagggaacagcacgtctgtcttctctctctgctctgttttsatttttcctatgaccagaggttgctgcagagagtgatttttaaaagacaaaaccaaacaggatcattcttcttccaaatcaaatatggtcaacgtagcctttcagagagagactcaccggccattaaaacttctcatagttttaatgaaaagtggcagtccagcaccatggtggtgctgagagaggacctgcctacatgtcacatgcagctagaggggctcacaggccaggaatagtatgagattgcctacatagtgtctaacacatggcaccgaaattttagttaacatcagtgctcttacttttttctttttaagtaacaccagggacacataactttttattaatctaaataaatatgtgtgttgctcattaagcaaattaacaaagcttgtaatactgataattatagtaactgctatcttttattgagtatttattttgttccaggcactgtgttaggatctcatacacatatatctatctgacttaaaggtgatgaaactgaggattagaaggattcagtaacttgccacagtggaatcacctagtatgcactgagagtgggtccgtgtgccttcagagccagcgctctcagcccttctgctgttttgcttcacagtgtgttccagggagtagtcggatctctgggaagcctgagactgattgtaacggccaggacaggagatcagctctcctgagctatttactccagcctagggcacttctgcgaaaaccatctgagagtatctctggaagactggggcatctgaaaccayggctttaaaacagtcttgccagagagtaaacttagtttccataggttgtgatctgaaccatcatgttaatgttgctagcttctcacatccacttcctttatgagttcattttcctttttcctgaaatatacccttcttaggtctttcttcaaaggtatgtgagttgcagaccttttcattgtgtctcactttgaaaatgtttttattttgccagtgttctaaaataacagcttagctgggtataattgatgtagrttgacagtttcttggtattattccattagctcctgaactctttgtagctactgagaaagctatttctttgttgttgctttgtaagtcctatttttcttctctagttatttccaaggtcatctcttcatcttgggtgttctgcagtttcattacaatgtgactaatacagttttttaaaaattaaccccattcaggacttattatgtttcctgagtctgaagagttcattaattctggaaacttctcagtcattgtctctttagatattgcctctctttgttctctctacatttttctgatactcatattctatcctatatgtttcttaacctgttttatattttccatttctgtccttctctctactgtattccaaacagttccttagagttgtcttccaatttactcattctccattcagctgtgtctaatctgtcatttaactctgcgactcatttttaaattatatttttatttccatacatttttatgtaagtctttttttattatactttaagttctggggtacatgtgcagaacatgcagttttcttacacatgccatggtggtttgctgcacccatcaacccgtcatctacattaggtatttctgctaatgctatcccacccctagcctcccaccccttgagagaccctggtatgtgatgttcccctccctgggtccatgtgttctcattgttcaactcccacttatgagtgagaacatgtggtgtttagttttctgttcttgtgttagtttgctgagaatgatggtttccagcttcatccatgtccctgccattcttttttcattatgctctttcttgtggttcttttatgtctttaagcattttaaacattcttaattgtttaaattcattttcaatcatttaagtactttttttattgttcttgtatctgaaatccttgggacactgatccttctgtcttttatgtttagtatataatgggttatttcttcatgtgttctgtaatttggggccttgaggttatgttcattggagcatatcctgagacaatcccctgtggccagccttttcctcagtgctgtttctgcattttcttctgccaggtcttcaagggttagcaccttcccaagaccagttttatggtaatttctcagcttgagggtctgaggtactgtacactttgaactctaaatccacatgagacacagacctggaattttaattttcagggtaggcttcttctccgtgttcttcaaatccagacagaggcaagattcctttttgccagtctgtgccaaggatatgttttgttttgttttgttttccctagtctgctgttacatcaagggtggcaaccctttagaatacccacaccgggcaggaatctcagttccaacttcttggttcatgtcggccaaagctttcattctcaggtgaaggttaaaatctaagctctaggttacaataatggatactttctctgctccaggtagctacagcattgggcacttactgctgtggtttgtgttatttactttttgcgtctggagatttttttcccttgctttcttattatctcctcagctacctacttttttataaagtcactactcttacatattgtattagttcattctcacactgctatgaagaacaacccgagactgggtaatttgtgaagaaaagaggtttaattgactcacagttctgcaggctgtacaggaagcatggccgggaggcctcagaaaacttacaatcatggtgaaaggggaagcagacatgtcttaccatggcagagcaggagagagagagagagcgagggggaagcactacacactttcaaacaaccaaatctcatgagaactcactatcacaagatcagcaagggagaaattttttcccatcatccaatcacttcccaccagatccctcccccaacactggggcattacaattcaacatgagatttaagtggggacaaagagtcaaaaaaatcatattaacattattcagcacatctaggtacatgtagcagtagaatctttagtttatcttattctgcatcactctagaactttctaagtcatactatctgattataaactaactgtcatacataggaaaaattgtggtagacaaagaggtagacatactcttcgatcacatgtttcagccacctgtccaaaacacacactttacccaacctgtgctcatttatttgcccagtaaaaaattcagcacgaagcaatggggcctaaaaatgttgggccacaccagtagcttcttcaaggcatgacagtgtttcacaatccccccaagcccgtaattgaagcctcttgacattttgcctttgaaattaacccatgggcagtcttattaaattctgcctaagcattcataatagacagacttcaacttgagaaagttgattatgtttctctccagtgccccagaaatgtaagcctgacatctttttttttttcttttgaagtaagaaaataccaagaagagaacacttcttttcacaaagtttggaaatggacaactgcaactcaatacaattttgaaagagtttattgactctgacttttactttattagtacttacttgttccaagttgctgacaatgcttcagtcttatggcttcaatttttcctaactgagggagtagttaggagcaaatagcatcatttctgttttattgagacctggagagtccmtagatttatccaagtagcaaagatagccagacctccaaaaaaaaactgtgcccttgaacccaacccaacccacttgccccaagcaaaattactttttcgcagaagtatattttaagattattccctcaagtttcatcaagggatcagccttatgaaacctgctagtgctttgaggtgggatatagctgagacgttgaccgcaaacgtcagataatgttttctagccaggattaagagcatagctttggaggcagttgcatgcctaaattggaatcccacctctgtcacctaatatttgggtgcatctctgcaataggaggtgacagtgtctgcctctcaggatggctgttccaatcacagccagtgagatcatgtgggtacaagggctctggaagccgcataactttataattgttcattgtctctattgttgctacggttactattaataaaatgtcttcaattttaccaacactgtgtgatggcaaggcccagagctttctttagttttatgcatatttggaatttaaaagttgttttcatagagaagtacatggttctaggatgagtttccatcagtttgttatgttagctcttcaggtgaagaggttgtatgggatagtcacgttcctccctagaaggtaaaaatgaatccacaagacatgtgccataactgtgatacagctatgaaacagtaagcacaaacattccagcaacttctgaattcagacaaacactacaccctccatgtggtctatgttgaagtcctgtaatgcagccagtttttttttttaaagaatttttataggcccaataataagccacatcaggaaccatatcttgttactttatggttatgccttcttttaacatatatggaatattaatcaattagattactttttctcaccaattttggctctaaatgttgccgggccatttgcaaaaatgaagtctcccttttatagtgatacatttaaatagtcatttataattataaagtgcctgaaaaacttatccgctctcagtaacactgtgaagcagttggaatcctcactgtaaaacagggctacctaggcttagagccgtgaagggactcgcaccaactcacttctcktacaaagaggagctctaagctgagaatccagtgtctgacctcctcaaccaacctgttttgtgcttgtcttgctgcctttacgctctgcagagcaaggatttctctctctttggaagaatgtgttcccctaaatgagttcccatcatatcttcaacaagtttcacttgaatttgtaaattctgagatgagtttgggcaaatcgctgtctctggaagcttcgctctctcctattgttaaaaaatggagtcaatttaaagttgccccctgagccttaggggttctgaggagcggatgggaaagggctgtgttgagtggggcagaaggctagtatgtggggtcctcttgccccttcagctagagcagctttgctttgagctgtgccacatacagtgtaatttaggggatacaaataggaagggcagagagattggggttctgtttcattagaaaaaaaaagatctaagccaggaggccctgagatggtggtgctctaaactgagcttgacgggacatgcagaactgttttctccatgttatagatgagaaaacccatatgtagagaaggtaagcgatctacctagatcccatagctcagaggaggagaatgggaatttaaactcagatcacagggccttgatatgtgccatcccctctgtctgggactgcccgccacccgctctcactttctttcactccatcggttcctacatcggtcaggccttagcttgttggtacttycacagggaaccttccttgacttttaatagcccttttgtgtggcctcatggcaccatgtaccttccctccataacttttagcacattgtaatttacatttctttgtaattctttaactaatgcgtgtctcctatgctagactgtggaatctacaagtcatgtcttgtttgttttgttttgttttattccaccattaggtcctcagtacccagcagaatacatggcatatggtgggtggtcggcattcatttgctgaatgaataaatgaattgagtggatgcatgaatggggacagtgatgttaaacatcatatgtgctgcttccagggtccctttcgactctgaccaccagtggtcctggcgtttcctagccagggctgtcatgctgttttgctgccaaaaacgggtagaggagtttgaagggctatcatggaggagaaggactggagtgaatccagggcgagtgaggagaaacacaggacacactcgtcagcttagtataaggggagcccacactgtcagagcatggaatgggctgccccacaaggaatccaacataaggcctggcagaaagagctcaagcatggaccagaagacccctctggtgccttacctttgactctgtgatttcatgaacatgttacttgtatgatgaatatttaatcaggatatcactgctatattccagcctagaatattgtagacggaggaggtgcatcctaccagccaaatccctgttttgcccctcttcccttcaatctctcactgtttgtcgagagatggtgcaattaattagacccagagttcccctcaaaggtatttgcaaaataacagtgtcattggaaatgtatacaaatttctctttaccgatgtgtaattccttcataattaacggacactgagtcttaaagtaattaacctatttcttccattagtcgctgaagaaataaaagttttacaacataacacagtcataggtaattctactcatgaataatgggggttgagggtgatgccgcagtgaactccttggataggtggctcttaataccatatgggtgacatggtaatctcatgtcctctgcctatcttttctgacctccaacttgtttatggtctgtgccattcatttaacatctcagtagttctctcttatttgccaggaatgagacctcaagtgaacaggaggctggtgtctgtatgcagtgaagccactcagagcagggtcatcccagcctttcagaggagtcttttcaggacctgatcctgggtccagtttttcctgtcgctttcttaatgatggatttttggctgtgccttctcaaacagaaatataaggctctcttctgtgaccccacccctccctgccgcatcccagcccatttctgtactctaccgtctgtacacgcagaccagctgctctcagctatttgcgattccttggactggtctgtgcaggctcacaattctgtctgtgctctccgcagaaagggcttttcctctgtaccacttaaccatgtgccaaagtcatgtcccatccttccatcaccagttcatttggcgccagtctgtgaaactgctctgatcgctcctggacagggtgaaccactttgtggacataccatggccaaagccagcttcctacggtgattgtacacagcctgtcctctttcagtaggtcatgcgccgtctgaagaggtccctattgggccatttgtacctggaacatatactcagcaaatcttttttgaaatggaaggggaaataatacaatgaatgccccttgccaccagtacctctggtgacgttttgccagctggactgagctccttgctctccacctgtcaaaatcctacttgtgctttaacatctagacctaatctcatctcctctgccagtctactgacttccaagttgtctatggtccatgccatttatttaacatttagtattaatggtttcatcctgttgactgtctattcatgtataaatgtcttatggaccccaagtggattgtaatatagcctaatccttctttctgtaactttgagatacatcttcccctcacactaccactgtgtcatgcacagaacagccactccatgaatatgtatgtattgatcaagcagttcgtatacctgtttgtgtctcctgcaatgtccacctcagcacagaacaaataaatgctgatcaattgcttgagttggaaacgtagcacttcacctgccacagatcttctgttctgttacctgactcatccaccaaagtgtcgacacgattgggaggctgccttgtaacagtacagagttaaagttagctctgttgactttggctctgcagactaagccagagagaaaaataaaatctcttccaaattttccacacaaacgaaaagcacagggctttggaaatatgtgcaaaatgagacattacttcttgttagaaatgtaaaaggatggctcagaagataatggaatagttgaaaagaatgtgttaaatatggccagaccctgccatagcattaagagtggaggatctaaaaaaaaaaaaaaaaaaaagaggcatttgtatacaatgcaaggtatcttcattgctaagctaatgaaatcatgaagatgctccatccagggagggcagaaaccaatcacatgagactcattgcagcccccctgctgtgtgcacaccagtgagctgttgtctgttttgttttgtttttcaatataatgtgggttcccaacttgcatttctagtaataatcactgggcatcatgtgttcagggttcatctatgttgtagcatgtatcatatcagtgatccatctgtacagacgaggaagttgaggctcagataatttgtctaaggtcattcaggtctttctgtgtgggctgaagtagaggtggataaccttcagctgcctgaataataataccaactgttaactgttagcatgaacaacacttaacactttacctatacatttttttcattcaattccttcaaaaactcttgttagttcatgatctatattttagaaggagaacctggactagaaattaagaactagcccaagactctgtaactgagaagtggtaaagctgggcgagtctgcatcccaagtctctccataagagagtccattagatttccccggagcagttattgtcatatacacacgcatgcaaggaccaaggagctcggccacatcccgcaggaggtgcttggcaggagacactcactgggaagtaccaggagaagtcacagggagtgatgggaataaaaacctgggggtgttttgaaacatccctgaggacttggcgagtatttgatgttaaaaagcatttcttgcctgcaaaacacgtgtctctaaggaactcttacgttgccgacgtgtgctggctaggagctgggcccggcgggggaggccctctctctctctgcctctggccctgcctccatcaaggcctggattggagttgtctttcccaaggcagtaactgtcagaggaaccatctggactggtttcttgtgactgactctgaggaacagaaatccctctgggaggaaatcacaggcacagcagcagcagggagcggcaacactggtgttcactggctgggagctgggggaggcaccgctcagaatggccccacaggagcgtcaggcccaggacagaccgttgtgagaacgaggaggagaacctcctctcctcctctggggagtgcgtgtatggtatttgcgaaataacaaagggaatagatggagggggcgaagaagtgtccagagcattgttaactgatggagccccatcatctgcacgatggctttctcagtgggccctgccacgctgcactttgccctcattaggccagcgtgcttccctccggctcccatcgctcatatcatgggcccatcctagccttgccctttcttcctgtgcaggctctgggaatgctggaggattgcttgagcctaggagtttgagattggcctgggcaacatagcgagaccctgtctctacatgaaatcaaaaaattaactagatgtggtggtgcatgcctgtggtcccagcttttcaggaggctgaggtggaaggattgcttgagcccagaaggtcgaggctgcagtgagccatcattgtgccactgccactgcactccagcctgggtgacagagcaagaccatgtctcaaataaataaataaataaaaggatctcttctgtcttctgaggtgactcctaggattctagagccagaaggagcctcagagcacatttattccactcctgtcactgggggcaaaaatgaggccagtagaggttaaatgactcgcccagattcacacagtcatcacaggagcttgggctggcacccaggcctcctgcctccaggcctgtgtcctcttcttgcattaagcccagagcagttcattaggaaaaccgtatagagtcatgagaccctaagtctcatgatcagaatttcatcttctcttcccttttkkkttttttttttttttttaacatagagaaggtaaagggggaaaatgatttacttagtttccagaccacttatttaaatcctgcccaatctgacttccactcctcacttcactgttgcagccaaagctaactaatgcatccgtgctccaggggaaggaatctcttcccatcctcagtccaaagtcagagtccaaactctgaggagggtaaaagaaacacaggaaatacaagtccctcacccccacagcctcattacactctccaataagccacaggagtaaaggaggaagatggggcggatgcgtaggtatggagcgcctactctgggtggctggctctgtattaacactctacacgccccctcattcagtcctcacaaaccctggaaagcaagttttgttcgcctcactctgcagatggagttattgaggcgagaagggtgatgtaagctgcccagagtcgcacagctagcaaagggcagagcaggaattagaaccaagtttctctagctgcaaagtctggttctccactccaccatgcccattcacttctatattttcaggagaggccatggaacctgtcctcacttcctcctcctcctcctgccttactgtgcctcttgcccgagtccagccctacccactaaagcattgcacgtattgaccctcgcagccatgcacagtgcctctgacgtgggcagctccagactgagcttctgcatcagacaagcaggagacagatgaggagtgagccggggaaacccagtgtttgttactctgaaaatggaagctgccccgtgacagcatcttctctcccgttgagtaatccctgcatgaatagatggcagctgcagtgactgctggtcatatgtgatctattctgggaggtgttgagcgcaccatccaagaacatgaagtcgctgctctgtcacagatggagaagcagactattgtggatgttgcaggagctgggatttggctggatcccctggaaaggttttattttgagtgcagagcctgtttggttgccagggtaaaccaagtggttgtatgatagaggaattccaaccctcgctaacactctgaccccttgtgccagctttccaataaggcttgagagttctttagaaaatctccttcttggcacactttgaactggagagcagtgacactcttggcagtgcttttggtacttgttagttgtatcacttaagttgatcgggaaaagaaaataatcactggggagggaccccttttaaacatttatagttttgagaatgcttcactgatccagccctgactatactcagcacctatacatccttgtctttggtctaggggctctggtaggaggcggcattgaaatatgccatcccctccctgctgttgcattctgccgtccagcccagctctcccattggcccacacggggctgcccctctggccctggctctcggcttccacacaagcagctactcttgtacaggatggtaaagttaggtggcattcacactggagcagggaccaggatccaagtgaaagtaagtttcaggaaaagcttgagtcatgtttccagtttcaagagccaggctgaatctctcagaaggggagctgacgggcggcagtgggagagtggaagaggtgggccctgggcacagcatgtactatggcatcgctcatcacctgccaatggcagggagcgtgggctgtcttatattctgtttgcccctctcaagaggtaagctcctagcaggcaggataacctgaagccctctggtgggccctgtagtgccgcactgtactagacaaacagcgcgtgtcagtgttctcggggaggtgggagaaattatgcactgaagagcaaatctcgggagaacatgaggttccacgtggggtgcggtgtggctgacttcatcgccaagcaagtaccagcccctcctgctgtcatgggcgtactagggaacagtcctttgctcagccggctcctgggtttctgcaggacctcagcaggctgctaactcccgratgtgagctggttgagggcagatactgggtccccttcatgtgcttctctgtgtccaactcagtgactgaaacatgctgtttgttgaataactaaaggaatctatgaataaactggtgacaatggaagccccagaggttcaaacattctaagatgcctataccaaaatctttaaaaaaaatcaaactctatccagtgaccaactcattttagccaataccccaatgcaatgaaattgtagcaccaaaaaaatttttttagaatctctcttcaaactccttataatgggatttgacctctcagacttagtaatgggcaatctggtttactttgcctatgagtagaagctgtgaagtacataaaagagaacttttgtttgcctctaaaactccaggtagtcagtgcagcctgttctgtccttcggggcaggcttcttgtcctgatgagtgtgcctgcgtgagttgggggaggacagtagcaacctcgtggtgcccaccccggcccccatgctcttacccttcctttcttacccttgcagccatcccattttcccagccagctgtctggcttcccagaccaccttttaatgcccctataagcaggaaagacattaaatcgtctgtgccccaggcacagcccaccccactcacagtcattcttcctgtccagctgtgccctctgttggtggaagggcagagccagagaggagcatgggctcattccatctcattttttaacagaacagttaaaagaaattactcttctccataacttgcaaaccttgtcacttcttagaggacattgggattaaaggaagagggtgacagttaatagctgggctctgaaaccagatttcctagtttttattattttaattgaggaaaaattgacataacattaaccattttttaaagtgtacaattcagtggtatttagtatgagaacagtgttgtgcaaccatcacctctatctagttgtaaaatatgtcattaccccaaaggaaaaccatatccctatgaagcagtctcccctatgacccctggtaaccatcagtctgccttctatctctatagattccccttttctggatatcttctgtaaatggaattgtacaatatgtgttctattgcatctggctttcttcacttctgttcttgaggttcatccacattccatctagtatccatccatgtatcagtacttcattcctttttatggctaaataatattccattgtgtggatataccacattttgttaatccatccaaaaaaaatttttttttcagactgagtctcactctattgcccaggctggagtgcagtggggcgatctccactcactgcaacctccacctcccagattcaagccattcttgtgcctcagcctcccaagtagctggaattacaggcgccctccaccacacctggctaatttttgtatttttagtagagacggggtttcaccatgttggccaggctggtctcaaactcctgacctcaagtgatccacccgtcttggcctcccaaagtgctgggattacaggcatgagccaccgcgcccggccaatccatccagatattagtggacattttcatcttttggcaattgtgaataatactgctatgaacattcttggacaggtttttgtttcaacacatgctatcaattctctaggatatattcctaggagtagaattgctggattatatggtaattctgtgtttaactttttgaggaaccaccatactgtggtttgtactattttacattcccaccagattgcttagttttgaatccagccctgccacttacttgttagctgtgtgagcataggtaagttacttatggtctttgtgcctcagtttcctcatctgtataatgggtcagtaatgctgtttactcaatggggttatgatacttaaaagaggtggtgtatgtgaatgcctcagaacagtaacgggtgtacaaaactggtgcataaatgtttgctgctgctgcgctgttactgagagacagtgtaggtcatggcagatggaagactgaaaagggtttgggctaaaagaggctgcattgggtgatataaaagaaccagcagaactagaatccagacacttggagttggttgctgagggcatctttcacttgaggaatcaattttcttatctgttcactgatgagctccaagaaccttcagctccatgtgcctgtggctttcctcgggagaccactcttcaagaatgagggaccagggtcctccactcctgaccacttgccagctccattctttcagctctccaacatgaaaaaggaagacaggagtatgtcctgtcatctgaaagctacacacagaagtttctagaaaatgaagccttctctgtcatcattcatgttaggaaaaggcaaacctggttgactttcacttgattctattgaattcaacagaatcaccaaacaaacattctgctaaatagtatttctctcatatctatatattatgagtatttatctcataatccatgtatttatgaatcatttacacctaattcatcaaaatgctctgtataagttgtttgaatcccaagaatccttatagaggcctttttctgagcacatagaaataggaaaacagatttttccccatccatcttcaattggcaataacttttagaggtgccatattaccagctcttctgctaggagggaccagagtgaaacagtgaaaaaacacaatgtgataataattgccacaatgatactttcacctcacacccaattagcactttataatttgcagagtcctgtcaatttctaaacaggccctgatttctccatatcttctccaatacttgttattttccttttgtttttaaaatgagcatcctaatgggcctgaagtggtatctcatggtggttttgatttgcatttccctgatggctgaagttgaacattttttcatgtgcttgttggccatttgtttatctttgcagaaatgtctattcagatctttggtacatttgttttactatgttgttggctattttatcgttgagttgtaagagttctttgtatattctagatacaaatcccttatcaggtatatgacttgcaaatatcttctcccattctgtgtgttcctttttgactttcttgattgtatgccttgaattaaaaaaaatgcctaattttgatgaattccaagtttatcattttttttaattttttcacctgtgcttttggtgtcatctaaggaggttttgcctatgcggtcatgaatatttactcatctgttttcttctaagagtgataatagtttcagctcttatattgagatatatgatatattttgagttagtttgtgtgtgtgtggtgtgaggtagggattcagcttcattcttttgcatgtggatatccagttgtctcagtatcaattgttgaaaagacatttcccccttggatagtcttggtgctcttgtcaaaaaccaaataactgtaaatggagcaattgtagtttgaatggaatgggtcagcacttggtggcagcaggggtcttggctatgtagtttcataagctcccactcctggagagcctctgttttcctctcaaagccaggtttttctgtctcgctgcgttttggtgcctgaaaggcttgggtgggcatggtacctggagtactgttgttyggagcacaaagtgaggagaaaagaccactctactttgtgggaggtccttggggcagtttgggcagcagtgcctcccccaggagtcagggtccccaccccagaggaatgtccacagagcagagccattggcctgagctggactgaaaaagaaagagccaggtggggagaggatttgatttctcccttggtctaaagcaggcagctgacattgggtgagggaatggggcaggcctccatgtgctatcgggaatccccaggaggtccctacagaaaacttccacccccagcccagcttgtttatcacagcccttcagtggtaacttcctcctgtggcttgatccaaacgggggctgcatatgtggccaaaatgcacataaccctgtgaggcacagcatagcagcttatcttccctgaaagtggaaggacaaaagcaggacaaagatgaccaagccagggtgggagagaggggaggagacactggaaggggaggtgaaggggcagactagggaggccaggacyaaggcagactctcatgcaccaggcatattctgcccagccaagggctctggcattcagatgagggagagggagaggaaagaggagagaatccagtgagaccaatccatgaagtgtcgggaggmccctggaagcaaaggctctggactcaggtggcatcaatgggactaccagtttccagtgaatatgtgggagtggcctaggtccagctcartcagaagcccatttgttcaaggccctggtattactgaaggcccagccctgtctcacctgccagaaagcacgtggcctctccctggctaggctaagggctggttgacggcatcataaaaggaatctgcctgggagccctcaatttgtttcagtttcctcccccaaggccaagaagggattgggttgcctctgttgttgttgctgctgctgctgctgctgctgctgctgggggttggaaaagaggaatttgtgtgaccagatccccttattgtatagaagaagagaaatgtgagcattcagagatggtgagatgtcagacacccagccacacagccagtgagagacatgttggggacagggccaggcctgccagttcatggcccaggggtctttctcatgagatcaactgaccagtgtgtcttagcacctgccatgcaaatagaaggccctactgctgtcatctccacgtattccagaattactcagctgttctatgcaagccaagtcaacaccaatgtcataaaggagagactaaagtaattctctacacagcacatacacggcatatatggcctgtatgcttcctggacagccaacaggggtgccgagggagtgagtccctcagccttgcctggagccttgctgatacttcagtttgcctcacaaacacggttaccttccatgacatgaaggaggcacacgcgggttgacccctgaccctgtctgcttgttagaatcacgtcgggaacckgggacaggcttakaagcccaggtcccacctcccacctgctgaatccaaatctccagagcgtggcctgggaaatcaaatttgtcagcttccttcccaggggactttgatacatccaccccagtggaaaccagcagcctcctttagtcaagcgaatgtttccctgactgtcaccttctccccctgtataagatgcagattgttagcggtaaatggtacctggattccaacctcagttctccactgcagttggggagatctggccagggcaagccacactgctccttcaggcacagccttgttcatcccgcactcacctgtgttctcttcctctctgtaggacgcacaagaccagccactgctaccgcatcacgtaccgccacatggaacggactctgtcccagagagaggtcaggcacatccaccaggccttgcaggaggctgcagtccagctgttgggtgtggagggcaggttctgatgtcaccacttcactcaggctgcagccctcttggggctccaggatttgctgaaagagaaaaagatatggtttgtgaactggggcatcaatcatcttttgataaatggatcagttttaggactttcagaaaataaaagatcgctcttgaaaagctgttgacatagcatttgtcttttatttggggaaaggaggaaggtcttttcctattccttttagaagtgctttgcccactggcattggtgcttagtatggttaattggtccctgggttccattaagcaccaggcatgatttcttgcctgacaggctcttccactcaggtaatgagtgaagccacacagagggacatcagaaattccagatacaatacaggaagctttttgaatcagcttccattccttcctcccttctcttctttttcagttttgcaaagggcaggcttcaaagagggcactaatgaaatgccagggctctcgtccaatgtgaagggaggtgcgtctttcagccagggcaggatatctatttgcttttcataaacccatggcttggagtcaggcctctggccccaggacttgggcttagctgccttctgccccactggagaggaaggaaaggggcgagagctgccccagagtcttggaggcacacagaggggccaggtcctcaaactcccttcaagttttcccagcaggcagcctccacttccagaaggcgacctttagggaagaatatggggctttgatgttcccccctttccatcccaggcactttgtagtctgcctgcctcattcatgaccagttttaataatcagcttccatccctggcatgatgctagaggctgatggagggctgcaagtgctgggataaatatttgatgaggagtggccagtatcagctagcggcgtgggggtgggcagctgctttcctaagggaaggaacagctttaatgtcatcttaccatgtgattaattaggactcttcccttggatttttaagggaattaaggaagccataccccaagtcccacacccaatcctagaaccaaaccgctttctggggtcttagggcccacgggtacaattccccaagtggatggatctgagtgggaaggcacaatgtgatcactgatttcctcttcagtagcatttgccagcaggccatttctgattcagccttgggctgcacttcaagatgtccctttatccccctgactggttaggcacttattaatgttctttaagaaagccagcaaggtgtataaaatgcaaaaccatgatgctgtcctgtggcccagaatctgagcaatatttgtcaaatacagtcacgcgtcacttaaggacagcgaaacattctgagaaatgcatcataggggattttgtcattgtgtaaacaccatggagtgtactcatacaaacctaaacagtatagcatactacacccctaggctacacggcgtagcctattgctagaggctgcaggcgagaggctacagacctgcacagcatgtggtatggtttgaatccgtgtccccacccaaatctcatgattaaatgtaagccccagtgttggacgaggggcctagtgggaggtgattagatcatggagatcagcttctcatgcatggtttagcaccatacgctcagtgctgttccatgatagtgagttctcatgagatcaggttgcttaaaaatgtatagtccctccctccccgccaccctcttggtcctgctcctgccatgtgagacgcctgcctccgctttgccttccgccatgaggaaaggctccctgaggcctccccagaagcagaagctgccgtgcttcctgtacagcctgcggaactgtgagccagttaaacctcttttctctataaattgcccagtctcatgtatttctttatagcaatgcaagaacagagtaacacagcatgtcactgtgctgaatactataggcacttgtagcaaatgttatttgtgtctctaaactgaaaagttatagcaaaaatactgtattatcactgtcccctatgccatctgttgttgactgaaacattgttatgtgacgctgtatttgtgccaaaccctatattaaggtcctggggtagggctgactttccaaagggttcacagaggcctttcttgaacattcccctcaacactccatgaggtgtaattgactgttacttaaatcttacaagtgagggaacagaggactgaagaagtcacaggagttggccatgacttaagctatgacttcttcaggcctctgttcccttgtctgtgactcaagatacatacacaggaggtggcaggcctcacactcaagtccacggcctccacattaagaatgtctgtctgcagcctgggcaacatagtgagaccctacctttacaaaaaattttaaaaaccagctggacatggtggcatgcccctgtagtcccagctacttgggaggccaatgtgggaggattgattgagcccaggaggctgcagtgagccatgatcgtgccactgcactccagcctgagcaacaaagcaagaccctgtctaaaaaaaaaaaaaaaaaaaaaaaaatgtgtaaacagtagtgggttgactgtaaggtctgtgcctctctcctgctccctagaccttcgttctgtttctacgagggcttgtgcagaaccccctcagggtccactctgaccgaccagcacttgtgccaaaagtgagccttccctaccaccaaagagccaaggggacatccagctcttgactttttcatgtgacttctacaggagaataaataatgaacgaggaaaagaaaggtaaattaatccattagatgaagtcactttgcagttcaagaaacacatgattcccaaaggaaggacagcctggtgaccaataccagcactatggctatgaccctccaggaggcccagtttcctcctttgtcaaatggggatgataatatcgcccactgcagaggctgtggtgagggctgtgtaagacatcgcatactgcacttgccgcagaacccagcacctgataagccatcaagaagggtcactgctctgatcattattcagggagaaaacaatggaagtgtgaaccatccaaactggaacagatcccacagggcatccacatgtccccccggtctatacccgaggacactgaagtacaaagagacaagtgacttacccaagggcacagtaacagtgaagtattgtagagctgggcctcaaactggggttcccagagcatttttccaaacaccacattgaagcagagatcctgaggtgtctttaggtggaaggccaccacgggggtcaggacaggtcgggccagggctgcagcacctcgggaaatgctggagaggccttcctaaagggcccttgggcttgactcttacaattccatggtcttttggagaagtttccctgcagccctgttgtctggtgctttgagacatgttgatgtgagaagacaaccttacgtagagagtttccctccttgtaaggatggtctagaagcccatatcctggagctgtggatcaaggatccttctagcacatgtgttacctgtccctatgataggcctctacagacgccagcaagactggggccagcaggcattagcaattgggaatgtcgtgggaataaattatgtgaccatctggagcctcgggtggagcagagggccttgcgggctcaacagccatttgtgtctttgtcccctccccaggttgctctgctcctggctttgcccaggtcctgaacaagtcagcaaagctgaacagggtcttgatgctcccagcggtggctggtggtcaggcagccaagaaatgggaaaggaagcccctcaacactggaagttcaatttttttcctatctaggaaacaacaagtgagtgaactctgtgtggtggcctccgaatgcccccccagccggccctgcttaccagactccccactaggcacatgtgtgtctttggttctcacgccaggagctctccatgctacccactggccatgatgacttgaggagcacttagcagctcctggcctgggctgtctgcgctcttccaatctgcaggaaggtggggcactgccatcactagtaacagggatgtggggggcggtggcagctgacgtttgtagtgtgcaggtgcagcaccccgcagtctcagtcccatagagagtggagctgctgtcttatgtgggagagatagagccatgagcagggcagacaaggcccagccctcgtggagtccacgctcatggtctcattccaccgcctccagcaggccccatgcttcccattctccaagtgaaaggttaacgtgttccaggagccattgcaaagtcaaaacttaaggcctcctcacatccaagtctgtgctcgtcaccttgcccccgactccccctgcgcacttgcccaggcacacctatggccggagctaggaattcactctggaccagggcaaaggcaggtgggccaccaccatggtggtgacatccactgcatggagcttcaactttcaaggcaacagtggtagccacaaacaaaccatgggaccctttcataaggtgcttggtcatggaacgtgggcccttgggatcagctatgggctctaggtcaaaacggttagaagccccactttatcctcagatgctcaaagttgtcaatagctttacacttgcaaccgcagtggcttcaggatgccaaatcagatgtcctgaggaatagaggaaactctgaactgagcaatcttaggatccttcaaggatgatggtgtccccaggagggtgtatcctagcgcccaggaagtgggccagcgagagggagggaatgtgcttattcctgatctcagcaatcactccaaagtatgctgactctgagttttctaagtggcttctgtacccaaaaatgcatcattgcttagaaagtcaaaaaagcaaacaaacgaacgaacaaaaaaacacagccagtgccctattcaaaggcgggggccacaggtgatgccagcaatgtggatgagaccatcctgccctggttctttctctagcccatttccaagctcatgggctttgctcaggaggagagtggagcaggaacgctcctcggagccctggaccaagcccaagaccacgctgggggtctaaacccagctctgccatagatgagtcattaacatccctgagcctgcatttcctcaaccctaaaacggaggttataatctctggccctagtatgaatggctcagcaaggagtagggaaatcgtgtgtgtaaaacttgatgcatctcattttaggctcacaaaaactccacaaaaggtagccagcatatgtctacttgggaattgagaacatgaggcccgaggaccaggcctgagtcctcagtgggttttcaagatagaatttaaggccccttctccatgagactaaaggccacagccttccttctgtgccatatgtctgccaagcatggaaaacagatgggaacgcgatgaatacgagcagtgcattgccctccacggccttccctccccaagtgaagtgtgtctttgtctattctggatctaagccttaggaaggacatagcacgctctcacatgcaaaacaacagagagaatgttgagttcaacatgagaaatcaaggtgggctcttggaactggttacacaaggttgcatctgaaaaggaaatcagtgtgttacgctttccagagcaacacttcccggcccgtggttcctgcagcaccctcagctgttagaagctcacatgcaggacacaggtgcatccacggctgtttgcagagtacaacttgcccctgctctccctatcaaaaaaggacgtcacaatgcacacgtatgagcttgacattagtataaaggaaactttgacatctatttttaaacagctgctaatgtatcaagagtgaatcatttgatgccatctatactttattattaagaaataactaggatgccaaagcagtcctatagagaaaggaaggcattttcaacaaatggtggtggagcaacgggttattcatataaggaaagaaagaaaaatctcgacaccctacttcacacaaaattaattcgagttggcacacagacctaaatacaaaagccaaaaacttactacctaatagcttaacgaaaaagacatatg

SEQ ID NO: 94136 - DNA, 98248 bp, Homo sapiens
  misc_feature (1)...(98248): n = A,T,C or G
caacagagaggctgacaccatcagaagggcccaacccaggagtccttgctgcacactctcctgtgtatcgcatcaccctggctgctgtcacttgagagacaagtctgagtgctgatggaggattacatccatgagggcagggaaacagatgccccattagcattgggaatggtagggtctgggttgtgctcagcttccagggctgggcgagaagataggaataatgccccactctcatctctagcagtttcctaccttgtatggaaaaacctaaacccaggcttagcagacctttctaggtgtggccccttagtgttgcagggggcagagtctgggatccaggaacccaaagtctgagagctacctcctatctttggctcagcactcatttagggacaggctggggtctgaatcctgaagaacacttggacaaagtgagtctggacttttgaccctctgtggcctagggttttcctgccctgggttctgaggaagcccatgactcccaccttcccacacccgggcaccttctgacgttggcagcaaatgagaccagatcagagtcactgggtatgtatttcctgtcactgcacctgctccagttctgcctcccctcaggctgggatgctgctgttgccatgccagtgacaaaatgtgtctcggggggctgttactgggatgcaggcccctttgtgcctgccccagtgtcactctgacagtatgacttgcaggaagcgaaagctgagcccctgagacctcattccctaaaggttgacccacccccaccctagttccccagcctcaatttattcatctgcatagtacagtaatggaaattttgcttgtaggtttcctcagctggccagaactggtccttccctctctctggctcctgcagcacctcagttgaagatgtatgtggccaatggtagccacagagctgctttgctcagaggtagctgtcctcagcccagggatcctggcctttcctggaccatgactactgctggaccctgggactgcccctacttttccctaagttcatgacctcttccacttaactgctgcatgacctttctttgacctatgacctttgagctggttatggccttgaactcctgacctcatgattcacctgcctcagcctctgcagtggctccctctctccttttcctcctatcagtcctcctgctggccttactggtagcccagaacctggcaagcagtcagttgacccctgctcctgtccaggtaagcagcatatgagggaggggacagccttcctaatgccttcagccccaggcgtgtgaccacagtggtcaaacctttccgcagatatgccacaacttccactgcctcggagagatgtgctaccaggaggaaaagttctccaaccagaccacagagtgttagcccgggcagcaccactgcgaggtgtggggctggggctgtgagggacccaagccagggtacttctcagaggtgaaggagagtggagggaggccattggaagggggattgacattcaggtacagtaaggtgcaggaacagatcctgaagcgggagggagaggagtcagtatctgggatgctgggaacgtggagctatggcccaggcctggctgtgcccccatcctcctggacatgcctgcattctctctacccagctgattcaactcaacgcttcccactacatggcctggtgcagcttcagctgtgaagggggaaatgaaaccggtcctagcccttgtctgctgtccaatagctcagcccccagcccagacccctgcaggctgcagtgctgcaatggagggccactctgtttcgtgctcaatgagtcagcctggggtgagacagccccacccttaatactcagccctgccccgccaacctgcagctcccagccccattcctcagagcccccacctctgactcccattcctactcatccacaagctcagagcccttctgcacactaaccctcaactttgaacccagccctttgagaggccctcaaatctcagctcaattttcaccagcccccccaacctctatgaatatgctaacctctaggccttttctgactgacccctacctttttttcttttgtttttttgagacagagtcttgctctgtcacccaggcttatgcagtggcgcgatctcggctcactgcaagctccgcctcccgggctcacccaattctcctgcctcagcctcccgagtagctgggactacaggcgcccgccgccatgcctggcttattttttgtatttttttagtagagacggggtttcaccatgttagccaggatggtctcgatctcctgacctggtgatccacccgcctcggcnnnnnnnnnnnnnnnnnnnnnnnnnnnnnnnnnnnnnnnnnnnnnnnnnnnnnnnnnnnnnnnnnnnnnnnnnnnnnnnnnnnnnnnnnnnnnnnnnncatggtggctcatgcctgtaatcccagcactttgggaggccaaggcgggtggatcatgaggtcaggagatcgagacaggccaaggcaggtggatcatgaggtcaggagatcgagaccatcctggctaacatggtgaaaccccatctctactaaaaatacaaaaaattagccgggcatggtggtgctgggcgcttgtagtcccagctactctgtaggctgaggcaggagaatggcatgaacctgggaggcggagcttgcactgagccaagatctcaccactgcactccagcctgggcgacagagagagactccacctcaccacaaaaaaaaaaaacaaaaaaaaaaactctgccttcctcattagctccccaagtctgagctttctacctttggtgccccaccccctctcagattccccactcctaacatccccaccattccccagtccagcccatccagcactcccctccccaacaagctacaaagaggcctggggcaagcacctgtgctcatctaggccgtggtgggggagatgtcaggttgtgagctgcccacacacatcatgctctccctgggggcaaggcagggggtcagggctttacagaggtgtcacagcacttccccaggcagtcctgctctgctcctaggcctagcccacccgacgatcccagaggacaagctacattccattccacccctggtgaccaccaccttgccagccctccagggaaatgtgtctcattctcacctgcctcctctaggaagtggaggcaggaatggacagcgtgtggtggatggggccagtgacacaggcatgatagggctccagccttgcctctgtccagcatttaccacctgttcagtctgcacagagctcccaaacctcctcctgctttctcttccagaagaaaatctgtgctactttctcctgccaaggtggtgactgtttcaaagggcmgaaagctgtggccatgtgccctgagggcttggacttctgtgaggtgagccctgcgatgctccaagaattagggagctctcctccctcagagctgcatggctttctccttctacctggagtgggtagctcagcagtagaatctggctggagctagacctgctgggagcagccgtggggtctagcaagcttgaccccctcagctctgcatgatgccaacaccaaaggcagcaactggaattttccatacctccacgatgtgcccctttttttctgaccaccctgtatgttcactaggaactcactgatcttgtgggcaggaagctaggggtccaaggaggttgagctcaacccatgacccacttaacactttctgcctttgagtggggaagaggggcaaggggaagatgaatggtcccacctcttcttgcagctgaaatgctccagctcaggttacattgcaggctgcagccaggcctgtgaagcagggacctcccagtgtcatggggctgtggccccaccctgctaccaggagtgctgtcaagcctcaacctcaggcagctgccttcagctggatgggaaacttcacttcaaccaggcagctcctggggccaccagaaaccccctgcactgggccctggctgtggctatgctacttctcctccactctgctctgctcctattcctgctcccctagctgggcccagcagaatctgggagcagcagtcaagaagaccctgtaggatctacaagccttcaggtccccctccagctctgattcctgtagttgcatctttagtaaaaggcctttatcaagcccacagctctgggcttaaggctcctcacttctccccttctagggcctaggcctgaccatggaaccccccaagggggcaggccctcagccctaatctcagggagaggatagggtttgtctggaaaaacagaaaacctcctgcctgacccccacccagtgggaggacccccaaatcctgcagggacagtttcttcatcataaaaagcacacagccccatctactttgcccagaccctcctcgccaggctttgacactagagcagggctggaattggggttcctctgcttccctgcagtgaccccaccccttgatcctaagggtctgagtcaatcccctttcccctcatcgtccacatgacttagacactgaattcaaataaacttgagctccatttgtgctgtggatgtttccaggaaaagaaatggattgagaagaaggcaacgactgtttctggaaggggtttacatatgcaaagttgaactggtcattaggatggccacttcacttggggaaagaggaagggaaactgttcacaagtcacaacagtcaccccctccccagcactgaaggcccattccttcagtttgggccaaagcttgagagaaggtgtatttattaaaatagttcagaaagtaattcactaactccatagataactgtgtgccagaaactgctggtatgttgatgaaaaggcatagtcctgtccaacgggagcttacagcttaattaaacagccaataggccaagtgagaatgatcctagcattccttatctgagctgggtgagcaatcacagctcactgcagccttgaactcctgggctcaagcaatcctcccacctcagcctcccaagtagctgggactacaggcatgcaccaccatacccggctaaatttaaaaaaatttttttttagagatggggtctcaaactcctggcctcaagcgatcctccctccttggccttccaaagtgccgggattacagacatgagccactgtgcccagtccctgtgctggctctttttgtccatcttgggtaacctccttatcttagatggggaaattgagtcccaagggaagaaaggtcttggccaaggtcacaaagccaggcggatcaggggaaggacgttgccggacaggaacagtgtcataccctttataaagtgcgttcacacccagtagcctcaaacagccctgtgtggcaggagggctgggtggggctaagggaggaaatagggcagtgtgtagcggtataaatggcccaggagttgcagtcagactttcagtggagtcccagtgttgccacctgctagctgcaggacttaatgtcaaactgcttaacctatccaaggctcagtttctccacctggaaaatggacataatggttcttcatagtctggttctccctccattaaaccaggagaaggtagttattttaggggaagagtttcagtagaggtccgggttgtctaccctggagtgagaagagctgaggatggaactaaggagaaaataaaaatgcattatattcttcccctaagataaaatgtgaccatcttccttctgggtgggaagctctggccccatgacctagagggctggggatgggagtgagggcaatcattagaaaacctttctggtataggaagcccagtgtaccccagggcctaaggggttaacacggatggagagactccccaccccacgattgactcgggcatgctgggacttgcaggctgactgaccaccatgtggcgcaggggctgttgggaaatgtagtcactgtcccggaacctggggcagcggagtcccgtgcgccctgtggtgacagctcaggaggtaggtgacaatgtcagggagctgtgggtgggagcagagcaggaaagccagggcagggctgggcaggagggagtgggcaagctgagggctgggacaccccccaacccccggcctgcagctgatgcaatgggcctgctggggcgggggtgaagggcaagcagcaatgggacacttcctgtctccaaggaaagaggaatgggaccctcctgaatgacagtaaggggatgttccctgaaccccacatggacacaccactgacacctcccagagaggcgctagcagaacaaaaactgtccccaaaagagaggaagagccatgtcctaggagcaaagggactaggtccccttctccaatccacgtaccccacttccaacaaggatagaccacactcragagcaactggatgccctcccagacaaaggcagtatagcaaactgtagatcccagcggggcaaagggactggamccctatccctaaaaactgaaaggcctattctagggaggacaaagaggaggaggaggaggatcaggcctccccggtaccatctccctctgcaaaggcccctccctcctgcccccaacccctctgaggcagctccaccaccccatgcgtracttgttgaccaaagcggggctcctatctcccctcccacagggtgtgtgcgctcagcaggggccagcatggaccagtctgtggcaatccaggagacgctggctgagggggaatactgcgtcatcatatccttcctgtgctaactgcggccctgagcctgccctggccttgggaagaggaatggaaggtgtcgaggtgtctatcccctctcctgcccctctgaaccatcaggggagaaggaaatcagtatttactaagtacttactgagtcctggactctcagccaaatgctttaaatacgcagttatcctcctaactccctatgaagttggggattattatcctcatttcatagataaggaaggcttagagagcctgtttgtctgttagttcagcacatggtttgagtgctcacccaaggccacacagtgaatctgggggggcaggggaacagagggaaggtgggacagcctgggtggggagaggcctcgcctctgggttgtcttcccttgactctgagcygcaggcggtgcaaggtgtgctgtgtgagggggacagccggcagagccgcctcctgggactcgtgcgctaccgcctggagcayrgcggccaggaacacgcgtgagtgaggggcttggtccccacctgtctgggccatggggttgttcatcactgcaccctccagctgaacttcaactrtccctccagggcagggtctgagtctcctagaataattatcacaatgayagttaatattttttgaacactatattytaaaccctgcacacgtactaactcataatcctcaagatctaaggaggaagtttcttgagaagagacagtttaacatactagtccagatcttgagcctcgtggtccaaatgcctgggttcaaacccaggctttgttactaacaagccacatgatctattgtttgtttgttttgagaaggagtcttggtctttgcccaggctggagtgcagtggggtgatcttggctcactgcaacctctgcgtcccaggtccaagcaattctcgtgcttcagcctcttgaggagctggtattacagaggtgcccgccaccatgcctggctcatttctgtatttttagtaaagacagggtttcaccacgttggccaggctggtcttgaagtcctgacctcaagttatccacctgccttggcctcccaaagtgctaggattacaggcatgagccagcgtgcccagcctcacatgatcttttttttagagacggggtctctttctgtcacccaggctggagtgcagtagtgcactcatagctgcatgctggaactcctggcctcaggtcattctcccacttcagcctcccaaagtgttggaattttaggcatgagccaccgcacctggtggaaccacatgatcttgagcaagttgttttactcctcgatttgtccatattaaagagtaaagtgagttaggccaggtgcagtagctcatgcttgtaattccaacactttgggaggctgaggcaggaagattgcttgagcctaggagttcgagaccagcttgggcaacatagcgagaccgccccccctaccccgccccacctcccgctccccggctccatctctacaaaaaataagaaaattagctgggtgttgtggtgcatgcctgtagtctcagctactcaggaggctgaggcgggaggatcacatgagccgaggagtttgagattacagtgaactaygattgcagcctgggcaacacagcaagaccctgtctctataaaaaaaaaaacaagaaaaaaaaaacgaacaccatggggtgtgtagaaagtgctcaataaggctgggtgcagtggctcatgcctgtaatcccaacactttgggagtctgagctgggaggactgcttgagttcaagaccagcctgggcaatatagtgagacccctatctctatttcaaataatttaaaaaatataataaataaaaaaaagaaagtgctccataaatgttgtctagtaacacccacataccacacagaagcagagagagagtaatagttgtcaaaggtctcatagctggtaagtgactcagggtctaggagctgggagggagggggccttagacattttctgatccatcaccccagttttacagatgggaaacaggttcagggagagaagtgggtagctaaggttgcactgttcctgtcacacacagtgctagaatgcaccatggttagatcaaacatgtgtttgtgttttactaacaatcaggggctcctgcagatgagaaaagttctggtttgatgacctcatccataaaactgcagtctctgatgggcaccacagacagagatggcatgaggagtgtgcctagccagggcaccaccagcacagtgttagggaccaacgagcgagtgtgagcaccccgagacctccaagatagggytgagggacagccagcgggcccccatcctcacctctgcttcctgcccttagtctcttcctctatacgcaccggaggatggccattaccggggacgatgtctctctggaccagatagtgccagtctcgcgggattttacgctggaagaaggtgccacagggggctgggtggtatgaatcctctcctatgggccccccagctcatctttgtccttgatgggggrgcaagggggagtaagctcaattgctaagggcattctcatttccctccccacagtgtccccagatggtgaactctacatccttggtgagtggtcctcttggtctgggtcccactcggggcaggggtgcctgattttcagagaaagaagaatggtgtaaagtaagagcaccccctgctaaacttattgcagcaagtaagaccctgtaggatctggcacagcccatctccgtgggctcatctcccatcactctcctccttgctgctgtttccgtctcccccgataacacacattctcaccccggagcccctgcacacgctgtcctctcctcctgcaagcctcacatctcttcacctagccaactcctactcagccttcagggcttccattcatgcatttctcttcccaggcagcctttgttaaacccctgaaattaggccagggcagtggctcacgcctgtaatcccagcactttgggggggccaagatcacgaggtcaggagttcaagaccagcctgaccaacatggagaaaccccgtctctactaaaaatacaaaattagccaggcatggtggtgcatgcctgtaatcccagctactcgagaggctgaggcaggagaattgcttgaacctgggaggcggaggttgccgtgagccaagatcgcaccattgcactccagcctgggcaacaagagtgaaactccatctcaaaaaacaaacaaaaaacccccaaaaaatcctgaaattgttttgtatcccatggatacatgtgtctgtccctccctccctcccttcctctctctctctctctctctttcttgacagaatctcactctgtcacccaggctggagtacagtggcatgatcttggctcactgcaacctccgcctcccaggttcaagtgattcccctgcctctgcttcccaagtagctgggattacaggcacccgccaccatgcccagctaatttttgtattttctgcagaggcggggttttgccatgttggccaggctggtcttgaactcctgacctcagatgatccacctgccttggcctcccaaagtgctgggattataggcgtgagccaccacacctggcttgcctttttcttatttttgccagcctctctcaatcagtgatgtaattctttatattgacatatttaatgtctgtctgctttgctatacaacaataataataatagaagcaaataatgagttaatgattatcccaygccagcattgtgctagaagttttacatacaccaaatcacgcttttctcttttttgtttgagacagagtctcgctctgttgcccaggctggagtgcagtggcgcgatctcggctcactgcaagctccacctcccgggttcacgccattctcctgcctcagcctcccaagtagctgggactacaggcgcctgccaccacacccggctaattttttgtatttttttttagtagagacggggtttcaccgtgttggccaggatggtctcgatctcctgaccttgtgatccaccccacctcggcctcccaaagtgctgggattacaggcatgagccaccgcaccgggcctaaatcaggcttttctcacagctctatgaggttatcactgtttgcatctccattttatggacaaggtaactgaggcccagagaaattaaacagtttagtaaggggtggaaccaagattcaaacttagagaattcagattctagagcccacactattttattttattttattttatatatatatatatattttttttttttttttttttttgagacggagtctcgctctgtcgcccaggctggagtgcagtggcgcgatctcggctcactgcaagctccgcctcccgggttcacgccattctcctgcctcagcctcccgagtagctgggactacaggtgcccgctaccatgcccggctaattttttgtatttttagtagagacggggtttcaccgtgttagccaggatggtctcgatctcctgacctcgtgatccgcccgcctcggcctcccaaagtgctgggattacaggcgtgagccaccgcgcccggccctttattttattttttgagacaggatcttgctctgtcactcgggctggagtgcagtggcacaaatatggctcacttcagcctcaacctcctgggctcaagcgatcctcccacctcagcctcccaagtagctgggactccacatctggctaattttttatagagattgggtggcggggggtggygtctcattgtgttttccaagctggtctcaaactcctggctttaagtaatcctcctgccctggcctcccaaagtgctgggattacaggcatgggtcactgtgcccagcctagcccacactcttaatcgctctrctaggttgcttctgtttgtctgttagttcagcacatggtttgagtgctcaccatgtgcccggtattgggtatatgctatgaatagggaagccttctacagtctagctccctgagacgggcccacgtgtattctcttcaccatggtattccctgtgcctatcacactacctggcatagtcaggtagactgacccatggacattccctcttgtctgcctctatgtgcttttcatttcatcgggaggggaacagactacacatccagagaacctgttctttcccagttccatctagtactgcagttgaggcttactgacttttcagagccttcttctgcctcctgtataaagaggggatgatgttaatttggaactcagggtacagagggtttccttgttgtcccagcagctgtcccaagtaagttgcttaagggctgaaggggctttgggagtctgggttgctgattctccattctcaggcttaggctgcatcaagcacttagctcctggcagccaagggttcatttcctgcctcctttgtgcaggctcagatgtgaccgtccagctggacacagcagagcttagcctcgtattccaactgccctttggttcacaaaccaggatgttcctccacgaagttgccagggcctgtccaggtaggtaagaccccaggctccctgggggtgggtgggttgctgggtattcacctacccaccccagttgactctccaccctttggactcttaccccatggtttctgtgtcctttcgaagctgctggtgtaaagccatagtgcccccaggctgccagccaaccatggtgtttgcttttgtgtttacagtttctggagttgagtgttaactacagcagggcccctttgctctcctggctctgggcagggttgcacaggataggttgtgactgtgatgcagaatctcttacaagttggcagactaagcagcttcaagcggcccaacttccctctctctgccacccacagctagaactcacagctagaaccatctgtcatattggctctcctgcccttgaaccctgctgtcactcactgcygctgagaaaatggtctagctttgggctagcagtgaaacgttagtggcctttaggacaaaatttgtttagaatgggacattagcccggcaggtaaaggagagtttgtgtacagagcagaggattagtcatagaacatgcaaattcaagccaacaggtgctggggcttaaatgtttacccaccacttttagctgtcttctttcaagctatctcttgtctttgtggcaatgggagagggctggtcttctctgtggtcttgctgtggagcctgagcctccaggggcttcactttattttgcttgctgtgccaggaaggggactgcccttggattcaaactaggggataagggaaaaggaagcagaagaaacagctaggcttagtagcttgctcgtaatcccaactacttgggaggctaaggcaggaggatcaccggagcccaggagttcaaggctacattgagctatgattgcgccactgcaccgcagcatgggcaacagagtgagacccctgtctctaaaaaataaaataacaggccgggcgcggtggctcacgcctgtaatcccagcactttgggaggccaaggcgggyggatcaccaggtcaggagatcgagatcatcctagctaacacggtgaaaccccgtctctactaaaaataaaaaaattagccgggcatggtggcgggcgcctatagtcccagctactcgggaggctgaggctggagaatggcataaacccaggaggcggagcttgcagtaagccgagattgcgccactgcactccagcctagggacagagcaagactccatctcaaaaaaaaaaaacaaaaacaaaaacaaaaggaagtagaaacatgattatagagctttgaatgcctggttaagaggtttatttattttatttatttttttgagacggagttttgctcttgttgcccaggctggagtgcagtggcgcgatctcggctcactgcaatgtccacctccccggttcaagcaattctcctgcctcagcctcctgaataggtgggattacaggcgcccaccaccatgcctagctgattttttttttttttttttttgagacggagtttcgctcttgtcgcccaggctgcagtgtggtggtacgaccttggctcactgcaacctccgcctcctgggttcaagcgattctcctgcttcagcctcccgagtagctgggattactggcgcccaccaccacgcccagctgatttttggatttttggtagagacacggtttcatcatgttggccaggctggtcttgaactcctgacctcaggtgatccgcccacctcagcctcccaaagtgctgggattacaggcatgagccaccacacccagcataattttttgtattttcagtagagacagggtttcaccacgttggtcagggtggtctcgaactcccggcctaaggtgatccacccaccttggtctcccaaagtgctggggttacaggcctaagccactgcgcccagccaagaggtttcaaatttattaagcagggggaaatttatctctaaatcttaaaataaaaggataacatattttatgattattaataatagttgtaggaggtataataatagaaataacaccaaagagcctgggctttgaagctatacagccccttgagtttgaaacccatctctgccagtacctagctgtgcaactttgggcaagctacttcacctctctgaactttagtttttgtaggcttctgtatgtaatgaataccttattcatgggttgtgagaattaaatgagataacacatgtaaaagtgcctaccacatagcaggaactcagaaaatgtttttcccctctacaagaagactcgtagctcacattcattgttgatttggcatgcgttaggcactattccaagaacttttcacacattatctcatttactcctttttaaaaaaattttttaaatttaatgttaattttatttatttatttatttatttatttatttatttatttatttttgagacagagtctcgccctgttgcccaggctagagtgcaatggcgcaatctcggctcattgcaacctccacctcctgggttcaagtgattctcctgcctcagcctcccgagtagctggtacaggcgcatgccaccacacccagctaattttttgtatctttagtagagacaaggtttcaccatgttgatcaggctggtcttgaactcctgacctcgtgatccacccacctcggcctcccaatgtgctgggattacaggcatgagccaccgtgtccagctttttttttttttttttttgagaccaactttcactcttgttgcccatctgggctggagtgcaatggcacagtcttggcttactacaacctccgcctctggggttcaagcgattctcctgcttcagcctcccaagtagctaggattacaggcacctgccactatgcctggctaatttttgtatttttatttttatttttattttattttattttattttattttttgagacaaagtctggctctgtcgcccaggctggagtgcagtggtgcaatctcagcttactgcaacttctgcctcctgggttcaagcgattctcctgcctcagcgtcccgagtagctgggactacaggcgcatgccaccatgcctggctaatttttgtattttttggtagagacaggttttaccatgttggccaggctggtctcgaacttctgacctcaggtgatccgcccactttggcctcccaaagtgctgggattacaggcgtgagcgactgtccctggccaacttttatatttttagtagagatggggttttaccacgttggccaggctagtcttgaactcctgacctcaggtgacctgcccatctcagcttccaaaagtgctgggattacaggcgtgagctaccttgcccagcctctcatttacttttatttatttatttatttattttttgtgagayggagtcttgctttgttgcccaggctggagtgcagtggcgccatcttggctcactgcaacctccgcctcttggattcaagtgactgttctacttcagcctcctgagtagctgggattacaggtgcacgccaccatgcctggctaatttttgtatttttaataaagacggggtttcaccatgttgttcaggctggtctcgaactcctgaccttgtgatctgcccacttcggcctcccaaagtgctgggaatacaggtgtgagccaccgcgcccggcctggcctcatatactctttaccacgatcttacaagggaagtattatcgatgtgtccatttcatagatgaggaaactgaggctcagagaggataagagcgttgcctgagtacctagctggtaaacgatagcgccaggattaggcaggattatatagttctactccaggccaggcacggtggctcatgcctgtaatcccagcagtttggaaggcctagacgggtggatcacttgaggttaggggttygagaccagactggccaacatatagtgacagagcgagactctgtctctcaaaaaaaaaaaaaaaaagttctgctccagagcctgagcccttgcgtgttttgctctagtgcttccttagctcatggcaccctctcccctataaacagcccaggaaggcttcatgtaggaggtgaatttttttttgagactccctggctggagtgcagtggcatgatcttgtatcactacaacctccacctcccgggttcaagcgattctcttgcctcagcctcctgagtagctgggactacaggtgcctgccaacatgcctggctaatttttgtgtttatagtagagacagggttttaccatgttgcccaggatggtctcaaactcctgacctctggtgatccgcccgcctcggcctcccaaagtgcgggaattacaggcgtgaaccaccgcgctcggccagaggtgatatttaagcttaggctagaaggatgaagaagagtttttccccaggcaggcaacaaggaggaaaagggcttggcagtcggagggaagggcaggacctttggtggggactgaacttgggggaagaggagggtgtggagagagctgagccaggaggggtcagcagagagcatctcatgaagggtcttagctacccagcaaagagcttggactttgccctatagcttatggggaaccattaaggaattttatttatttatttattttttgatacggagtctcactctgtcgcccaggctggagtgcagtggcgtgatctcggcttactgcaagctccacctcgcaggttcatgccattctcctgcctcagcctcccgagtagctgggactacaggtgcccaccaccacgcctggctaattttttgtatttttaatagagactgggtttcaccatgttagccagaatggtctggatctcctgacctcgtgatccgcccgccttggccttccaaagtgctgggattacaggcgtgagccaccgcgcccggccgccattaaggaatttttaagctggagagtgataaggcaagatttgcaagttagaaaagttcctctggcaactggtatagaaaaagagaactagagcagggagataggaatgtactggaatggctaaggaatggaaaatgaggctgggacctgggagagccctggtgatgggaatggggaaggagggatggacttgaaaaatagagaggtcaaactgatgagaatgaaggcaccatgggggcagtgagtttgggtcacgttcacaacttcatccgcagagataagaacagtgccagcctgcaaggttnnnnnnnnnnnnnnnnnnnnnnnnnnnnnnnnnnnnnnnnnnnnnnnnnnnnnnnnnnnnnnnnnnnnnnnnnnnnnnnnnnnnnnnnnnnnnnnnnnnnnnnnnnnnnnnnnnnnnnnnnnnnnnnnnnnnnnnnnnnnnnnnnnnnnnnnnnnnnnnnnnnnnnnnnncctgagtggctgggattacaggcatgcaccaccttgcccgggtaatttctgtatttttagtagagatggggtttcactatgttggccaggctggtctcgaactcctgacttcaagcgatctgcccgcctcagcctcccaaagtgctgggattacaggcatgagccactgtgcccagctgatccccactcttttctttcttttttttttttttttgagacagtatctcactctgtcaccaagctggagtgcagtggcgcgatctcggctcactgcaagctccgcctcctgggttcacgccattctcccacctcagcctcccgagtagctgggagtacaggcgcccgccagcacgcccggctaattttttgtatttttttagtagagacggggtttcaccgtgttagccaggatggtctcgatctcctgacctcgtgatccgcccgcctcggcctcccaaagtgttgggattacaggcgtgagccactgcgcccggccaagactccatcttaaaaaaaaaaaagaacaccgcctgtcagatagcaggcacttaataaatatttgttgactgcaggagcagaggttggtagctatgagaatgaaagacaggagtcaaggatgacttctttcttttaggattgggtgtgtgtcttgcagtccccttacctgtcatccttctgggktccacaccacacctggggtaaccagcagagaaactctgtaccaaccaacttctctgagtgcttgtcatgatggggatttcctcagggagggacctgggttagaagggactctcagtattgacagactcttagatatccaccagcccaactctttcattttactagaggcactagaggcaaaaggaactaggttttttccacccagtccttgatggataatgttgtacagcacaaaaggccagagagtggaagtgtcttggctaagaatctactattagagaaacatcagctaacaagagatcacagttagctaacattaattgagcacctactgtgtgccagacatttttctagataccgagacaatgcacaacaactgtatttctccgtttrgtcttctgaacaatactaagaagtagatatcctgttttacagacgagtaaattgacacagaggaggcaagcaacttacccaagatcaatcatcaattgaagtaataggggccggatggggtggctcacacctgtaatcccagcacttttgagaggttgaggtgggcggatcatgaggtcaggagttcgagaccagactgaccaatatggtgaaacctcgcctctactaaaaatacaaaaattagccaggcgtggtgccgtgtgcctgtaatcccagctactcaggagtctgaggcaggagaatcatttgaacccgggaggcggaggttgcagtaagcagagatcacgttactgcattccagcctgggcgacagagcaagagtttgtcccaaaataaataaataaataaataaataaataaataaataaataaataaataaaataaaaattgaagtaatgggaccaggtttgaaacttcagtttctgatgccaaagccctcggagttcagagatttcagtgcagatcccaggtctgtcacttcctaaatgtgaatgtgaacactacattttattttatctattatttatttatttatttatttatttatttatttatttattgagacagagtctagctctgtcacccaggctggggtgtggtggtgcaatcttggctcactgcaacctccacctcccaggttcaggttattctcctgcctcagcctcccgagtagctgggattacaggtgcccgccaccacacccggctaatttttgtattttctttttttcttgagacagagtctcactctttcacccaggttggagtgctgtggtgcgatctcagctcactgaaacctctacctcccaggttagagggattctcctgcctcagcctcccgagtagctgggactacaggcgcatgccaccatggccagctaattttttgtattttttgtggagacagggtttcaccatgttagccaggatggtctggatctcctgacctcgtgatctgcccgcctcagcctcccaaagtgctgggattacaggcatgcgcctggccctactatatattttattttttcagaccttggcttttttatttatacaatggaaatataaacttgccttcttcaataagccaagttttttgaggatcagacgaggccaagtatgggttaatagtatgtaaatgctgaagacaacttaaaagctgtgtctggcagtgccatagtcaggactggaactcaagtcttctcatatatcatgtccttgcacatcctattcagttcggtcgggttcatgcagctctacagacagagcaggtgggatagcaggagggttaagagcaactgttccagagtcagatagtttgagtcagagggtttgagtcagagacagaggtgactcaagaatttctaagagggagagtggcagtctggttaagggagaaacagaggacttgtcttgatatatttcatagtaaacacactgcttacttacggcgtgtgtttctctggagtgggctgccaactgctgctggaggttatgggtggtgaaatcctccaaccctctggcatcggtttgaatcctccactctgctagtcactctgcgacctcagacttaacctctctgaacttggttgccttgtatataaaatggggataataggccgggggtggtggctcacgcctgtaatcccaacactttgggaggccgaggcaggtggatcatgaggtcaggagatcaagaccatcctggctaatacggtgaaaccccgtctctactaaaatacaaaaaattagccaggcatggtgacacgtgcctgtagtcccagctactcgggaggctgaggcaggagaatcgcttgaatccgggaggcagaggttgcagtgagcggagatcgctccactgcactccagcttaggcgacagagcgagactccgtctcaaaaaaaaaaaaaaaaaaaaaaagaaaagaaaagaaaattgggataatagtttcctccctcataaaaggtgtgttacgaggagtaggaagataatatttatacgaggcacagaccttggcacatagttaccgtgaggttcaaggaatggcggtggtctctgccttggaatagtacttttgtgttcacaattattcttgcatttgaacctcagtgcgcacagaayscttctgtgcgcgggagaaacagggccggagtctcttgggataatacaatcatgcagagccggctcttcaagctcgtggctcagtctgcccccatttgttcctgcacaggcttcgattctgcgacccgggatcctgaattcctgtggctgtctcggtataggtgcgcagagctggagctggagatgccaacgccgcgcggttgtaactcggccctagttacctggccagggtacgcgacaattggcggaggcaggtatccgtcccggaagaaacggtggggattggaggaggcccggccacagggggcgggctccgttctgttttggggcggagcgatggagaagacaggctttcgattgatggagcgggcacacgggggcgggttcgtctgggggcggagcgcgcgggacgggcggcgggatgaggagcttgaggaagcaggcagggaaatgtctgccgccgccrgctctcgggagcgcaacactgcaggttcggcgggcggcgggaagctgggctggggagctgggccgggggcggcggtgcgcccggccctcgggtgggcagggtcggcggtttggccagtggacgctcggggcgaagaccaaagtcctggtggccctctggaggctgggacactggggcagaagttctgtgatgttcttcttaggcgtgcgtgacgagggtaggcgggtgggaatggggtacttgggaatccggaggctggggttttagtaaagctccgttccgaactcgctgtgtgacctcgggccactcgctgcccctctctgggcctgttgctccatctgagcttgctcttcaatcctgatcttccgagtttgtcgcgtggggcgggtgggggagtggtgccctgcctacgatagagtcttcctttgggtgaggtatggtatgtgttggggctctgtcagttctcagcccctgtgatgatagcgcagtgtacagggctggagtcttggggagccctgtctactctgggactagaggccaggatgaagttacaggttataaaaggactaggttttttcccacccagcagttggtggataatggggagcacagaaggccagttgctgagcaggagcttgtcgtttggagatgggaggctcagggctgaaatttgggtgagtccgtgctctgggaggacctgcagacctgtctttttttgtccagctccagggttttctgcaagggcccctggtgcttttttcccctgggtgtgtccgtgaggctccatttatgtgtgagctttggcatgacccctagtacctatttgtgacagtcatttgccagcaatgaagagcctgtcaagtagctgtgtaaagtgtgggccagccctccacttgctcttacaaggcttggaaactatgaggggcagggaggagtggcatgttgcacaagagtttgtaaactgagaggaaacgaggtgagcagaggacttcctcggtgcttgtttctccttcattgcagccatcacaaggtgcgatcgaagcgcctgatggtgctgatagtttgcatcttccttgggcttatctcagagttcactatcactagagtttccatgacattctgggctatggtgctgggacgggtgagagtttaagagcacctcayctccttgccccttcacaagagactgccagaatccagacaattggcggaggacaaggccaatggcagcagaaagaggtgggtgctgtgttctcagccagtacaccagagccaggccatgcaggcacttcattcccttagtcttctatgacaagtcaggccagctagctctgaagccagttagctgccccgactgagaaatgtgcagggatctcaatctttcatttcctttcaaaaaacagagactagccatatgctggagaggaattattgttacggtttcggttttatttttattttaaaataatttgaaagctgaacatggtggcgcgtacctgtagtcccagccacttgagaggctgaggtggaaggcttgagcccwggagtttgagggtgatgtgcactatgattgatcctgtgaattagttgctgcactccagcctaggcaacatagtgagactgtctctaaaataaataaataaatagttttaaaaattttgtcagccaggcgtggtgactcatgcctgtaatcccagcactgtgggaagctgaggcgggcggatcacctgaggtcaggagttcgagaccagcctggccaacatggcgaaactccgtcactactaaaaatacaaaaattagatgggcgtggtggcaggtgcctgtaatcccatgtactctggaggctgaggtaggagaattgcttgaacccaggaggcagaggttgcagtgagccgagatcgtgccattgcattccagcctgggagacggagcaagactccatctcgaaaaaaaaaaaawtttttctcttaaaatacctacagtaagtggggtgacactattaattgctaagttgctcctgctaaaattggtaagaaatggtatcaagcccctcagttctatttgggtcatctgtttccagagttattatggcctcagaggagagttacatcttctataacaggtaggaagaaccctttgggctgcctttggatgtcgatacaggccccaagggaaacagagtagtagattgttttttcctatatgcatatgatcaaaatacccactttttgatagcctagagaacccaaagcaaacagttgcttaaaaatgctgtttctggctgggcacgatgactcatgcctttaatcccaacactttggaaggctgaggcgggcggatcatgaggtcaggagttcgagaccagcctggccaacatggcgaaaccctgtctctactaaaaatacaaaaattagatgggtgtagtggcacatggctataatcccaggtacttgggaagctgaggtaggagaatcgcttgaacccaggaggcagaggttgcagtgcgctgagatcgtgccactgcactccagcctgggagacagagcgagactccatctcaaaaaaaaaaaaatttttttttatcttatcgtaatacctacagtaagtgactgggtgacactgttaattgctaagttgctgctgctaaaattggtaagaaatggtatcaagctctccagttctgtttgggtcatctctgtttccagagttgttctggcctcagaggagagttacatcttctataacaggtgggaagaaccctttgggctgcctctggatgtcgatacaggccccaagggaaacggagtagtagatttgttttttcctatatgcatatgatcaaaatacccactacttgatagcctagagaaaccaaggcaaatggttgcttaaaaatgctgtttttggctgggcgcggtggctcatgcctaatcctagcactttgggaggccgaggtgggcggatcacaagatcaggagttcaagaccaggctgggcaacatgacgaaatcctgtctctactaaaaatataaaaattaggccaggcacagtggcttatgcctgtaatcccagcactttgggaggctgaggcaggcggatcacaaggtcaggagatcaagaccatcctggctaacacggtgaaaccccatctctactaaaaatacaaaaaaaattaactgggcatggtagtgtgcgcttatagtcccagctactcgggagtctgaggcaggagaaccgcttgaacctgggaggcagaggttgcagttagccgagatcgcgccactgcactccagcctgggcgagactccatctcaaaacaaaacaaaacaaaacaaaaaaaccccaaaaaaacagaacttagctgagcatggtggcaggcacctgtaatccctgctacttgggaggctgaggcaggagaatcagttgaacccgggaggtggcgattgcagtgagctgagatcgcggcattgcactccagtctgggtgacaagagcaagactctgtcccctcagaaaaaaaaaagctgtttttgattcacggcaggagaaacaaaggcacccctcaggagctggcagtctgactgagaggggtctgataatacgtagatagaggtaagagagtatagggttggcccagcaggacagtgttccttgtagcgtgagccaagggcatagagcacctttgaggcccaggcattttgggggataggtgaatctggtcttcattctttgcctttgcattaatagagataggaatgatctttgatgattctttcaaaatgtcctttcttttctttgatttgtctctgctgaattcaggagtgttaggctgagcttggtagagattatagtagaaaaatgaggccgggcgcagtggctcacgcctgtaatccctgcactttgggaggccaaggagggcggatcacgaggtcaggagattgagaccatcctggctaacatggtgaaaccccgtctctactaaaaatacaaaaaaattagccgggcatggtggtgggcgcctgtagtcccagctactcgggaggctgaggcaggagaatggcgtgaacttgggaggcagagcttgcagtgagctgagattgcgccactggactccagccttggtgacagagcgagactctgtctcaaaaaaaaaaaaaaagaaagaaaaagaaaaatgaaatggagctagtttcagactggaatccacgtcttcaggttcagaccagtgtctaggaggtaacttgtggtgttgaagtcaggtaatgcttttggttgagtggcagcttgttcacgtgattctcttgccaagcccagcttgcactgactttagattggtagttgaatcggtagattggtaggagtctttctgctcctgcacttatttaactgctcctttttttttttgagacggagtcttgctgtgtcaccaggctaggagtgcagtggcacgatcttggctcactgcaacttccacctcccgggttcaagtaattctcctgccttagcctctctagtagctgggactacatacatgcacctgcacgccaccacacccagctaatttttgtatttttagtagggatggtgtttcaccttgttggccaggatggtctccatctcctgaccttgtgatctgcccgcctgggcctcccaaagtgctgagattacaggcgtgagccaccgcgcctggcctcactgttcttaacatcttttttcttttctttttttttcttcctaaccactagatgaccagggatgctgttaacttccttttgcagctttttctttccttaaaaagagtgaagtctgatttgggagaaatacctcattatttccatctagcaactgaagttgctcttattcagaaaaccccattgaggatcctgtacagggcccagtacttatccaagtcagtctgtaaaatgttcacctgcattgcatcctgggtacatgcaaaacctggagctgtgttctggagggttttgaactatgcactaaaaaggaaatggctactcagaagtcccacaggggccattctgggctattttaacaaagcagtaatagcaaatacattttgtttttttttaatccaaagttgattagaaatgagccagcttcgccgggtgtggtggctcaagcctgtaatcccagcactttcagaggccgaggtgggcggatcacaaggtcaggagttcaagaccatcctggccaacgtggtgaaaccccatctctactaaaatataaaaaattagctgggcgtggtggcgtgcgcctgtatcccagctacttgagaggctgaagcaatcacttgaacctgggaggcggaggttgcagtgggctgagatcacgccactgcatgccagcctgacgacagtgagactccgtctcaaaaaaaaaaaagaaatgaaccagctttgtagtaactcaaatttacaaggggatgtgtttaagtattttttcttctggacccaggaaacaaagtattaaagtctgtcatgccagtgaaaggaaatgaatgctatttatatctcagggtaacataaagggtaacctagtttaccagagtagaagccagagagcatgttagcaaaatagcccccggggtggttttctctctcactctctctttcatcttgttttgtcagtactaataggtaaaacttgtgtgaccaacatatccttttagcatggagaaaataaatttgcttttgtttatcttagagaacaaatattgcccatcatttccaccgttgtgggaagctctgcaggctcctaagtaacttattttaagtcactttgtttccttaaacaaaagagaactgtattcgtttttcttcttccttttgttgttcccctctccattttccttctttgggccatttaatccagttttatgtttctagtacaagagaaccccctaaagattctttttttcttctgaaaacagtttgttttggaattctgcagttattgttgagagcaagtgaggtgacccacaaacactcagttagaagtggagctttgaacagaaaaatcctcagggagggacagttcaggaagagggaggcatcaatatatttattagaggaaagatactgtactgttggaggatagatgctagctgacttgcatgtttttctttgctacttaaaatatactgttagcccggcacagtggtgcgcacctgtagtcccagctactcggaggctgaggcaggagtcttgcttgaggagttccagaccagcctgggcaacatagtgatatctctaaatttaaatagataaatatataaaataaattaygctctaacagttttgttattggtgatccatacatgaactgaagctagcaaatatgaatgagaagagactttctttcttggaatgccaatgatgagaatttaaacaaagtggatgtcaagaggcctggacatttttctttttcttttcttcatggttccttggtgcactattactttctctttttgtttttatttatttttatttttattttattttatttttttgagacggagtctcactctgtcacccaggctggagtgcagtggtgtgatctctgctcactgcagcctccacctcctgggtttaagcagttctcctgcctcagcctcccaagtagctgagattacaggcakgtgctaacatgtctggctactctttgtattttcagtaaagacggggtttcaacatgttggccaggctgatcttgaactcctgatttcaggtgatctgcccaccttggcctcccaaagtgctgggattataggcgtgagccatcatgcctggactaatttttatatttttagtagagacagggtttcaccatgttggccaggctggtcttgaactcctgacctcaagtgattcagcctgccttggcctcccaaagggctggcattacaggtgtgagccaccatgcgcagcctctttttgtttttagagacgagatctccctgtgttgcccaggccggtctcaaactcctgacctcaagtgatcttcccgcctctgcctcccaaagtgctgggattacaggcatgagccaccgcgcttgacctctttgtacgatattaaacgtgtgtctcaactttcctcttatgtctttaaaatgggagtgaatgtttgcctcctggaaagtcacacaggacttaagcaatgctaattatttagacgtgctttcatttgggaaatacaattagaaatgggaaatgctggccagcagcggtggctcatgcctgtaatcccagcactttgggaggctgaggtgggcgggtcacttgaggccaggagtttgagatcagcctggtcaacatggcgaaaccctgtttctactaaaaatacaaaaattagcccggcagggtggcacatgcctgtagtcccagctagtcaagaggctgaggtacgagaatcgcttgaaccccagaggtggaggttgcagtgagccgagatcacgccactgcactccagcctgggcaagagcgagactctgtctcaaaaaaaaaaaagaaaaagaaatggtaaatgctcacctctgagaactgagaacctggctgctgtcttcagggtctatcctagggggatttcttcctgataagaactgcattggctgggcacagtggctcaggcctgtaatctcagcactttgggaggctgaggcaggtggatcacctgaggtcaggagtttgagaccagcctggccaacatggtgaaaacctgtctttactaaaaatacaaaaattagccaggtgtggtggcttgcgtctgtaatctgcgtgccacttgggaagctgagacagaagaatcacttgaaccctggaggcagaggttgcagtgagcagagatcacgccactgcactccagcctgggcgacacagcgagactccatctcaaaaaaaaaaaagaactgcacttactcctttcctccctccattttcatatttctgaatgcagtcactaacaacctcagggtatccttgactcttccctctgctctcatgtctaataagcaaattctgttcatttttttttttctgcagtgcctctcctatctacccacatttcaaaatcccccttattcatgttggtatcctcttagctgaactgttgcagtagtcttcttgtaagtcttcccaacctcaagtttccctctcccttagggatctccttagaacataactttgatcgtattctactattttgtatgtgaacttcaatattgtaccactccctgttgcctatagaataaagctcaaattccttagtatagtggtcaagtcctgcactgcctgacctcagcctgcttctctgtctggtcttatctgctacaacttatcttcatttccttttacttcaaacttgactgcttattatttctggataaagccctgtactttttcacctatttgttgacttctcattcagctacatttttgtaagcttgaacttgctgcttttagcattttgcattctctctccttcccaaatgacagccgaatgccttgtacatcagtaggtgctcaaaaaatgtctgtctmtggttgaattgtagagacccatacaatttctagcccaaggtgctttgtggcctcaacaactcctgcccccttcctctttgagcatgctctgcatctctgtgttgccctccctgcttcctggtttgctcttgcccacttctcttttagctttatcaccagaccacagacagttcacagaaggcccactgaagggaagcctgagaaggaaaaattcaagtcatctctccaggggcctatcaccactaaccaacctgttgccgtaaagtaattgcactgtagtcttcctccttgaaagctaaactggtcatatttagtccttgccagcctaaattggatttgcacagggtgcaaattggatttccagtctagaacttacaggtttgcttggcatgagatgtgtttttagagatgtctgtgttcattttattttattttattttatttatttttttgagacggagtctcgctgtgtcacccaggctggactgcagtggtgcgatcttggctcactgcaagctccgcctcctgggttcatgccattcttctgcctcagcctcccaagtagctgggactacaggcgcctgccaccatgcccggctagttttttgtattttttagtagagatggggtttcaccgtgttagccagaatggtctcaatctcctgacctcggcctcccaaagtgctgggattacaggtgtgagccaccgcgcctggcttatttcattttttgaaacggagcccagcttatttcattttttgagacggagttcactctgtcacccaggctggagtgcagtgacatgatctcgactcaccttaacatccacctcccaggttcaagcagttctcctgtctcagcctcccaagtagctgggactacagacatgtgccaccatgtctggctaacttttatttatttttattatttttattttcatttttttgagacagattctagctctgtcacytaggctaaagtgcagtggcatgatctcaactcactgcaaccttcacctcccatgttcaagtggttctcctgcctcagcctcctacgtagccaggactacaggtgtctgccaccacacccagctcatttttatttatttttagttttttgagacagtcttgctctgttgcccaggctggagtgcagtggcatgatctcggctcattgcagcttccacctcctgggttcaagcagttctcctgcctcagcctcctgagtagctgggattacaggcgctcgccagcatgcccgttacaggtgcccgccaccacgcctggctaagttttgtattagtagagacggagttttgctatgttggcctggctagtctcgaactcctgacctcaggtgatccacctgccttggcttcccaaagtgctaggattacaggcgtgagccaccacgcctggtctttattttattcattattatttttaaaaaatttttgtatttttagtagagacagggtttcaccacgttggccagactggtctcgaactcctgacctcaggtgatcctcccacctcagcctcccaaagtgtggagataataggcgtgaggcactgcgcctggccctgtgttcattttaaatgatagaatctatggcacttctttttaaagccgtgagatatttgagaaatgtaaaagaaatgaaaaaagaaaactaaacatggttatttaactttgaagaaagtaacaaaacaatttgggatggtggcaaagctgaactggaaaaaatggattttttccattcttttcaatgccaggtgccctgtgttatgaatgtcactcaagagttacctgccctgtgtactatgtgctaggtaaacagctcctttttgtcataagagtaaaatccaaactctacatggcgtttgaagtcttacagtttagcctaaatttactactgttgttatcattattagtagcacttaccatttattaagcacttactttgagtccatgggccttacactgtgtcacaaaaattccataagaggatctctattatttttatttattgatttatttttgagatggagtcttactctgtcacccagtctggagtgcagtgacgcgatctyggctcactgcaaactccacctcccgtgttcacgccattctcctgcctcagcctcctgagtagctgggactacaggcgcccgccaccacgcccgcctgattttttgaatttttagtagagacagggtttcactgtgttagccaggatggtctcgatctcctgaccttgtgatatgcctgcctcggcctcccaaggctctgggattacaggtgtgagccaccgcgcctggccgaggatctctgtttttcagctgggagattgaggcttagagagggtagggtaacatgcttgtgatcactcatctggtcattggcggagtcgaaaatagaactcaggtcgcacttgagacctgactcttacactcttgttcttcttcttcttttttttttttgagacagagtctcactctgtcgcccaggctggagtgcagtggtttgatctcggctcactgcaacctccgcctcctgggtccaagtgattctcctgtctcagcctcccaaatagctgggattacaggtgcccaccaccacacctgggtaatacttgtgtttttagtagagacagggtttctccatgttggccaggttggtctcgaactcctgacctcaagtgatctgcctgccttggcctcccaaagtgctggggttataggcatgagccaccgctcccggccacattcttcttttgtatccctagtgcttctcaaataaaacttttccctacttatttatcctacttattattacttgtttccaagcataccataatgccctatctttgtgcttttgctgaagttaaattttctctgccagaaatgctttctgagcctctcgttttctcatcagtgatatagtttattggttgagagcacagactsttggctcagattccctgggtttgaaccctggctgtgtgccatttactactgtgtgctcttgggcaagttatttaacctctctgtgtatatctcctggtctgtaacgtggacataataacagcacctacctcatagagtagttgtgaggataaaatatatgtaaagtgatttaaacagtgctcaatacgtagtaagccttaagtattagtttttgtttgtttgtttgtttgtttttttaagatgtagtcttgctgtgttgcccaggctggagtgcagtggcatgatcttggctcactgcaacctctgcctcctgggtcaagtgattcttgtgcctcagcctcccgagtagctgggattataggcgcctgccaccacgcctggctaatttttttttgtatttttagtagagatggggtttcgccattttggccaggctggtcttgaactcctgacctcaggtgatctgcccacctcggcttcccggcttcccaaagtgctgggattacaggcatgaaccactgctggccaagtatttgctcttaatattattagtatttataatactatcattgtcatcatcaacagagcctgacttgtattctaggtagttggatctagagtggtttatttccccatgaattctttgctagtatgtaaggccctgtctcagacttagagagcccttggaatgtccccctggtggtgtgtgcagggcatgatcttgctggcaaacattgaacctactcacttaatccggtcagtttgaactgtcaggtattctgaagcacatggtttgcaggtattttgcttgcatggttttgcaggttcttccagtgtgctggaaatgggatgcaaaggctggtgactgagaagataggaggggacacctcctcctagacctaataggtgctcaggaagggtagaacgtgatctccacccagcagtgacagccacactcccacatatcctgtacagactgtgctgatacttttgcttggttatccaaacagatttaaaccttctattcacatcgtacttacccttgggagtttatagtttcattgatgatgatgtcctcatgcatgcaaaatgggaggctgtgggactttggagtcaagcagatctgggttttaatgtcagctgcaccatttactggctctatgtccttgagcatgtctgctatctgctctaggcctcaatttccttatttgtaaaacaaggctaataatcagacacaatgcatgaagcattgaacgtattacctaactatgagaggtacttgataaatggtagtcatcattattaaagcagtgggggattaggagtgatggagaagagggagaggaacagttcctgaatgtctgctgtgtaccaggcattgtgctaggttcgtgacccatgtagattgtatttgtttatccttttgaggtctccgtaaatatggtagcattacttccattttacaaatgaggaagcaaattaagtaatttgtttgaggtttcataagaggtgatggatggagtcagtaacatcaccagctctattttattccaaagcccaaggcattttccaaaacagtctaatgtttcttaaagtgccagacacattatatagacaggaagacactcaaaattcagagaaatgactactgagaacttatgtggctggggagggcttcatgaaggaggaggtgggagttgaggctgggcttcgaaggagaggtggccaaaaagtaggagtracttcatatgaaggcaggagtgcggatggcatgtgtgaagaatctatccttttagatcaggctgtctttgggtgatggattgatgaaggagagtagagccatttgcaaagggcgtcagatgccaattgaaccagtttgggtcttaacctgtacaggaagatttagagcagagagatgaaatcagagtttaatcaggccaagtgcagaggctaaatgggtagggagaagtgggaagatctcttagttgggagactcctgaggtagcaagtgaggagatggtagcctggaggaaggcagctgtgagactgaagaaatggatgactaactctctctggggggccaaggagagaggtgagccgatggcaagactgtacacctggctgataggaagaatgatggtgctggtaataggcgggagagctcagggaaagagtccagaatcagactacagttttacctgggtcccccctgcatacagaacgtcttgtagaaatgcccaggggatggtggaggtgctgagctcagacagggctggacagcctcattcataatcaaccaggatggctggtgggttccttgtagaagaggaagaacaaggtctagatttgcactgtccaatgtgctagtcactagccatgtatggctattttatttatttatttatttttaagagatggggtcttgctatgttgattgactaggctagtctcgaactcctggtcccaagccatcctcccatcgtgaactcccaaagtgctgggattacaggctaaacttaatttaggtaaaatcaaattaaaaacttcagttttttggctgggcacagtggctcatgcctgtaatcccagcactttgggaggcctaggcaggctgattgcttgaggtcaggagtttgatagcagcctggccaacatggtgaaaccatgtctctactgaaaatacaaaaattatccgggtgtggtggcgcatgcctgtaatcccagctactcgggaggctgaggcaagagaatcgcttgaaccggggaggcagaggttgtggtgagccgagatcgtgccattgcactctagcctgggcaacaagagcaaaactctgcctcaaaaaaaagaaaaaaaaaaaaatgaaagaaaaagaaaaagcccagactgcagtggctcatgcctgtaatctcagcattttgggaggtcgaggtgggcggatcacttgaggtcaggagttcgagaccagactgggcaagatggcaaaaccccatctctactaaaagttcaaaaataagctgggtgtagtggtgggtgcctgtaatcctagctacttgggaggctaaggcacaagaatcgcttgaacctgggaggcagagatnnnnnnnnnnnnnnnnnnnnatatatatatatatatatatatataattatttttttttttcccccgagacggagtcttgctttgtcacccaggcaggagtgcagtggcacaatctcggctcactgcaacctctgcctcccgggttcaagcaattctcctgcctcagcctcccgagtagctgggattatcggcgcccaccaccatgcccagctaatttttatatttttagtagagacggggtttcaccatgttggtcaggctggtctcgaactcctgactgcctgatctgcttgcctcggcctcccaaagtgctaggattacaggcatgagccactgggcccggtctcaagccatattttaagtgttcaatatatattggacaacacagttatagaatattttcatcatcaaaaaagttctattggacagtactggtctagggcttgaggagtacctacaaataactaaggggcctcgaggaggaaatagagcaaaaggaggcagaaggagcaattgaatgaagaaataatgttgctgcctctcagatgattctcaaaacaaatggggtatttccattttggtttgaatttatttattttttctttgtatgatggcatgttttagaaaaagcccagactggctggacgcagtggttcacgcctgtaatcccagcactttgggaggctgaggcaggcggatcacctgaggtcgggagttcgagaccagcctgaccaacatggagaaaccccatctctactaaaaatacaaaattagccgggcgtagtggcgcatgcctgtaatcccagctactcgggaggctgaggcaagagaatcgcttgaaccggggaggcagaggttgtggtgagccgagatcgtgccattgcactctagcctgggcaacaagagcaaaactctgcctcaaaaaaaagaaaaaaaaaaaaagaaagaaaaagaaaaagcccagactgcagtggctcatgcctgtaatctcagcattttgggaggtcgaggtgggcggatcacttgaggtcaggagttcgagaccagactgggcaagatggcaaaaccccatctctactaaaagttcaaaaataagctgggtgtagtggtgggtgcctgtaatcctagctacttgggaggctaaggcacaagaatcgcttgaacctgggaggcagagattgtagtgagccaagattgcaccactgaactccagcctgggtgacagagcgagactccatctcaaaaaaaaaaaggaaaaagaaaaacccagacaccaattcagtggtaggcctggctaccggatgttaaaatcaaggccttgctgcctatctttgttttataggtctgggccttcaacagatcttatttggcttctagaacacctcttggtcatgcagtgagggataccctcaagttaactatgggaaaagaagacagcaattgtatgaggcagacactgttatcttattcacatgaggaagcagatgcttagagaagttagataactttctcaatataacgtgtctttgactccaaagcctgtgtatgtatataaaacacaaaaaacatgttattatagctaactataggaaatacatataagcaaaaagaaaaagaaatctaatcactgagaaatgactactgttaacattttgctgtgcacccttccagactttccatgtgtctgtgtctgagtccatacaaatacagcatatgtgaatatttataagtgtggtatctatgcacacagacatatactccagtcctttctaatgcatataggtattgtcaggccatgctcattaactaccatcctcaatcccttatcagcagttctgaagtcctgaaagctctgaaggctggaacaaatttttcttgtaagtttgacccaagctcaatttggcagtaagacttgcttgaactgacatgagactatttataggctttgtttctctcactaagtattactcttcgtaagttatactgtggaaatatgaaagcgtttgattaactgggtattgcctcagaccctgctggggttgttatgtagtatttgatacaggtaatgtgttatcttcctaaaatctcccacattctgaattccaaaatgcacttggcccaagaggcttcagataagggcttgtgggtctatattaggctatgttgctgcttgggctgaggaaggcacctcaagggtcaacactgtctatttagtgaggcatgtgagagttttggttctacacaatatgcagtacaaagcacagaatttgcaagaaaaatagaacacttgcacttttacacatcgcaatcaagctgcagttgttactgtagcttgttgacttactaggtaggctgctcctagggaaatggtttcaattgtcggcatgaaaggtggtcaatgagagtacacagaaaaatcacactgagcttaatctgcctggggactgtttgtttagggtgtgtttactgactgcctggtgtgtgccatatattgtggtgagctggggccagagatagcacattggtccctgcttccaagaagctagtggtctaggtgtagaggtaagacagataagaacaattaaacccaggtatgatcccattatcataatggaaccattatcatgccttgatggaagtaagcactgagttatgtgagaatgtatggagggggccagagaaagttttttgaagataactcctgaactgagtcttgaaggatgagtttgtagttcatcatgtgaaggtggaattgggatatggaaagatatacccaggatcaggggtggagtgaataggcagtgtgtgaaaaggtaagtttggtgtgactggattgggaggtaagagagagaagcttccagtggggatgggaaatggggctggagaggaagtctgaagctatttataaagatcttttcatgcaatcctcagaggtttgggttttgttccaaaaattgttaccggaaaggggtcccgagccagactccaagagagggttcttggatcttgagcaagaaagaattcaaagcgaatctatagagtaaagtaaaggcaaatttattaagaaagtaaagtaataaagaatggctactccatagacagagcagccctgagggctactggttgccgttttaattttttaaaatttcttgattatatgctaaacaaggggtggattatgtcacgtgcttccatgtgaagagtccaccaacaggctttgtgtgagtaacaaggctgtttatttcacctgggtgcaggtgggctgagtctgaaaaaggagtcagcaaagggtggcaggattatcattagttcttataggtttgggataggtgtacaaagtacattctcaagggcggggagaatattacgaagcaccttcttaagtgggggggtagaatatatcctatcagttagggtggggcaggaacaaatcacaatggtagaatgtcatcagttaaggctattttcagttcttttgtggatcttcagttgcttcaggccatctggatgtatacatgcaggtcacaggatatgatgatttagcttgggcttagagacctgacattcctgtcttcttatattaataagaaaaacaaaacaaaatggtggtgaagtgttggggtggcgaaaattttttaggggcgacgtggagagataatgagcaatgtttctctgggctgcttcgagcaggattaggggtggcatgggaacctacagtgggagagattaaactgaagaaagattttggggtagggggtgatattgtggggttgttagaaggagcatttgtcatatagaatgattggtgatggcctggatgcggttttgtaagaattgggaaactaaacggaagacacaaggtcctaataagagaaggagaaaaacaggtattaaaggactaagaattgggaggacccaggatatccaattagagagtgtccaagggggttcagcgtaattatttgattggttggcgagttttggggctctatccttgagtttttttatgttgtcatataccaggccagattgatttaggtaaaaacaacactcttcatttaaaaaatgttttttgttgtttttgtttttgttttttgagacagactcttgctttgttgcccaggctggagtgcagtggcgtgatctcggctcactgcaagctccgccttccgggttcacaccattctcctgcctcagcctcccaagaagctgggactacaggcacccgccaccacgcccagctaagtttttgtattcttagtagagacagaatttcactgtgttagccaggatggtctcgatctcctgacctcgtgatctgcccacctcagtgttccaaagtgctgggattgcaggcatgagccactgcgcctggcccagagtccccctttttttttttttttagcagtgagtaagtcgaggcctctgtgattttagaggaaagagaaatgcaaagccagcaattgtttgttaaagaaggtttagaaacagctaggagagagtgagtgagattgatagtgtggtggagatagctggggagaggtagaggatggcataagaatgggaatgagaataagagtgagtataaaagtaaagaataggacttcatcagggtaaaagtatcggagggtgccctgtcagcaaagttcatctatccactctaagagggagtcaagagtggcggattggggatagtaccaggagatatccgctacaatggtttggaggaaaagcgtaaaccagcagtgtaaacaagggcagggcatttacaagtagttgagaatggtgaataggagtatgactagacagaagatagggatgacaagtttttggggcacagaacaagtagtgggggtgactgcgtaaagccctattgcaaaaagtagggtaaggatgaatagacctaatagaatgaagggttgtattaggctcataagggttattactgctcttcagaaatgcaaataagtttaaggaaagtaggggtgaacacttgtgacttccaggaggaagaggagagatcaggctggctgtttgacgggcacagctttattctggaatgatgaacctaatggtggggcatcctgcagacgaacagccattggggtactatagatgactaagtggggtccagtccatggaggttgtagagtttgaggggtcagattcttaacaagaactgatcatccagctagggtgtcttcatatggctgggaatctggagtaggcaagagaagatgagcagcctagcgaatttcctgtctagcctgctggaggactggaagatagttgcctagagggctggtgtctgggacgaggtcagggctgagcaagaaagtgcgtccatataaaagttcaaatggacagtaccctgtagcatctcgaggacaggctctaattctgagaagggcaaagtactgtccagtcctggccgtgagggacagaagttggaaagctagctgcttctttaactaccttatcagcataagcgttgccctgagcagtgggatctgatgccttttgatggcccttgcagtgaatgactccagcttcctttggaagtaaaacagccttgagaagagtatttattaaagaggcattaatgatggaggacccttgagtagtgaggaaacctctttctgcccatataacagcatggtggtgcaggatatggaaggcatatttagagtcagtataaatattgactcgtagtccttttgcaagaatgagggcccaagttaaggcaatgagtttagcttgctgagaggtagtggagggggtcagagtggtagcctcaatgatagatgtgaaagatactatagcatagcctccctttgctggtgagtggcgattaggcctggtggaactgccatcaataaaccaagtgttatcagggtgaggaacaggaaagaaggaaatatggggaaatggagtgaatgtcagrtggatcagagagatacagtcatggggatcaggtgtggtatccggaataatgtgggaggccggattgaagtctgggccaggaacaatagtaactgtgggagactcaacaaagagtgagtatagctgaaagagctggggggcagaaagtatatgcgtcaagtgtgaggaggaaaatagattttgaaagttatgggaactgtagagagtaagtggagcatagcttgtgattttgagggcctctaaaagtattaaagcagcggcagccaccacacgcagacgtaagggctaggctaaaagagtaaggtcaagttgtttggacagaaaggctccagggcgyggtcccggctcttgtgtaagaattccgaccacacagccctgcacttcagctgtgtgtaatgaaaaaggttgggatgagttagggagaggtagtgtgggagcatcttttagggctgttttttaaggaatggaaaggggagtggggaaaggatttaggatttatggggtcagctaggtttatctagaacagaataatgggttgtggagggaggtattgaggatgggagaatatatggctttggcaccacagggtggataggcaagacaatttggtcgatagggtgcagatcctgaactaacctgtaagactcgtgtagtttttggacaggtaaaatggggaattgtaaggagagtttataggctttaaaaggccatgctgtagcaggtgagtgataacaggctttaatccttttaaagcgtgctgtgggatgggatattggcattgagcagggtaagggtgattaggttttaatgggatggtaaggggtgcatcatccgttgccaaggagggagtagaggtgtcctatacttgtggattaaggtggggagatacaaggagaggatgtgaaggaggctttgaactgggggaaaaggaggcaatgaggtgtggctgtagcccaggaatagtcagggaagcagaaaatttagttaaaatgtctcaacctaataagggagctgggcaggtgaggataactaaaaaggagtgcataaaagaatgttttccaagttggcaccagagttggggagttttaggaggtttagacgcctggctgtcaatacccacaacagttatggaggcaagggaaacacgcccttggaaagaaggtaatgtggagtgtgtagcttccgtattgatwaagaagaggatggacttaccctccactgtaagagttatccagagcatctgtgatggtcctgtaggcttccgaggcgatcgggcagtgtcagtcttcagccgctaagctgagacgatctgggaaggagtcagtcagagagccttgggccagagttccaggggctctgggagtggctgctgggtgagttggacagtctgatttccagtggggtcctgcacagatgggacacggcttaggaggaatcccaggctgcaggcattccttggcccagtggccagatttccagcactagaagcaagatcctggggaggcggtcctggaggaatgcctgacccctgaggtttaggcgttttgaagttcttgtgtgctggagatgtagctggggtttctctcacagcggaggcaagtaattacaactcttctgtattactgtaccccttgaaggtgaggtcaattaagtactgttggggggttgaaggccagaatctaatttttggagatttttctaatgtcaggagtgggttgggtaataaaatgtgtattgagaataagacagccttctggcccctctgggtctagggcggtaaagcatctaagggttgttgccaaacgggccatggactgggctgggttttcatatttgatgaaaaagagcctaaacgctaactgatttgggagaggttggataaagaaaaaggaggattaaccttggctatgccttcagctccagccacctctctgagaggaaattgttgggcaggtgggggagggctggtcacggaatgaaactgtaagccagaccgggtgtgaggaggggaggtaatagaagggttatagggtgggggagcagaggttgaagaagagttgggagctggctyggcctggcaaggagcagcctggggaggagggtagaggtcagatgggtctgtagaaaaggaggattcccaggattcagagctkggggtggagactgaaggaacagacaggagagaaagaagaaagctttgggatgaatctcattgggaacagagattaggaagggaccgatgtgtaaaagaatgcctggacgtcaggcacctcagaccatttgcccattttatgacaagaattatctagatcttgtaggatggagaaatcgaaagtgtcattttctggctatttggaatcattgtcaagtttgtattggggccaagyggtgttgtagaagaaaataagacgcttaggttttaggtcaggtgtgagttgaagaggttttaagtttttgagaacacaggctaaaggagaagaagggagaatggcgagtggaaggttgcccatagtgaaggaggtaagtttaaagagaaaggtagagacatggagaagtgggtgggtgagcagccctgggctgcaatgtgggtgagcagccaaagcaggcatccctgcaattgacttgccaccaagggaatgtgggtgaatgactaaggcaggtgtccccgcagtgatcagacaccagtggagggtgggtgaataatcaggcaggcatctccgcagtgattaaacaccaagggaagactatcttcccgagtccgtgactggcgccagagttttgggtccacggataaaatgtgtctccttgtctctttttttttttttttcctttttctggagaacggggtctcgctatattgcccaggcaggtctcgaactcctgggctcaagctatcctcccgcctcttagcctccctgagagctgggattgcaggcgtgagccaccgcacctggccgtctccttgtctctactagagaggaaaaagaattggaattggaaggacagggagattgaagggtagcaagagaggaagattgaagggtagcaagagaggcatgagaagagtgaaaagactgcttacccaatttgaarttggtgagatgttccttgggctggttggtctgaggacctgaggtcacrgagtgagggcgaagacaggggactggtctcctgaaggagtcctcctgtcctgggttttggcaccaaatgtcacacgcatccttgtgaagagaccaccaacaggctttgtgtgagcaacagggctgtttatttcacctgggtgcaggtgggctgagtccgagaaaggagtcagcaaaggttggtgggattatcattagtttttatacgtttgggataggtgtacaaagtacattcttaagggcgggggagaatattacaaagtaccttcttaagggcgggggagaacatagcctatcacttagggtggggcaggaacaaatcacaatggtggaatgtcatcagttaaggctgttttcagttcttttgtggatcttcagttgcttcaggccatctggatgtatacatgcaggtcacaggggatatgatggcttagcttgggctcagaggcctgacagattattcatgcctcccctttttagaccatatagggtaacttcctgacattaccgtggcatttgtaaattgtcaaggcactggagggaatgtagcaatgaggacgaggtgggtcactctcatggccatcttggtttggtgggtgttagcaggcttctttacttgagcatgttttatcagcaaggtctttatgacctgtgccttgtgctgaccctcacatctcatccagtgacttagaatgcctaactgtctgggaatgcagcccagcaggtcttagccttattttacctggcccctattcaagatggagttactgtggttcaaatgcctctgatatttctccctcccttttataaaagagcccttaatcataagggttgcaaagggatgaaaatccatcttctgtaacttcttcatgctgaataggtcgattatattcctgcctaactatgagggtctcttgtattcagggtagagaggagctcagtcagaaagcagcagtatggcaaggccattcatgtctcttgagttccaacaaaaggtaatatctggaagattaataagtgttcaatttaagaaaacattcagtaagcttattgtgcgtttctacacaaagagtacaacagcaatgtattccacaacggtaaagcaaaataagtgaaattattccaaataaactaaattagaagkcttttcatgaactgggcaactgttggaaccaagctgatatgggattgctagctgattccaatatatgcccagaattagaatattgatccaggtttttacattacctatatctcttgtttcttctgagctgcaccagagatcactagttggttaatagaaataagtagggtcagtctaaattgcaggaaaaaacgtaaacacaactgatgagactagaacctaataaccataggttttttttttctttctttcttttttttttttttgagacagagtcttactctgttgcccaagctggagggcagtggtgcaatctcggctcattgcaacctccacctgctgggttcaggcaatcctcctgtctcaacctcccgagtatctgggattataggcacacaccaccatgcctggctaatttttgtatttttttttaatagagatgaggtttcaccatgttggtcaggctggttttgaactgctgacctcaagtgatccacccacctcagcctcccaaagtgctgggattccaggtgtgagccaccatgcccagcctaaccatagtttttgaaacatatatttttttcctctctccagtctttcatttttactaaagacaaatcatggtaagaccgatttgctttattatacttggactgattatttgtataaagtgcagcaagaataaatatttttttacataggcttttaaaattggctttgatggaagtctgcttcttaagaaatcttagataatacttttttaaagctgagcccagccatgggtttgtatcctgaagtacctgtaagttgggtaaatttctctcctcttgaggttccaagataacttggggctcctgggcctgtcagaaagtgacattctttaattaccacaggtcaagaaccctgtacagagtctgtagccaaggtatgaggccagttttctcatggggcttttattggctctgttagtcaaatttgattctttaaaggaaaacataccattccagtcaaagccttggtaaaataaccaatttctccaactgtgtcctattgcaaaaagaaacagattcttattgcacttatgcaaataattatattgccataagttgagaatactcacaaatagtttccaaattctgagaaattaggtagagtgaaacaaatacggtctaaattttgttcacaggagtatactttactcaatttttaaaagatgtaaatagctcaaaagaaaagttttcttgactctgaacaacaaaacaagggatcagcaatgttttaagcaaagtcaaaaagattactttagtcttctattagttcagtccatgcagttaacttctgttctgattgacattcatgaacatttcagctttgcatgagtcctgaaagtttttcctcaattctaatgtcacagtctccaaagttattagaaacctgcattcaagagcacttttcaaattcctatagctgattaaaaccacctttgaaagaggattaaaacaagacaacagttgtctgtggatgrcaaaatgttttaaggcagccacagtcaaaaacacaactgacaaagaaatttggttaccacagtggcatgtaacaattttacataacaattgtaattattagtaacatacactaagtcatgacagaattataggagttttccataattttggaacatataccaataacatatttttgtttatttatttatttatttttgagacagaatcttgctttgtcacccagcctggagtgcagtggcacaatgatctcagctcactgcaacctctggctccagggttcaagcaattctcctgcctcagcctctcagatagctgggactacaggtgtgcactaccatgcctagctaatttttgtatttttagtagagatggggtttcaccatgttggccaggctggtcttgaactcctgacttcaggtgatccgcctgccttggcctcccacagtgctgggattacaggcttgagccaccacgcctggcctcaataacatatttatgcaaatacagcccaatgaaagccaaacactatttcatatttgacaatgcttcctttatgatttatataccaaataagccaaacttcactttgcattagtatactattaatgttaaacccaattcttaataaaaccttatagacaaatctatccaactttaatgcctgaccataaggtaagattttcattaaccttttataaccctttaaaattttttttttttttgagatggagttgtgctcttgtttcccaggctggagtgcagtggcacgatcttggctcaccgcaacctctgcctcctgggttcgagctattctcctgcctcagcctcccgagtagctgggattacaggcatgcaccaccacacctggctaattttgtatttttagtagagatggggtttctccttgttggtcaggctggtctcgaactcccaacctcaggtgatccgcccacctcggcctcccaaagtgctgggattacagacatgagccaacgtgactggccaaccctttataattttttttgttgaagagcagattagtgctctaagaaaaacttactgtacttttattctaatatttaatttacagaaaaactgaataataccctcttaactttagccagtatgttcacacacagaatttcatttacaagattaacaaactcttaaactttcagttttattctatttaacttaaacaatcctttaaccctttaggcgaaaaaaaaatccacattcccgtgacttcttatttatttatttattatttttttttgagacggagtcttgctctgtcaccaggctggagctcagtggtgcgatctcggctcactgcaatctttgcctcctgggttcaagtgattcccttgcctcagcctcctgagtagatgggactacaggcacgcatcaccatgcctgactaattttttgtattttagtagagacagggtttcatcatgttggctaggctggtctcaaattcctgacctcgtgatctgtctgcctcggcctcccaaagttctaggattacaggcatgagccaccatgcctgactgacttcttataatcttttatgaaaaacatatttcagtttctttacacaccttgcatgtaaaactgtttttatttcccaaagattacttaagtcatgtgaactaaaaggcattacactttttacttttctgacaaaaaatattttatttaagcctttttctttttttggacagaatcttgctccgtcaagtataatgccgtgatcttggctcactgcaacctctgcctcccaggttcaagcaattcttctgcttcagcctcccaagtagctgagattacaggcatgcactaccatgcccagctaattttttttttttgagacggagtctctctctgttgcccaggctgtagtgcagtggcacgatctcagctcactgcaagctccacctcctgggttcatgccattctcctgcctcagcctcccaagtagctgggactacaggcacccgccaccatgcccggctagttttttgtattttttagtagagacggggtttcaccgtgttagccagaatggtctcaatctcctgacctggtgatccacccgtctcggcctctcaaagtgctgggattacaggcgtgagccactgcgtccggccccatttttattttatttcttgattgtatgctaaacgaggggtagattattcaagcctccccattttagaccatatagggtaagttcctgacattgccatggcatttgtaaactgtcatggcgctggtgagagtgtagcaatgaggatgacctaggtcattctcgtggccatcttggtttggtgggttttagcaggcgtctttactgcagcctgttttatcagcaaggtctttatgacctgtgccttgtgccgaccctcatatctcatcctgtgacttagtatgcctaactctctgggaatgcagcccagcaggtcttagccttattttacctagctcttattcaagatggagttgctctggttcaaatgcctctgataaaatgatttaagttattgagggattttacccacagtagtgacgtgtccagatttgtgttttcttttcttttcttttttttttttgagacagggtctcactgtagtgcccagagtggaatgcagtgatacaatcatggctcactgcagcctcgagctccctggctcaagctgtcctcccccttcacctcctgagtagctgggactacaggtttgcactaccatgcccagttaattgaaaaaatatattttgggaggctgaggtgggtcgatcgcctgaggtcgggagtttgagaccagcctgaccaacatggagaaatcccatctctactaaaaatacaaaaattagctgggtgtggtggcacatgcctgtaatcccagatactcaggaggctgaggcaggagaatagtttgaacccgggaggtggaggttgcagtgagccgagattgtgccattgcactccagcctggttaacaagagcgaaacaacatctcaaaaaaaattttttttttgtagaaatagggttttaccatgttgtcttggattcctggactcaagcaatcctcctgcctcagcttctcaaagccttgggattacaggcatgagccactgtgcccacccagatttgtgttttcttctaggtgttggcagaatggaattggaggaggtgaaaatggaggtagggaaatcattaagtgggctttccagaaacattaagggcctaaactaaggcatgacagtagggatagagaagacagtcagatataaaaatatttaagagaggctgggtgaggtggctcacgcctgtaatcctagcactttgggaggccaaggtgggtggatcacttgtggtcaggagtttgagagcaccatggccaacatggtgaaaccccgtttctactaaaaatacaaaaattagctgggcgtggtggtgcatgcctgtgatcccagctttcttgagaggctgaggcaggagaatcgcttcaactcaggacacagaggagccgtgagctgagatcacgccaccacactccaacctgggcaacagagtaagactctgcctcaaaaaaaaaaaatttaatagaggattcataagacttggtgaccgaacatggggaaaaaaggaaaaatatctattgtcacctattagattgggtgacaaaaagattggaggtctgaggttaaaaaaagggcagagtgggagtagggaagcaggagaggagaaaagacaggaagctgtggccagagggggaactatggggctgtgtaatggcaaatctggtcaagagctgctctgacagccagcttccgtgccaggttctagagaggagattccragaagaccgccctgtggctggaaatcccccacatcatgccttaaagtttccataggtagtgtaatgagtgaagatgttctggtccttgctggactgtcctgagagaccccctgtgagaagacatcgacaagatgcagggccattttcccatcagtacgctatgtacccctggccgtgaactgaatccacaaactgtcagcccttaggagatgacctttcagtctgctaggaagtacctaaagaaacatcctgagagagtcattagaaaccactgacatgcagaagcagagcacttcctcataactccttagtttgaaaagtgcaggtgcctttccatatggtaaaggcccctgaaattttgatatttaaaatccccactttatagatgaagaaaccgagacccaaagagcagaagtgacttctcatgtcacacaggaagatagtagtagagctggacgtcagctgacatttcctgatactttgctgtacttaatacatagagtgcctgctgtgcactgggcaaggaagcagaagaaagaagaccaagtccctgcctcgcagagctcacgatttagtggaaatggcatccaataataatgaataaatataagatttaatatcaggtcgggcgtggtggctcatgcctgtaatcccggcactttgagaggccgaggcaggcggatcaccaagtcaggagttcgagaccagcctgaccaacattgtgaaatcccatctctacgaaaaatacaaaaattagctgtgtgtggtggcgcatgcctgtaatcccagctactcaggaggctgaggcaggagaatcgcttgaaccttggaggcagaggttgcaatgagttgagatcgtgccattgtacttcatcctgggtgacaagagagagactctgtctcaaaaaaaaaacaaacaaaaaccgaaaacaaaaattagctgggtgtggtggcatctacctgtagtcccagctacacgggaggctgaggtatgagaattgcttgaacccaggtggcagaggctgcagtgagctgagattaccccactgtactctggcctgggtgacagagtgagtgagactctgtctcaaaaaaaaaaaagaaaaaaaaaaagaaaaattcaaagtaaacatggagatctgtgggaacaccagacaaacttccagttgaaagtagttcagccgggcgcagtggctcacgcctgtaatcccrgcactttgagaggctgaggcgggcggatcatgaagtcaggagttcaagaccagcctgaccaacattgtgaaaccccgtctctactaaaaatacaaaaattagctgtgtgtggtggcacgtgcctgtaatcccagctactcaggaggctgaggcaggagaatcgcttgaaccttggaggcggaggttgcagtgagttgagatcgcaccattgcactccatcctgggtgacaagagagactctgtctcaaaaaaaaaaaaccgaaaacaaaaattagctgggtgtggtggcatctgcctgtagtcccagctacgcaggaggctgaagcacgagaattgcttgaacccaggaggcagaggctgcagtgagctgagattgccccactgcactctagcctgggtgacagagtgagtgagacgctgtctcaaaaaaaaaaaaaaaaaaaaaattcaaggtaaacatggagatctgtgggaacaccagacaaacttccagtggaacgtagttcagccgggcacagtggctcacgcctgtaatcctagcactctgggaggccaaggcgggcggatcatgaagtcaggagaccgagatcatcccggctaacacggtgaaaccccgtctctactaaaaatacaaagaaattagctgggtgtggtggcggactcctgtagtcccggatactcgggaggctgaggcaggagaatggcgtgaacccggcaggcgaagcttcagtgagccgagatcgtgccgctgcacttcagcctgggcgacagagcaagactccataaaaaaaaaaaaaaaagatgaaatggaaatctttttatgtgtattattttttcaaattgctactaagttgttaggacttaaatacttatttggccctaactacttaagtagaactgttagggattccttttggcctagaggtaccttgagaaaattattattattattattttgaggcagagtttcgctcttgttgcccaggctggagagcaatggtgcgatctcggctcaccgcaacctctgcctcccaggttcaagcgattttcttgcctcaccttcctgagtagctgggattacaggcatgtgctaccacggctggctattttgtattttaagtagagacggggtttctccatgttggtcaggctggtctcgaactcccaacctcaggtgatttgcccacctcggcctcccaaagtggtgttgggattacaggtgtgagccactgcgtctggcctcagaattgttaatcaggacccccatggaacaccattatcaactagagtacaatgcttctgtacagttccacttgcctttagtctttttttttttttttttgacagtttcactcttgttgcccaggctggagtgcaatggcgcgatctcggctcactgcaacctccgcctctcgggttcaagcgattctcttgcctcagcctcccaagtagctgggattacaggcatgcgccaccacacctggctaattttgcatttttggtagagatggggtttctccatgttggtcaggttagtctcgacctcccgacctcaggggatccgcctgcctcagccttccagagtactgggattacagacgtgagccactgctcctggtgcctttagtcttatagataccactcatttctaaagttacttaggtaaacactttttcccctactcccttcaatgaggtggtttcatacctttgtgatataggttagacacttttgtcattttctgcattttactccagaatctcctgacgtcctaaatgattttttaaaattttgtrtacattaaggttcattctttttttttttttgagacagagtctcacctttcgcccaggccagagtgcagtggcgcgatctcggctcactgcaagctccacctcctgggttcacaccattctyctgcctcagcctcccgagtagctgggactacaggtgcctgccaccgctcccggctaaatatttgtatttttagtagagatggggtttcaccgtgttagtcaggatagtctcgatttcctgacctcgtgatccacccgcctcggcctcccaaagtgctgggattacaggcgtgcgccaccgtgcccggcccagtttcattctttgtgttgtaaaaatctgtgggttttgaaagctatagatactaccatgtatcaccattatagtttcttttgagtatagttttgctgtcctaaaaagtcccctgttcttcatttatttgaccccaccctcacccccaaaacccctggcaaccattgatctgtttaccgtctctatagttttgtcttatccagaatgttgtgtaattggaatcatataataaatagccttttcagatggacttccttcactcagcaatatgcatttaagattcattcatgtattttcatggcttgataactaatttttctaattgcttaatattttattatatggatgtatcacagtttattcatctgttgaaatatatcttggttgcttccagtttttggtgattttaacgctgctataaacttttctgtgcaggtttttatgtgtacaaaaattatttttcttgccatattttttagaggtgggatctccctctgtcacccaggctggagtgcagtgacaagatcacacctcactgcagccttgaactcctgggctcaagtaaccatccctccccagcctcccaagtagctaggactatgggcatgtgccactacttttatcttattttatttttatttttatttaattttattttattattattattatcattatttttaattgatcattcttgggtgtttctcgcagagggggatttggcagggtcacaggacaatagtggagggaaggtcagcagataaacaagtgaacaaaggtctctggttttcctaggcagaggacccttcggccttccgcagtgtttgtgtccctgggtacttgagattagggagtggtgatgactcttaaggagcatgctgccttcaagcatctgtttaacaaagcacatcttgcaccgcccttaatccattcaaccctgagtggatacagcgcatgtttcagagagcacagggttgggggtaaggtcaccgatcaacaggatcccaaggcagaagaatttttcttagtacagaacaaaatgaaaagtctcccatgtctacctctttctacacagacacggcaaccatccgatttctcaatcttttccccacctttcccccctttctattccacaaaaccgccattgtcatcatggcccgttctcaatgagctgttgggtacacctcccagacggggtggtggccgggcagaggggctcctcacttcccagtaggcgcggccaggcagaggcgcccctcacctcccggacagggcggctggccggacgggggtctgacccccccgacctccctcctggacggggcggctggccgggcagaggggctcctcagttcccagtaggggcggccgggcagaggcgcccctcacctgccggacggggcggctggccgggcggggggctgatccccccacctccctcccggacggggcagctggccgggcggggggctgacccccccacctccctcccggacgaggtggctgccgggcggagacgctcctcacttctcagacggggcggctgccgggcggaggggctcctcacttctcagacggggcggttgccaggcagagggtctcctcacttctcagacggggcrgctgccgggcggaggggctcctcacttctcagacggggcggttgccaggcagagggtctcctcacttctcagacggggcggccgggcagagacgctcctcacatcccggacggggcggcagggcagaggtgctccccacatctcagrcgatgggcggccgggcagagacgctcctcacttcccagatgtgatggcggccgggaagaggcgctcctcacttcctagatgggatggcggccgggcagagacgctcctcactttccagactgggcagccaggcagaggggctcctcacatcccagacgatgggcggccaggcggagacgctcctcacttcccagacggggtggtggccgggcagaggctgcaatctcagcactttgggaggccaaggcaggctgctgggaggtggaggttgtagcgagccgagatcacgccactgcactccagcctgggcaccattgagcactgagtgaacgagactccgtctgcaatcccggcacctcaggaggccgaggctggcggatcactcgcggttaggagctggagaccagcccggccaacacagcgaatccccgtctccaccaaaaaaatacgaaaaccagtcaggcgtggcggcgcgcgcctgcaatcgcaggcactcggcaagctgaggcaggagaatcaggcagggaggttgcagtgagccgagatggcagcagtaccgtccagcttcggctcggcatcagagggagaccrtggaaagagagggagagggagactgtggggagagagagagggagggggagggggagagggagagggattttattattttttaagagataggggtctctattgtccaagctgatctcaaactcctgggctcaagcagtcctcctgcctcagcctcccgaatagctgggactataggcacaagccatggtgcacccagcrtactttcagatcagtaaatatctaggagtgtcatgggtagaacayatggtaagactgtttaactttttaagaaactgccaagctgtcttccaaagtgtctgtatgattttccatgcctactatcaatggatgagagtcatggctcctctgcatccttgtcagcaattggaattgtcagctggttttcttttttttaaatttcagtcattctaacagatgtccccaatacaccattactaactcaaataccttagctctctaagctttattatagctcagtgagagtaaagaaagagaagtagaatccagctggggattgcatttccagaaataattattaagtaactatgggttagtagaactctagacataacccattctagttctcctttcttatttttgttatattttggagacaatgggaagattacctgaaacattccaaaagaatgctacagacttgaacttggatgttacgtatttaaacatataaggcacacaggggccgggtatagtggctcatgcccgtaatcccagcactgggagacctgacgtcaggagtttgagaccagcctggccaacatggcaaaacccgtctctaccaaaaatacaaaaattacttgagtgtggtgttgcgtgtctctaatcccagctactcgggaggctgaggcaggagaatagcttgaacccgggaggcagaggttgcaaagagccaagcttgcgccactgcactccagcctgggcaacagagcgagaccctgtctcaaaaaaaaaaaaaaaaaagaaaaaagaaaaacatagacgcatggggattcaggttcattgcgcatttaatattgaattgtgtgactgtactgcctataatgtgctgggtggtatgctgaatgatggggatacagtgatgcataaatcagacaaagtctagtcctcagtaagcttacagtctaactgggaagaaaaaacacctacagtacacagcaatcaagactgtgatggggagtacagggagctatggaaacaccaatgtcagggcatctaaccagcctaggagaggttagagaagtcttcttggaggaaatgacctctaagatatggcctatagcaggagttggtgaagtgcagcctataggccaaatccagcctgccatctgctttggtacagctcatgagctaagaatgattttttgcatttttaaatgtttgaaaagattcaagagaataatgctttgtgatatgtgaaaattgtatgatattcaaatttgagcatctttaaataacatttcgttagaatgcagccacactcacagctgcttttgcactatagcagcagagttgaacagttgcaagagactgtatgacctgcaaagcctaggatatttactctgtggccctttacagaaaaagtttactgacccctggcacaggatgggtaggagttagccttataaagcagaatgaagaagagggaagttgctttctgacgggatctttgcatagctgcagtaaccttaatatgcttagagcatggcatcaaggaggtaggggctgaaggactgtggtgagtattggggctagagcagtgggtaggatccagactgggaagagccttggcaattgtatgtatggatttgggtttatccagtatgaagcctttaaaagatttaaagtgatgtgatccgatttactttttaaaaaatcctctggccacagtgtagaaactgggttggagagggtggggtgagaaaagaggcagggaaactagttgaggcttttatagtcattcaggggagatgttggtaacctagactagcacagtgacactggggataggaatatattggtttgagaggcatttaggaagcaaaattgaaaggctttggtgtcttagtttttagccttagtctgtaggctgttataacaaaataccatagactgagtggtttataagcaacagagatttggctgggtgtgatggctcacacctgtaatcccagcactttgagaggctaaggcaggaggatcatttgagctcaagagttcgagaccagcctgggaaacatggcaaaactccatctctacaaaaaaatacaaaaagttagctgggcatggtggcttgtgcctgttaatcccagctaccagagagcctgaggtgggaggatcacatgagccctggaggtcaaggctacagtgaaccatgatcaggctgctgtactccagcctggagaccctgtcccaaaaaaaaaaaaaaaaaaaaaaaaagaaaaagaaaataataaaaaaacatacaggaaaaacaccacaaaacaaaagcagagatcagagatttatttttcacagttttggaggctgagaagtccaagatcaaggtgctggcagattcaatgtctggtgagggcctgctttctggcttagtggcagctgtcttttttcactgtgttctcacatagcaaaaggggaactctagtctcctcaacccttataagggcactaatcccaatcatgagggctccacccttgtgacctaaacacctcacacctaaaggccccaactcctagtatgttatcttgggggttaggatttcaacatatgactttgggcaggggtataaataatcagtctatagcatttggtgattgattggaggcattgaggtgtaattattttcatgttcaaatgattatgctttcttttttcaaaagtttttttctggttcatgtgaatgcatggttgagaaatccatgtttagtaatagtcttcgcagcaaaattcttcagtggtgtttcattcctccagagctccttcccataacttgggttttaaaatcacatctctctgtgaccgcttcatgttgttccctgttgacaagagatctggcttttaaagagcagagaagctattggcagattaattttcctttccaggtttrtcttggtttaacgactttcccaaaatatttctgggttgggcccttgggctctttggttttcaaggcaatttgtcaacaatgacaagcgcttctcattttctagagctcttagactatttccagttttaatctctgacccttgcctttctcctcttcagagtggaagtcgctatgttatgttttataatatgttgtattgcttttaaagtgcctactcatatgtcaactcagttgaccctacattaaacctgtgaagaaggcaggacaggtcaaattactgagattgagagaggttagatggcttttccaaagtcaggaggtaataaataataaagcaggtgataaaactcaggttttcagatttcatggttttattctttccttaatgtaccctttatccaagaaaagggagttagactagctggaatagttacactttcagcagtaaagatacctggatgagatacttttttctccttctgtgtatggtctgtgggacttcacccagacatcagcataggccctttgaagcaatatgtggactaccaataattcctagactacaatttccgaagctgttgtctgtatattaaagcatatgtatgtttcatttatttatttatttgtttgtttgtttgtttttgagatggagttttgctcttgttgcccaggctggagtgcaacggcacgatcttggctcactgcaacctccgcctcccgggttcaagcgattctcctgcctcagcctcccgagtaattgggattacaggcatgcaccaccatgcctggctaattttgtatttttagtagagacggggtttctccatgttggtcaggctggtctcgaactcccgacctcaggtgatccacctaccttggcctcccaaagtgctgggattacaggcatgagccaccatgtccagcctatgtatgtatattttaatttcttctccttccctttaggtggttctaactttgatggtttgagaccaaatgggaagggagtgcctatggaccaaagctccaggggtcaagataaaccagaaagcttgcaaccaaggtaatgcaactctcccttcacttgtcccttgtaggactgaggttctcctcacagtactgagaccattttgggtataatgtaagttgtcccagggtagctggcctaggaagtgtccttttttttttttttttgagacagagtttcgctcttactgcccaggstggagttcagtggcatgatctcggctcaccgcaacctccacctcctgggttcaagtgattctcctgcctcagctttcttgagtagctgggattacaggaatgtgccaccacacctggctaattttgtatttttaatagagatggggtttctccatgttggtcaggctggkctcgaacttgtgacctcatctgatcctcccatcttggcttcccaaagtgctgggattacaggcatgagccaccgtgcctggctggaaatgttcttaataatacctgacatttatttgcacttactgccaggcaccctgctcttatttggactatcttattttagcctaagaggtaagtacttttttctgttttacagttagggaaactcaggtaatgagaagttatataactcacccaaggtcccagaattatcaagtggtcaatctaggatttggaactggcagtctagccctcccttgaaaatgtagattagaaacgtttgatttcactctttcattcttttaggtgtttcctgactctgaagtgactttttttcctgttttatttactctttcctgactcgcccctgaggtgtgttattatataaatatctgaagtctgtactccagtgccccctactgaatatctccagaatctgtctggtcaagataaaacacttacttgtatcagtattttagttacgactataaatacagtacaatgcaaataataataaaatataaattctcattgcctttctttttattttggattattcctgtggaatagatgtacagaatagaatgatcaagttaaaggacctagagggttttacagtttttttcttttttttttttttgagacagagtctcactttgtcacccagtcactgcagcctccgtctcccaggttcaagtggttcttgtgtctcagcctcccgaggagctgggattataggcatgtgccaccacacccagctcatttttgtatttttggtagagatgggattttgccatgttggccaggctgatctcgaactcctggcctcaagtgagttgcctcccttggccttccaaagtgctgggattacaggcatgagtcaccatgcccggcttgtcaattacatgattgaatcccatactctgccaccattcatgtgggtgaggcgttaatgacactgggtttcatttttctcatttagaactgagggaattagattatctttaagatgcccctctggtctgagattctgtgactctattattaggaaaatctccagaccaacatattatacaatcaacaaaatataaatttacttaattccacatagaaatagtgttgttttagtagataaattttactttggcctcctttagtcttctgtgacttagatgcttgtataggggaacttttagctttgtattcattcattttgccatggggactcatccacatatgaaaaaaatacttctgtttttccagacagaataaatccaagtccgaaattactgacatggttcgctcctccactatcacagtgtcggacaaggctcatattttatccatgcagaagtttggactgcgagatacaattgtgaaatcacatctactacagaaagaagaggattacacctatatccagaacttcaggtagctaactgggttctaggatgttttcagagcagaatgatcatttggcactctggaatttgagcacttcctcctatacctggatttggagacatactcttctatagaatctctcccctcattttmaaaatgagtgattccatgcattctttattaacaggcatttattctgtgccctttctaggtgggcacggtgataggtgtggtatagtgggagtgacacgacttgcagatagttacagaaatatttgtggagacaaatgggtacagaagaaggagcgccatcctgattcttttatttatttatgttttatctttttgagacaaggtctcgctttgttgcccaggctggagtgcagtggtgcagtcacagctcactgtaccctcagcctcctgggcccaagtaaccctcccacctcagctgctggagtagctggtaatacacatgtgctgatttttaaatttttgtagagacagggtcgcactrtgttgcccacatgggtctcaagctcctgggcttgggcaatcctcccgccttggcctcccaaattgttgagattataagtgtgaaccaccacacctggcctcttgattcttatgtatccctccaaggttttatactcccttggcattctgggcctttgaagaaagtcatttaaaatgaaattactaaaatgaagttagctggtgtttggtaatctttttaggcaagattactaaaagctaaattaataaaggttgtgggattctgctagatctttcaaaatcgttgcattgggactataagataaaataacattgtttctagggatacaaactgtgaattatggtgaagaaatagccttttgaatactggtgttgctttcttgccaaaagtaattaccaaagcacttttcattttttcatttcagtagtatatacaaggcaaataattatgcagataatgcctgggtaatggctgtttaaaggaagtgggaatgttyggagtaggcctatactatttgaagttgttatcacaaaagtaacagataccatgacagaccgcaagtcactccttggtgctgcagtcctggtctaggttagaaatgacatttcttatgtctcaaaatgccagtccacagagacggaaaccagcataaatcagcataaaatgctttctcctgttatctccatagtgattcggagtcactaattatttctctttggtgacaggttttttgcgggaacatacaatgtaaatgggcagtcccccaaagaatgcctccggctgtggctgagcaatggtatmcaggccccagatgtctattgtgtagggtgagtgcttctcttctagtcccctctccatcttcaagcacacagagctgtggttgaaggatgggtcttcacaacaggtgaaggatttgaaaaatgaacagatgcctgataacagctgtttccctgtttgatgttcttcctcatggcaagcaaatgtctgccactattaaagtggggtgcttggcatttaagtgctagtatttaatttttagtgtaatcttctgttaaaatcctgaattgcatcctgaactcagtgcatcctgaactgaactttattgcttggacattcaatacatttttggttacaaagcaaaactatcttctgccagagaagaaaggttagctgaagaaagtcccatcagttagtcttttttttttttaatcttctcatctctatactgggcattactagtggggaggggcagcaaagcttgtatggtatattgaaaagaactagaattcataatttatgtagaccaaggtttgaatcccagtttgccacttggtgcttgtgtgaactaggggttacagatgtaaaatagggacacttcgaactacttcataggctggtcatgaaaagaaaatgggtttttgtttgcaacagcacctgcaaagttccttggcatttagttccttggctctaaatgtttattttttcctcctgagggtcctgaagtttagctagaaagctagggcttatgcacctaaaccaatctgagaatgtgtcatttgcacattacttttctttactatctaactggttgcttctcaaaataggttccaggagcttgatctgagtaaggaagcttttttctttcacgataccccaaaggaggaagagtggttcaaagctgtgtcagagggtcttcatccagatgccaaatatgcaaaggtaagagaggagtcagggacctcttaattttatgttgccatgcagggaaattccaagatcatttttcaccttttccatgacctttatcttaagccagtcttaattatcccgcaattttcatttccagatcttccagaagrggtgcctccgggtgggaaagatgcagggtctcgscactcgtaggttagcacatagcatgcttggtgaattgaacagatgattacctgtgttctagtgtggagaaggagacacgtgaatactctcagccagcttccagactatgtttcctttggggtatttattcctgtttgcaatttctatttaatgccatgtctctcttttccaggtgaagcttatccgactggttgggattatgctgctgttatatgtcaaacaggagcatgcagcttatatctcagaagtggaagccgagactgtggggacaggaatcatggggaggatggtgagtccttggttggtttgtttggcacattgaggaccttagctcctgaggtattgaccacttctgatgacacagtgactacacgtgtcccagtttgaaggtgccaatattccaagatgaatcataccctcaagcagggctcagtcgagcaaactatttagaaactgttttagtgaactacctgctgatttaaccaattagcgcctgtcctcatattccccaacactagagcctccagttgatcctcccatttcacccatgaagtatgttgcagaaactatgctgggtcattcagaaaaacaaagaatgctgacagtaggtttgcaatttcctcttcttattgaggccattaaagttctgtttttaggttcttctgtgagagcttagctttgtgttttcaaagggtacctatggtttgcctgtgatttagtgaaaagaacactggattaagggagctaggttttggggctgggtgtggtggctcacacctgtaatcccagcactttgggaggctgaggtgggtggatcacttgaggccaggagttcgagagagttaggttgtggattcagctttgccattgactggctagtcattctgccttctttttttttttaatctgtacaatatagataataccacaggattattataaagattaagacaaaacattttgaaagtctgtagggttttttttttgtttgtttgtttttgagatggagtctcactctgtctcccaggctggagtgcagtggcgtgatctcagctcactgcaacctctccctcccgcgttcaaccagtgctctgcctcagcctcccgagtagctgggatgacaggcgcctgccaccacacccagctaatttttgtatttttagtagagacggggtttcaccatcttggccaggctggtcttgaactcctgacctcatgatccacccgcctcggactcccaaagtgctgggattacaggcgtgagccaccgtgcccggccagaaagtttgtaggtttaagtgactgacacaattaagtttgaattggatttctttggggatcctttccatagggcaacaagggaggcgtggcgatcaggttccagttccacaacaccagcatctgcgttgtgaattctcacttggcagcccacattgaagagtatgagaggaggaaccaggactataaggacatttgttctcgaatgcagttttgtcagcctgacccaagccttccccctctcaccatcagcaaccatgagtgagtctgggcttccaccccatgcggttcaccatgagtacatagagttgtgggctctgtcttttcatggggagatgcctggtggtggtttcctattgctgcaatggtggtagctcccacctcttggttatacatggattatatctcttgaaaatatttagtttcctaacttgctatctggcagatctcttgagtctttctcttttcttacttttttttttttcgagatggagtcgcgctctgtcgcctaggctggagtacagtggcgtgatctaggctcactacaggctccgcctcccaggttcataccgttctcctgcctcagcctcctgagtagctgggactacaggcgcctgccaccatgcctggctaattttttgtattttttagtggagacggggtttcactgtgttagccaggatggtctcaatctcctgacctcatgatccgcccacctcggcctcccagagtgctgrgattacaggcgtgagccaccgtgcccggccttcttattttatttttaaatttttatttgcatgtcatccttgctcagggactatgctaatcttctctgtatcatttcaattttagtatatgtgctgccaaagcaagcacactctagagtctttctcaagcatcatgtgtccttgggaaggtataagttttatttatttatatatttatttttgagacggagtcttgctctgtctcccaggctggagtgcagtggcgcaatctcgcctcatcacaacccccacctcccagttcaaatgattctcctgcctcagcctcccgagtagctgagactacaggtgcgtgccaccaggcctggataatttttgtattttgagtagagagtggggtttcaccatgttggccaggctggtctcaaactcctgacctcgtgatccgcccacctcggcctcccaaagtgctgggattacaggcatgagccaccacgcccggccatttgttttttcagtatttaattttatcaacatgtgtgagaatccctggctgctatagtatagcagccagaaataagaagaaagtgaggctgggtgcagtagttcatgcctgttatcccagcattttaggaggctgaggtggggggatcgattgagcccgggagttcaagactagcctgggcaacatagtaagaacctgtctctgaaaaaaatttaaaaattagctgggtgtgattctgcatgcctgtaatcccagctactcaggaatctgaggcaggaagataagagaaagggaaggggaggggaaagacaaagagaggagaaaagaaaaaagaaaggaaaggagaggagaaaggagaaggaaaagtttattttgagcagagaatatgacaaaacagcagttgacggctatattgtagtctgagttctgcttaagatttcttttttttaaagatttattttaatttgggtctgcctacctccaacattatgaagaaaacaaccaaagaatgagcatctcaaacccagtttttagaagtatgttttaggattttatttgtctgttctttccagagcatgtataattgagagttggactacatttgtttgcctccacttggtctttttttcctcttaattcaactttacaaagatatagttgcagcttctgagagcatcttgtgctcatttttgtttcttctctttactttatctcatttatctctacaacttcctmtttgtctaaagtcaaagccttagaattttagactttatgataacatacgccacttcttttataaagaggaagaagccactggggccgtgatatctgccaaggagtaaacagagttaacgcctcttgtcctgcctgccgaggtggaactatctggagcattttggtgttctggaagctgacaggatggtttttcttctccagggagyctagcagggagtgtcttgcagccgagctcttccattctggtgaacctgcagcatcctagtttgtgaggtcgcagcttatgtgtcagtttgtctgcttttagtttgtggatgcattaattttggtgtgcgtgtactgctgtgcagattctctaatgacatggttgttggcttcagatacagcagtattagacttaatgagatgtacagtgtcatcagggagccttcagttagctttttcccaaagcagcagaaggaatcaaacaccttctacactccactctgcagtacagaaagagccaaccaatgatatactgctggttaaatccaggctccactataaagtttgaactttgtttcagaggaactctgctctagaaacaaaggctgagagtgtgttttgtgggttgcagtatacacagaggcagaggtggtatcgtggcatcatctgatttgggatctctgggtgattggcgtgactctcaattcttgattttttttccctcttcccaggaatggggtaaattactatcttttagatcttattagactgtctttccaacctacaagaataaaatagctaaggagaacacaaggctgtttataatgaacttggaccaagataattgagcaagcatcacattagattattaaatgggatggcgagagaaaaaaattttccgaacagttgakccattttcccacccacctcccaagaggctgagcctcaggggcctttgtcagaagcaccctgggtagatcaggttaaagttcctcctaaaccctgttacctttgtgctctgtcctcacagtgtgatcttgtggctgggggacctcaactacaggatagaagagctggatgtggaaaaagtgaaaaagctcatcgaagagaaggaytttcaaatgctgtatgcatatgatcaggtacagatggccacctgtgccctcttccagcagctgtcctccaccatgagggcacagaaaagcctggcttccaaactcgcagcctcttcctccttggcttgggaggtttccctgagttcctgatgttgtccagtcatttcttcatttcatctgcatttccctcttccatagttgtctccccattggctctctcctgaagcaccttgtctcctgtgggagcaagagcatgttctctctctcaccttgtcattcatttattcaagaggtctgaagttagggctaaaagagtaccaagcttctataaagaaaggacttggtatatttaagatgatgtaataattgtttttagaatgagcctccttctcctctgtgcttctcgtcaccacacttctctagtgtgagtgacagctcttcccaagtggctttcctcactttctgtaggaatcacttctgtaacctgctgttctccatcattgcttgacgtagcgtttccttctcagagcactcgctgtttcacagtacaagagaatctgtttccctgtgactttcttctggctacttctttcagtagatttcagacctgttcaggtggtcaggttgttcagaatgttaaagtccttttttgttgttgttgttctatatcctcccttttagtaaccttagtattgtcattagtctaaatctttctattatcttttttttttttttgagacagagtcttgctctggcacccaggctggagtgcagtgttgtgacctcagctcgctgcaacctctgcctgctgggttcaagcaattctcctgcctcaacctcccaagtagttgggactacaggcacgtgccagtatgcccggctaattttttatatttttagtaaagacggggtttcaccgtgctggccaggctggtctcgaactcctgacctcgtgatccatccacctcagcctcccaaagcactgggattacaggcatgagccaccgcgcccagcctctattatctttttttccccagtgcagattaattaaagaaaaagattctcaacttagttatgtctttctctgyttatctcctctgtgttctggtctgaggcattctaatttctcttgtagtttgatacccatctctacttgccttcttttctggtctttcctgaagtagttgtacccattttgtgtgttatctgcctaccacatggttttaagctctatatgtaagggtcagcttacattcatacctacatttttactattttctgttgctttttaaatagttttttcaggaatttggcaagtagtatctactaaatagctgaccatgtgcaatgttagagctgatagttcttcaccagtccgtgtagtgccaagtgtggtgctccagggaagagggaagagcacctgtggttttgatcttgctgagagtgtgatctggaaggcgctcctaaaattaataggaaggatgctagctgttttcctaatgtgtcaggcactgtttaagttgacagtgaatctttctaaagaccctatgaggtagattctattataaatccaaaatttacagatggagaaaccaaggcacagagcttcccccagttcgcataactaatttgacaacgcagttctatctttatgtatatttggagcaactgtgctacacagatgaagtgtttgatacctggaagagaaaaactattagtttgttaagtggtacctaatcctcttaaagatatctcagtaagatgatactcaggccctttgggtgtagctatgctcttatgaaagagccttagccagacacaatggcttgcacatgcaatcccaacactttgggagaccaaggcggcaggatcacttgaggccaagagtttgagaccagcctaggcaatatagtgagaccctgcctctaaaagatttttaaatatagctgtgtggtgttgcacagctgcagtcccagctacttgggaggctgaggcaggaggattgcctgagcccaggagatggaggctgtagtgagctatggtcgcacaatggcactccagcctgggtgacagagtgagactgaaaaataaaaaacattrggctaggcrctgtggctgacgcctgtaatcccagcactttgggaggccgaggtgggtggatcacgtcaggagttcgagaccagccttgccaacatggtgaaactctgtctctactaaaaatacaaaagttagccaggcgtggtggcatgcgcctgtaatcccagctactcaggagactgaggcaggagaatcactttaacctgggaggtggaggttgcggtgagccgagattgcgccattgcactccagcctgggtgacagagcgagactccgtctcaaaataaataaataaataaataaataaataaaacattaaaaacttaaaaaataaaaaataaaaaccatatacaggcaaaagagtggtcagcttgtccacttcctaggagttagctaacttaagatcttacagaataactttcttttggggctttttcctttgggttagagtttgaattccagattgatatgcttttctccactaattcaaagtttgacctttttattctgakatttttttttctcccatccttttgtatagctgaaaattcaggtggccgcaaagactgtctttgaaggcttcacagagggtgagctcacattccagcctacttacaagtatgatacgggctctgacgactgggataccaggtaggtcagaggttgcttcaaagggttgagcaaacggaaacccagaaattctgggaagtacttgcccttttggacctaaggaagaatatatgcttcctgtgactttttccctatgttttgcactctgatcaaacattttctctcagtatctgctcatgaagcaggcttctttcccatgtattaactttgtgactgccttagcctttgttccataattttaatactggtttactttttagctgtgcctaggatgagatgattccaactaacttagctggtacttggacattacacagtagttaatatttttgtttgtttgtttgttttgagacagagtcttgctctgtcatccaggctagggtacaatggctggatcttggcccactgcaacccctgcctcccgagttcaagcgattctcctgcctcatcctcccaagtagctaggattacaggcatgtgccaccaggcccagctaattttgtagagacagggtttcaccatgttggccaagctggtcttgaactcctgacctcaagtgatccgcctgcctcagcctcccaaagtcagtagttaatatttttattagtgcttaccatgtgccatgtactatttgatgcccttgttattttctcatttaatcctcaagaacctgttgaagtaggtatgatttattaacctcattttatgagattggaaactgaagcatagaaaaattaaagaggcccccaagcagacraggggtacaggtaggatttgaacccaggcagtgggaattcagaggctgttctcttaactagcatctttttttttttttgrgacggagtctcactctgtcgccaggctgtagtgcagtggcacaatctcggctcactgcaacctctgcctcccgggttcaagcaattctcctgcctcagcctcccgagtagctgggactacaggcacacaccaccatgcccagctaatttttgtatttttagtagagacggggtttcaccatgttggccaggatggtctcaatctcttgacctcatgacctcctgacctcatgatccccctgccttggcctcccaaagtgctgggattacaggcgtgagccaccgtgcctggccttaaccaagatcttttaaagaccataggctgggtgcggtggctcacgcctgtaatcccagcacttgggaggccgaggcgggcagattgcctgagctcaggagttcaagaccagcctgggcaacatggtgaaaccccacctctactaaaatacaaaaaattagccagccatggcggtgcacacctatagtcccagctattcgggaggctgaggtaggagaattgcttgaacctgggaggtggaggttgcagtgagctgagatcacaccactgcactccagcctgggcgacagagcaagactccatctctataaaaataaataaataaataaataaaaataaaaaataaagaccatagcatgcttactgtcagattggttttttaattctctcctgattctcataggaggataaagatcagagaatcagtctgaactctgttttggctttgagctttcatggttgttttggatgatacccacaggatacatgttatcccttggtgggcccgaattgctcttgctgcctcagatgacttagccacatggacatgaaggccctgattcatcactccccacctgagccagggcactcgccaggcagcgggcactgctgtttctgtgagtacttccagtgtggactttgcatttcagtgagaagtgccgtgctcctgcctggtgtgatcggattctctggaaagggaagaacatcactcagctgagttaccagagccacatggccctgaagaccagtgaccacaagcctgtcagctcagtgtttgacatcggggtaggtggcagctggtacctgttgtaatcattctggagggaattggctttcacaactaagaccatttcttgtctttctggtttcttcctctccttttgagagggaagaagccccttttaggacaatttaaaacaattattaacaacttggttaataattgttttagtatgcctctgcatttttcctcatacatggaagttcccttttgcatttttgaactgtctctttgcagacctttctctatgcgtttataaatgggtgtgtcagtattgtgtatacaacattgaggatatttttccttttttgtaaaagagatcatattatacattttgctctgaggacatctttttttccctgactgaatatgtcttaggagatctttccaggacagtgaaggtagagctttcttctcattatttttaaaggttgcaaagtattccatagtatggatgagccataatgtatgtattgatgatcataaagttatttccaaagttttgctattatacacagtgctgttgtgaccacccttcacatgtatgtttgtgtatcagtgtatttctatagaatgaaattattagagatgaaattagcggttcaaataaaaaatgtattttaaatttattagatcttgctaaattaccctcacaacagttttaccactttatacttctaccaaccatgtataagtttattttcccatacccttgtcaatattgggttttatcagtcttcaaaatttttgccaacccaataagcagatattttatcatgttagattacatttccctgattacctatgagatcagcatctttttcttcctttcctttttttttttttctgttgagatggagtctcgctctgtcacccaggctggagtgcagtggcgtgatttcagcttgctgcaacctccgcctcccgggttcaagcgattctcctgcctcagcctcccaagtagctgggattacaggcacattacaccacgtctggctatttttttgtatttttagtagagatggggttcgatctcctgccctcgtgatccacctgactcggcctcccaaagtgctgtgattacaggcatgagccaccgctcccagccttttctttttgttttttttcaaaagacactgttttgttctgtcacccaggctggagtgcagtgatgcagtggcacagtcacagcgaactgcggcctcaatctgctgggcttaagcaatcctcccacatacatcagcctcctcagtaggtaggattacaggcatgcctgtatgtgtgtgtcaccttacctgactaattttttttttgagatggagtcttgctctgtcacccaggctggagtgcagtggcgccatctcggctcactgcaagctccgcctcccaggttcacgccattctcctgcctcagcctcccgagtagctgggactacaggcaggcgcccgccaccacacccggstaatggttttttttttttttttttttgtatttttagtagagacggggtttcaccgtgttagccaggatggtcttgatctcctgacctcgtgatatgcccacctcggcatcccaaagtgctgggattactggcgtgagccaccgggccctttttttttttttttttttttttttttttaaagagacagcatcttgctgtcttgcccagactggtctcaagtgactcctgggctcaggtgatccttctgccttggctaccccaagtgctgggattacaggcatgagccttctcatttatttattatctatctgtggtggctctttattatcattacaatgcctcacacctgtaatcccagcactttgggaggctgaggtgggtggattgcttgagctcaggagttcaagaccagcctgggcaacatggcaaaacccctcatctctacaaaaagtaaaaaaattagctgggcatgatggcttgtgtctgtggtctcagctacttggggggctgaggtaggagcatcacttgaacccagaaggcggaggttgcagtgagccaagatcactctattgtactccagcctgggtgacagcaagaccttgttgcaaaaaaaaaaaaaaaacaaacttgagaaacactgctttaaatcaaagccttagaaaaagttctcactgctggcctgttggtggcagcaagcaaaatagagctaggtactgggcaagcatttttctgccctggtcctaagacctggcagaactaactgctaaccatgctttcacttccatgtatttttttctggtaatcaggaagcagatgcctgtaccacaagctttgcctctggcagatccttctaagtcaattgttaatggagttcattaattaattaaatctatagcctttgttttctgtgttgctatcaactgctatttcccagtgctgtgaatgccgtctatactgagaaagaggaaatgggcagaagccarggtactcagtctctgatgtttccctttcaggtgagggtcgtaaatgacgagctttaccggaagacactggaggaaattgttcgctccctggataagatggaaaatgccaacattccttctgtgtccctgtccaagcgagaggtaggaaggacatgttaagaatattagcattgggctcaggccgggtgcagtggctcacgcctgtaatcccagcactttgggaggccaaggtgggcaggtcatgaggtcaggagatcaagaccatcctggctaacacggtgaaaccctgtctctactaaaaatacaaaaaattagccgggcgtggtggtcggcacctgtagtcccaactactcgggaggctgagacaggagaatgacgtgaacctgggaggtggagcttkcagtgagccgagatcgcgccactgcactctagcctgggcgaccaagtgagactccrtctcaaaaaaaaaagattagtgttgggctcttctattcctagagcttaaatctcctcatctattggagctcagagttctaggaggcacctatagcactatggactgtggtctttcttgatagactgcttttcgataaagtgaggctgatggtgttagctgagaagagagaggttgttggcttaggtcatcatgtcctattcttctaaaccagaatatggttcaaaatgtgttttgattttagaataactattgtgtattcttgcaatggatttttcttcttactgatgctttgctttgagattaaattgagtttggatacccatgagttaatgggagggaagacagtatagaaaaggaataggtaatataggaagttgaatatggtctgaaggtttttcatggaagagccacatggaagatcactcacacttgacattctacaaagtcaaattggggtttaaggtgaaggcgttttttgtttggtttgtttgttttaaacagagtcttactctgtcacccaggctggagtgcaatggcacgatctcggctcactgcaacctccgcctcctaggttcaagcaattctcctgtctccgcctcccagtagctgggattacaggctgtgccaccatgcctggctaatttttgtatttttagtagagatggggttttgccatgttggccaggctggtcttgaactcctgagctcaagtgatctgcccgtctcggcctcccaaagtgctaggattatgggcctgagccactgtggcagccgcagatggcatttttaatgccctagatgtccagctacttggaaggatgggcttgatcttcatgtttagaagtggaatttgtgaagggtattttgtaaatggtttttgggtatagaagatataaactttgacttcttcaggaagtagacatacaaaaacaaacggaatttttggattttgggttaaacacagataactagtctttagtgggaactgtggcctcccaggtagatacttaaagcagaaacatttaaaagagatggttcattttctttccatggtaaggactgcccagttggggtggctgggcaggttgctgaggaaagggcactggttttcactggccccgggcttcttcccagttctgttttcagaatgtgaagtacatgcaattgaaagtagaatcctttacaattcataatggacaagtaccctgtcattttgaattcatcaacaagcctgatgaagagtcttactgtaagcagtggctgaatgccaaccccagcagaggcttcctcctgccaggtaagrcctctgttcctagcttcctggtatctggtttggggaatgccttactctatatttgctcattttcctaaaatgagctttttgcttgagtgttttattctctgcttgaggctttttaaaaagccctatagatgaacccattcatgaataaaatagaaaatagtgaggagcatgagttcagtttcaaaagcattctcagtcatttatgtgttccataatttcacagaaagagaaaacataaaattgctgtatagcaggtgctgctgttaaaggaaccattttactatcttgctataatcaactcccaattatctgctcttgataatggggaagtaatccagaaattatatctggctctggaatgtaccatccacatttttcccgacttctccttcgcactctgcatggtactctgtgatggaacaatgaagggtgttttgtggacaattcacaggccgataattgcgttacacttctactgagtcagtcatcttcatcttacctggctcagggaaggctctttgatccatgccttcttattctgttagtatttctagcttgagctgtgctccttagtgcttgaattttatagcatttgtctattcaaatgtttttgtttgttgttttcatattcccagttggactataaactctttgttcttgtgtctcctgcatgccaagcacatttggatgcttgttggttggctgataccttttctttccttttcctaaccctttatgccttaccctcttccctcctgccttctttcccctttcctcttggcctgcccccggccaacattatttttaaaatttctctgcagattctgatgttgagattgacttggagctcttcgtaaataagaygacagctacaaagctcaactcgggtgaagacaaaattgaggacattctggttctgcacttggacaggggaaaggattactttttgtctgtgtctgggaactacctgcccagctgttttgggtctcccattcatacactgtgttacatgagagagccaatcttggacctaccacttgaaaccattagtgagctggtgagtaatatgccacaaagaaacatctagaactttgtagcagacaagccagtcaaacaagatattcctatgcctaccttcctagggacttagaaactcttcagcttcctagagcttgcttagtgtatcagctgtatattgctgtgctacaaaccatcctgaaattttagtagtttttaacaccgagttattgctcctcatgattctgtgggtttcccatgtgggtcttctgcttgtctcacctagccccatttgtgtggttataatcagatggcagctgtgatggccggagggctccagatggcctctctcacatgtcttggtgttagcttttctctgggtttcactcaccacatggactcatcattcagaaggctagctcagtcttctgtaggtagtggcaagaacatgagagaagaactgtaaggccttttgtagcataggctccaaaatgcatacaaggccacttctgccatgttttattggtagagcaagttgtgaagccagactagattctacaagtggagaaagactccacttcttttttttttttttttttttgagacggagtttcactcttgttgcccaggctggagtgcaatgacgtgatcttggctcaccgtaacctctgcctcccgggttcaagcgattcttctgcctcagcctcctgagtagctgggactacaggcatgcgccaccacgcctggctaatattttgtgtgtttttagtagagacagggtttctccacgttggtcagacaggtctcgaactcccaacctcaggtgatccgcccatctcggcctcccaaagtgctgggattacaggcatgagccaccgygcctggcttttttttttttttttttttttgagatggagtctcactctgttgtccaggctggagtgcggtggctcaatctcagcttactgcaccctccacctcctgggctcaagtgattctcctgcctctgccaccctagtagctgggactacaggcatgcacaccaccacacccagctaatttttttttttttttttgaaacagagtctcactcagctacccaggttggaatgcagtggcacatcttggctcactgcaaccaccgtctcccaggttcaatcaattctcccatctcagcctcccaagtagctgagattacaggcacccgccatcatgctaattttggtattttagtagagacgggatttcaccatgttggccaggctggtcttgaactcctgacctcaggtgatccgcccacctcagcctcccaaagtgctaggattacaggcgtgagccactgcacccagccaatttttgtatttttaatagagagggagtttcaccatgtcggccgggctggtcttgaactcctgacctcacgtgatctgcccgcctcagctttccaaagtgttgggattgcaggtgtaagccaccacgcctggccttttttgttttgttttgttttcttttgtgagtcggcgtctcactctgtccaccaggctggagtgcagtggcacgatcgtggcttactgcaacctctgcctcccaggttcaaacgattctcctgcctcagcctcccaagtagctggcattacaggtgcccgccaccatacccggctaatttttgtattttctatagagacggggttttgccatgttggccaggctggtctcaaactcctgacctcaggtgatctgcccgccccrgcttcccaaagtgttgggattacaagcatgagccactgcgcccggccttttttttttttttttttttgagacagtcttactctgtcacccaggctggagtgcagtggcacgatctgggctcactgcaacctctgccgtccgggttgcaagcgattcttgtgcctcagcctccccagtagctgggactacaagtgcatgccaccatgcccagctaatttttttatatttttagtagagacggggtttcgccatgttggccaggccggtctcgaactcctgacctcagctgatccacccacctcggcctcaccaagtgttgggattacaggcatgagccaccatgccctgcctaactccacttcttgataggaaagaaaagctgcaaaatgctgtgaccacgtttttcagtagttcacttatagtatgtatctttgtttgggctgctttaacagtatcccatagactgggtggtttatcaacaacagaaatttatttcttacagttctggagactgagaagtccaagatcaaggcactgccagctttggtgtctggtgagggcctacctcctgattcatagagggccatcttcttactgtgttcttacatggcagaagaggggagggaggtctctgaggtgtcttgtttagggccactaatcccattcatcagggcagagcccttatgacctaaccatctcccaaaggccctacctcctagtaccatcacatgagggattaggtttcaacgtacatatttgagggggacatacacattcagtttgtagcagtacattagagaaactcagccatgggttgggcacagtgactcacaattgtaatccttgcactctgggaggccaaggcaggataaatgttttaggccaggactttgagaccagcctgctcaacgtaatgagactccatctctacaaaaaaattaagaaatgagctgggtatgggggtgtgcatttgtagtcctagctacttgggaagccaaggtgggagggagcctgggagttcaagtctgcagtacctgagcgatagcgcaagacagtctctaaaaaaaaaaagaagacaaactcagccatgaattctaaaataatgaaagttccatagtcaatgatattattcttttgtttttttttaaatcatcatcggtaggtcaatgatattattcttttgtttttttttaaatcatcatcggtaggttatcatcctaaactaaatttgctgccatctaaaagattcctatggagacaattctaatacaagggaactaatttggagcagacctatggtaatatgtatgctttttttccagtgcatttttaaatttagggagtcttgaactccctcttcttcatcatatagatgaaaacaggggcccaatcaaggagagtgatttgtcacaggtcatatggtgagttaacagtggacctggaggctgggtgcagtggttcacgcctgtaatcccagaactttgggaggctgaggcgggtggatcacaaggtcagaagtttgagaccagcctggccaagatggtgaaaccccccgtctctactaaaaataaaaaaattagctgggtgcagtggtgggcgcctgtattcccagctgctcgggaggctgaggcaggagaatcgcttgaacccaggaggcggaggttgcagtgagccgagatcgcaccactgcactgagcctgggcgacagagcaagactccatctcgaataaataaataagtaartaaataaataaataaataaaaacagtggacctggaggcttggtatggtggctcacgcctgtaatctcagccctttgggaggctgagatgggtagatcacttgagtccaagtgttcaagaccagcctgggcagcatagcgagaccccacctcaaaatttaaaaaaaaaatcaattaaaaaaaaaatcgggccgggcacggtggctcacgcctgtaatcctagcactttgggaggccgaggtgggtggattgcttgagctcaggagttcgagaccagcctgggcaacatggtgaaaccccatctctactaaaatacaaaaaattagccgggcgtgatggcacacgcctgtaatcccagctactagggaggctgagacaggagaattgcttgaacctgggaggtggaggttgtagtgagccgagatcgtgccattgcactccagcctgggtgacagagtgagactccgtctcaaaaaaataaaaataaaaaaaaataaaagaaaatcaaaacagtggacctgggccttgaactcagatttttggactcccaagtctgtgctgtttcctcaccagaccgcaacttctctctggttctaatagtgaaatgctataggaatgattttttcctgaaaagatggtgcatatttgacctgattcattgaaactgcttgtcataaccctctcctgattctcaaaaattaccttttgttccttgatcataccacctgatttcatttctgtctgtggaatgcgtggttaggggcagtggaatgttttcctttttctgtgggtttgctgtccccatgccatgcattttcctggagccagcctggcakwagttctgtcatgatcttgattgctttccagactctgatgccagtatggactggagatgatgggagccagttggatagccccatggaaatccccaaagagctctggatgatggttgattacctgtaccgaaatgctgtccagcaggtaggttgtgtttaagcattcagacctgattgaggccaggctgccttgaggaccatcagccccaagaacttttttcataaggaaactgtggagaactgttcttcacccagggasgggaggaaggatagatagtatgccatgtttcacactcctgggagaccctgctatttttttttttttttttttttgagacagagttttattctgttgcccaggctggagtgcaatggtgcgatcttgactcactgcaacctccgcctcctgggttcaagtgattctcccgcctcagtctcccaggtagctgggattacaggcacctgccatcatgcctggctaatttttgtatttttgtagagatgggtcttgcaacttctgacctcaggtgatccgcccaccttggcctcccaaagtgctgggatgacaggcatgagccaccgcgctctgccagaggccctgctattacgtgtagtacctgattacccccaagggaagcagcgttgcataggaagcccatcccagcacagcatagcatgttccttcccatggcctctggggtccccctgccagaaagctgcctggaggcctctcaggatgtcatcgctctccttcaggaactctcaccagcttctgggaatgggtggggccaacttgttgataaaccaagcagaggcaggggatcagatgcaacccctgggccacaaatttggaggcctgatttctagagtgactagggcagccttcactaatcagattggttagtttcactgacctgtttatataggtttcagggagacctatacaaactacaagcccactttaccacttcagagcaacatcctttttttaaaaaaatatacattcttatgatattccattttcacttttcttcccctcacatttattgaaagttgcagtgtaccaagcactattctaagtgttttttacagcattgcctctagttttcacagtagttctcagatgaggaaacagatgcctggaaaggtgaataacttggttaaggtcccaaagctgataaatgggcagaggtggaatttgaatacagtgaatctggctagagaagtcatattcttcagtgctgtactattctaccttctctgtagcactcctttcaaatggaacttttgagcaatacatataatattgttattattaatacagttatatggtattaagtcattttgtaaaacaaatgaacataaagtatcctgagactaatagaaatagctttgctgccataatctgtttttattgagatggagtctcgctctgtcaccaagctggggtgcagttcaccatcttggctcactgcaacctccgcctccccggctctagcaattctcctgcctcagcctcctgagtagctgagattacaggcatgtaccaccaagcccagctaatttttgtatttttattamagacggggtttcaccgtgttggccaggatggtctcaatctcctgacctcgtgatccacccgcctctgcctcccaaagttctgggattacaggcataagccaacacgcctgatggctgccataattttatttgcccaaagcattgaggtgccttgttagcgttctcttatgctcttatgcactgtatattttcttcattttttttcccctgggtaatccctctataccactgcaggacacatagctgcttttacattttctccaatgttggatcttcttgtgtgatgtgtgccctacccatagttttataatagatgcctgaagacctattgtagaaacatgccagggaaggcctgcaagatgaattcgccacatcagcctaaatcagatcatctgtcaggtgattcagaggcctcaccacactgctcctttttgcattctgctattgatattgccaggtcaggaaatcattgatgattttctgagaaaataattattttgttactgtcttcccttttgcaggaagatctgtttcagcaaccaggcctgaggtcagaatttgaacatatcagggactgcttggatactggaatgattgataacctctgtatccttcagacattcagctctgtgtgtgtgtgtgtgtgtgtgtgtgtgtgtgtgtgtgtgtgtgtgtgtgagagagagagagagagagaatatgagtgagaggggtgagaaaaagtaaagtattttatggctcaaaatctgatattgtatcctcagctaccatgttttacttaaagtttgcatagagaagactttacaactttatttatttattttttgagacagggtccatctctatcacccaggctggagcctgtggagcctcccacctcagcctcccgagtagctgggaccacaggtgcatactaccacacttggctaatttttgaacttttcgtagaggcaggstttcgccatgttgcccaggctaagaatttacaactttaagcaaccaatagagcaggaactcaggagggcctggctcacctgacaaacagtgtggtcccttcgagaagttaggctggcatcctagccctgagcagagagcctgacagggcaggcagcacttctggcatgtgcttgctcctgggccttttcctaaccatggacagcagcattatcggttccttaacaatggggccaaaagctgccagcaatcattctgtagccgaagccctgctgcttttcctggagagccttccagagcctgtcatctgttacagcacctaccataactgcttggagtgttctggcaactacacagcaagcaaacaggtgagaggaagcattgagcagcatgtggttagccccagaccccatggggctaagggaacagagtggacacagttcctcaagtgcagcatctcagaaactgaacaccttatctttccttctcaaacctgctctttctcttatgtctttgtttcttttaatggcatcacccttaattccagtgagtcaaccccgaaacctgagtcatttctgactccaccctctccttgcctcccatgtgcccagtctcgttgatctatcacccatcctctctcttccattctcattgcacttagcttggttcagtgccctgcattcacgatctccttctgctgatttgttttgcatgctgccatcagattgtgtattctaaagctattgtcatgtgactgttggtcaaaaactatacttggctctctattgccaattactgattttcttaaatattgaagacgttctatgatctagcttggtggttcacacatacaacaggccttggcagaataatctagaaaacttgccaataatagagattctaaagccacaccccaaatctactgaatcacactttttttttttttgagatggagtcttgctgtgtcacccaggctggagtgcattggcgcgatctcagctcactgtaatgcctcccaggttcaagcgattctcctgccccagcctcctgagtagctgggattacaggcgtgcaccaccatgcctggctaatttttgtatttttagtagagatggggtttcaccatgttggccaggttggtcttgaactactgacctcaggtgatccaccctcttcggcctcccaaagtgctgggattacaggcatgagccactgagcccataatcacttttggaatctattcaaacttccaaactgattctgatatgcagatagctggagtactcattgatcagggcctgatcaacccttctaattatgctcctgccaaaattgacttctcataaagtgttctctctacttacttcactatttcccttctcctgccctttttttatactttctttgctctcaccccagttattaacctctgtaagtcccattttgtcttacattcaagacccaactaaaatgtcttatttctttcagtcttataggaacatgtagttaaaagtttgacttctaaattcatgttgcatttgacccgtacctctcttttgatacttatgccaagtggtaagcaaccagttttctgtgcacagtctttctcgtgcacttggatcgtgtatacagttcttggactatagtaggcacttgagaaatgattcagtgaacaaaagacaaatcccggttcttcctctttcaggtcatttctastctccccatattccacaaaaatgtcttccactacttgatggcgtttttgcgagaactgctgaaaaattcagcaaaaaatcatttgsatgagaatattctaggtaagcagccaaatgtctatggaaagcatttctgcaaactgagagactcgtaatgagaaatgaggttgaggagggtcccaggtcccttgcagtagaactaaaatatcaagctctgggcaaagattttttaaagcagaaagttttgcgtttggacactcctccccactcctaacaacacaagagtaagtatagtcatgggctgggggcggtggctcacacctgtagtcctagcactttgtgaggctcaggtggacggatcacctgaggtcaggagttcaagaccagcctggccaacatggtgaaaccccatctctactaaaaatacaaaaattagctgagtgtggtggtgcatgcctgtaatcccagctaaacgggaggctgagttaggagaatcgcttgaaactgggaggcggaggctgcagtgacccgagaccgcaccactgcactccagcctgggcgacagagtgagactccatctcaaaaaaaaaaaaaaaagtatagtcatgtaccatataacatcttggtcaacgaaagaccacatatacgatggagggcccataagattataataccgtggttttgtgcgtgtgtgtttgtgtgtgcatgtgtgtgtgtgtgtgtgcttgagaaagtctcactctgtcacccaggctggagtgcagtggtgtgatctcagctcactgcaacctctgcctcctgggttcaagtgattcttgtgcctcggcctcctgagtagctgggattataggcgcttgccactatgcccagctttttaatttaatttaatttaattttttagagatggagtctcgctctgtcgccaggctggagtgcagtggcgtgatctcagctcactgcatcctccgccacccgggttcaagcaattctcctgcctcagcctcccgagtagctgggactacaggcgcgcaccaccatgcccagctaatttttgtatttttattagagacagggttttaccatgttggccaggatggtctcaatctcttgacctcgtgattccacccgcctcggcctcccaaagtgctgggattacaggcctgagccaccgcaccctgccttttttttttttttttttttaaagggcagtgaccctccccactgcaggatgggagagggctgggagccagtgggagccagatggtcacccaggccctcacagccaacccttggacaggggccaccgggccacaccctccaacgcccgtgcctcaaccatccctaccacgctcatggaacctcatcgcatcctggggacgagcccccactggggacacggggtggttgggggaggaggcaggaaccagagaggcaggacaccaagcagggctgcctcccccacaaccccccaacctcagccacctctgacacagcaccattccccttggaaagcccactggcagggacaggctaatttttgttatttttagtagagatggggttttaccatgttggcctagctggtcttgaactcctggcctctagtgatctgcccgctttggcttcccaaagtgctgggattataggtgtgagccaccacacccagctcataataccgtatttttgatgtgcctttcctatgtttagatatatttggatgcacaaatacttagcactgtgttacaattgcctgtagtattcagtatagtaacatgctgtacaggagcttaggagcaatagactataccatctagaattgtgtaagtacaggtttgtgaaagtttaagtacacgctatgatgtttgcacaatgatgaaatcacctaatgacacatttctcagaacatatccctgtcgttaagtgatgtgtgtctttagtaccttcttttgctgaatcatttcttttctgtgttttttcttgcagctagcatatttggcagcttattgcttcgaaacccagctggtcaccaaaagcttgatatgacagagaagaagaaggctcaagaatttattcaccagttcctctgcaacccamtctgagcctmtctctcctcctattttacttgaggctgccaattaccagccccacctgtttcagctcaagagatgccttaagataattatgtgaggccacttggtagcaagaatggcagctatttcctgagcctagtaccccarttaagcccaccattggttagcacactcagcgctgtgagtcgtgaagacacgggagaaaatccaccataataaaactgacattcaattttcaactttagttatttaacacagatttttttattttttatttttttttattttgagacggagttttgctctgtcgcgcagggtggagkgcggtggcacgatctcggctcactgcaacctctgcctcctgggtgcaagcaattatcctgcctcagcctcccgagtagctgggactacaggcacacactgccacgcccagctaattttttgcattttagtagagacggggtttcaccgtgttgcccaggctgttctaaaactcctgaactcaggtaatctgcctgcctcggcctccccaagtgctaggattacagrtgtgagccaccacgcccggccttttttttttttttttcttttttgagatggagtttcactctygttgcccaggctggagtgcgttggcgtggtcttggctcactgcaacctctgcctccttggttcaagcaattctcctgcctcagcctctcgagtagctgggattataggcgtccgccaccatgcctggctaatttttttgtgtgtttttagtatagacacggtttcaccatgttggccaggctggtctcgaatgcctggcctcaggtgatccacctgccttggcctcccaaagtgctgggattacaggcatgaaccaccacgcctggcctaaaatgtttttaaataactgtacttgtactcactcaccctacctccagggcatagtcagtctgggctgagatccccatgatcagatatttgatggaaagtcctgaaaggccaatgagttggatggcaagaatgcaggcagaagctgctggataaaataggctacagccacctcagatgctttcagtgctctgtctgaggatgtgtatatgcatatgcaaactcgacccccgttcctgcccagataatggctcaataactctgaggctggttgctcagcctctgagggcaatacaggcatttaaaaaattaaaatgaccaggcacagtggctcacgcctgtartctcggcactttgggagactgaggtgggagcatcacttgagaccrggrgtttgggaccaggctgggcracacagggagaccccctctctacaraaacatttttaaaaaattrgctgggygtggtgatgcrtgcctgtggtcccagttacttgggaggctgacgtgggtggctcacttgagcacaggagtttgaggctgcagtgacctatgaccacatcactgtacrccagcccgggtgagagagggagaccccgtctctaaaaataaaatgtaaaatcactgaaaaaatgagtgttcggtgaaacaagtgggattttytgggccagcaagtcttccaaactgtatatgatgcatcctgtctccatgtgtaatatattttaatgataaatgtatttttaacagtggcggttgtgtatgtttttatgtcttaagagatggcagttcgctgcagctggattttgtggctcaagccttggggccaaagagacatattcctggcagtctggtgggtaccagtcactattcacatacttccagcaagaaatggttatggcactgacctgaaccccttgacccctggtctggtctttggagttgtcccactctgaatattcgagagaagcagcttatggttaaaacaggcagtggcagctgggaggatctaacagctagatcctccaggcatttggaaaggacaggggcataacgaaggcagaatcgcttcctgggtacgaatgcccactacttctgggcactgtgaaatgggtttaagacgcgggccagcaggacaatgtgaacggtgaaaggaagggagtggccggtaggtggcgctaactggcccgggcatgagtcccgccgtagccgcgtcctcttgcaggggaagaaagttgggaccgccagcctgggcaagcgcgtgagaagggagctgggggtcctaggcaagcgcgtgagaaggggaagaggcggcggcgtcctctccagctgggcttagaatactcttagttctgcctttggggtcttgtcttcctttctgggcctcctgcctgtgttaactttgatgggtgctgaagggaaggccggggtcccggcaggagaaacccgggaacgtcgcggccgtccaggctcccctggcgggttggagccagggttctgactgccaactgtggtccttcccgctgcggctgtggctgccagggcgagggcggtcagcgcaaacctggctgaggacatttcggattcttccttggggattcgttcccttctccttgactccggtgccgcgagggcgacaccctccgggcyccgcgtggccaccccgggcgcttccccacgcggatgaacccacctcctgggcgccttcccctcggtgccccgctcgccaattggaggctgcagctcagccccctgacaacctgagccaaccagaggcgccagggaggggcggatcctctgtccccaccttcctccggaaagaggaagcggaagtgacgttaggggaaggtgggggcaatcatggtgccgctggggaggggagaagctgctgctgccgccgttgccgggagccgcggaggtaaaaggcgaaactagactcggcctgggcttgggacttaccgggaggcgcgggacttaggctccctcctgaagcatttcccaatagagacctcagtttggtcacyatagggaccccaccccttctccgtttccatggggatgggtatccagccccccttccctgtttccatggagacccggaccctgcccctctcctccttgcttggagacccccagcttgtcttcggatttttctgtgtagccctgtgctgggggctatcccagacaggttccttttcccagcctcctctcaagggggctctgttcgcactcctcgttggctaccctcaaasctcctggtcttgtttgtttcggacagttggtctccgcgttgccgccgagggtgccggggcagcccactggggccctcggtgctcttctctctctgctcagatgcagcgaaatgtacatctgtggggttgcgtaagccagagctaggggtcgggccggtacctcccggatccaatcctttggcctgtctctggtaactgtctagccatcccactaagtaaaggctcactttctaacccagagcagaagagaaagataaagcgcaaagccagactgaaaactaaaagggatgtgctgattattttaaaattctctattctrcctgccaaacccacatttgtagagcctgtgtttgcagatgaaggaagaatcactattccagaacatgaaagcttcaaatgtggtatttttctcaagagaatgtatcttcccaagatagtatatcttcacgagagagtaggtagccatgtctttcagtcatttagctgacatttcctgaactcttatcatagtatcagtgtactatgctaggagctgtagaaacaaaaataataagactcaattgattcagggacgagagcccaccacagaaccataacttcttgttgacaccatattgttttaggacataaatagatacagtgatcttcgttgtttgtgcctgattgaggaatagcccttccacccagaaggttgaaacatctgttctaggtaggggggaaggaattcatacttgttcctctactatttaccaaacattgtgctttacatatgttgcctcttttatttcttataaaaactttgagagaacaggaattactggtcccaccttgcacgtaagaaaaatgaggcacagaaaagttacccatgtagtaaaaggcaaagacaggatttgtaggtagatgactctgcctccaaagccttgctccttctaccataaactgcatgaaaccatttactgcctcgtggtctgatttggaggatatttgaatggatggagtttcccttaagatttgtagcaactcagcctttcagcagctgctgttctgtttgctcttttgtcccctttaaatattttgaccaagtttcaaattgtttgacaggcgtattcagaaggtcttatgaacttattcagtttttgaaaagcattgcttttctttctttttcttttttttttttttttattagagatgggggtctcactatgttgaccaggctgatctcaaactcctggcctcaagcgatcctcccatcttagcctcccaaagtgttgggattacaggtgtgagccaccacgcccagtcggcattgcttttctttaaaaatgacttgatggttttaaagttaaaataaaaaaattattcccaaggatggtttttcatttgctttggcttgctctttaagtgagagggaaaatgagccttgtggttgctgaggaggtccgtcggtcttgtggtatgactctaactctggctttgttctgttgcagacaagtcattacgttttcatttctcacaactgggctgagcacaactgaaccatgggggaacacagtccagacaacaacatcatctactttgaggcagaggaagatgagctgacccccgatgataaaatgctcaggtttgtggataaaaacggactggtgccttcctcatctggaactgtttatgataggaccactgttcttattgagcaggaccctggcactttggaggatgaagatgacgacggacagtgcggagaacacttgccttttctagtagggggtgaagagggctttcacctgatagatcatgaagcaatgtcccagggttatgtgcagcacattatctcaccagatcagattcatttgacaataaaccctggttccacacccatgccaagaaatattgaaggtgcaaccctcactctgcagtcggaatgtccggaaacaaaacgtaaagaagtaagtaaagcagtcagtgagggcctagtttggttttggggcaagtccttacaaaattcttggtgcaaattttagctggggagtaaaggagtgcatggggttaggacttaagtagttttgctatcaacaacatatgcctcaggttttgttgtgattgcttctggaacttttggtttgtatagccacattgaaatttgggaatatcaaattgtaatttctcgaatttccttccccaaatcataaataaaacagaaatttcacttaagtagacccatgtttctggtgctaaaataactatttagcttatctacagggaaataactggagtttgcttatttgatgaagaaataactatatttggcttatctcctggttgtgtttaaatgatttgttttagagatgagtatctgctggaatatgttttattatcttagtgaatgtttaatgaacttttatttcacagtggcacacgcctgtaatcccagcactttgggaggctgaggcgggtggatcatttgaggtcaggagttcgagagcagcctggccaacatggtgaaaccctgtctctgctaaaaatacaaaaattagccaggcttggtggcacatggctgtaatcccagctactcaggaggctgaggcaggagaatcacttggacccgggaggcagaggttgcagtgagccgagatcatgccactgtactccagcctgggcgatagagtgagactccatctaaaaaaaaaaaaaaaaaaagaaagaaattcaggctgggcacagtggctcatgcctgtaatcctaacactttctgtaatcccagcactttgggaggccgaggcaggtggatcacctgaggttaagagcaccctggccaacatggtgaaactccatctgtactaaaaatagaaaaattagccaggcatagtggcgggtgcctgtaatcccagctatttgggaagctgaggcaggggaattacttgaatctgggaggtggaggtggcagggagccaagatcgtgccactgcactccaggctggatgagagagagagactcagtctcaaaaaaaaaaaaaaaaaaaaaaaaaggaaattcaggcaagagacagtaaatgagagcaggttatctaaaataagttttcattttcatgtttagctaatgtgagtaagctaatgcatgtcaggatgttttgaaaactgtaaagcattttacaaattatattagtggttattattagcagaataaaagttctggtttaaaggtagtgatatacattatctaggaactatttttttttttgagatggagtttcactcttgttgcctaagctggagtgcagtggtgcgatcttggctcactgcaacctctgcctcctgggttctagcaattctcctgcctcagcctcctgagtagctgggattacaggcacgcaccaccatgcccagctaattttttgaatttttagtagaaatgaggtttcaccatgttagccaggctggtctcgaactcttgacctcaggtgatccacctgccttggccttccaaagtgctgggattacaggcatgaaccaccatgcccggcccatccaggaactattacaggtcaattagaaaaaaataagtcactagtagttacagtaccaaggactaagatgttaccaaacagaaatagggtgaatgatttagcaaggaatatcttttttgctgtggttgaggtcttaaaattgcatatggcttattgatggcatatcacttttcctttgctagccttagagagaccatcttgtcccacctcctaccctatgcagaaatctccctatggcatccctgacatcagttaatcttgtttctgcttgaagacatccagaacaacaagagcagagtgtttcataccccaacccaatacatttgttagccagctctgattgttagaaagcttttacttgtatagaaccaaaacctgcctttctgcaggtgctgcccactggttctagatctgccttcctgagtaaactttctcccacagaacagtccatcagctatttgaagatcatggatttttcttcctcttgtacaggctaaccacctccatttacttaaatgtccctctgtgacattttccccagtctctcatcagcctagtcacctttgattatatgaattccagttttccaaggtcctttttttcttctttttttgagatggagttttgctgttgttgcccaggctggagtgcagtggcgtgatcccggctcactgcaacctccgcctcccaggttcaagcgattctcctgcctcagcctcccaagtagctgggattacaggcatgcgctaccacacccagctaattttgtatttttagtagagacagggtttctccatgttggtcaggctgatctcgaactcctgacctcaggggatatgcctgccttggcctcccaaagtgctgggattacaggcatgagccaccgcgcccggccccagagtccttttaaaatctgcagttgagcgcagtctcataagtgtgagtcaactagcactgaatacagtatggctcttatc

SEQ ID NO: 94137 - DNA, 28704 bp, Homo sapiens
aaaatggccatactgcccaaggtaatttatagattcattgccatccccatcaagctaccaatgactttcttcacagaattggaaaaaactactttaaagttcatatggaaccaaaaaagagcccacattgccaagtcaatcctaagccaaaagaacaaagctggaggcatcacactacctgacttcaaactagactacaaggctacagtaaccaaaacagcatggcactggtaccaaaacagagatatagaccaatggaacagaacagagccctcagaaataataccacacatctaaaactatctgatctttgacaaacctgacaaaaacaagaaatgtggaaaggattccctatttaacaaatggtgctgggaaaactggccagccatatgtagaaagctgaaactggatcccttccttacaccctacacaaaaattaattcaaggtggacttaaatgttagtcctaaaaccattgaaaccctagatgaaaacctaggcaataccattcaggacataggcatgggcaaggacttcatgtctgaaacaccaaaagcaatggcaacaaaagccaaaattgacaaatgggatctaattaaactaaagaacttctgcacagcaaaagaaactaccatcagagtgaatgggcaacctacagaatgggagaaaatttttgcaatctactcatctgacaaagggctaatatccagaatctacaaagaactcaaacaaatttacaagaaaaaaacaaacaaccccatcagaaagtgggcaaaggatatgaacagacacttctcaaaagaagacatttacgcagccaacagacacatgaaaaaatgctcatcatcactggccatcagagaagtgcaaatcaaaaccacaatgagatgtcatctcacaccagttagaatggcgatcattaaaaagtcaggaaacaacaggtactggagaggatgtggaggaataggaacacttttacactgttggtgggactgtaaactagttcaaccattgtggaagacagtgtggcgattcctcagggatctagaactagaaataccatttgacccagccatcccataactaggtatatacccaaaggattataaatcatgttgctataaagacaaaagcacacatatgtttattgcagcactactcacaatagcaaagacttggatccaacccaaatgtccaacaatgatagactggattaagaaaatgtggcacatatacaccacagaatactatgcagccataaaaataatgagttcatgtcctttgtagggacatggatgaagctggaaaccatcattctcagcaaactatcgcaaggacaaaaaaccaaacaccgcatgttctcactcataggtgggaattgaacaatgagaacacttggacccaggaaggggaacatcacacaccagggcctgttgtggggtgggaggagaggggagggatagcattaggagatatacataatgtaaatgacgagttaatgggtgtagcacaccaacatggcacatgtatacatatgtaacaaacttgcacgttgtgcacatgtaccttagaacttaaagtataattaaaatatatatatatatttttaaaaagttaaaaaaatagtttaagcaaaaagataatttactgagtcatgtaaagtgaaaagtccaaggatggagcttcaggttaacttggacccacgtgctcaatgtcatcacgtgttggactccagctcttggctttgctttcttctcaggtagactttccctttacagtgacaatgatggccaccagcagcttcagtgattgctaaataggtagattatcaacaattgccaaataggtaagcttatactctacctatttagcaattgttgctgaaacagggactctttcccaattatttcaacaaaagtttcagaattgagtctttatggcctggactgaggcatgtccccatcactgaactaattcatgtggttaatggagtaaaattggctccaaaaggccaagtttgagtcaggcttagggtgaccaactcaccccgatttgcttgttgcttttctgattttaggattaaaaatcccatgtcccaggaacctcttccatttgggacaaaccaagatagctggcaccttaggagtctgccccgtggatgaggggaattaacagtcagccccatctgactcccatagtcaaagaatgaaggtgggtttgtctcttggaggaattgccagaaggaggaggaatgaatgctgggcaggcaaaagcaagagagtaatgtcctctccattcattttcttagattagaggcaccttgagggcaaggaattaatcttacttatttttgtatcttttgaaaaattgagcacattgctctccacataggaaagcctcaaaagaatttatactgattctttcacagctttattaaatatttgaaaaaattcctttagagtgaaggtctaacacaatagttcatggtggttaatacagaatcattttttaaaggagcacttaaaaatattttacaatcttaacttgattgagattattccaatataatcttactgaaaatggagtaggtgaaaagttttcaccaaaggaactttcaaaatcactaaaatgcaatgattcataaggtccttttcccctgttatatttaagataaaatctgtattacttaaacatctaatttatattaaaaagtgaaccttaaatactctccttgacattcaattatttagtttcagttgtgttgttgtttaattagaactgagcagtggacaggaattgtttttctttgggmagsgtgtggcttttgctctgaaaccttcttcctgtaacttctaacttctgaccttctcctggccagcaatgagttatacatcacaattaggagtataaaagagaaataattgtatagagagctatgtcttaaattttgaaaacaggataagatttttaaaatattttgtgttaatgaataaatgttcagtcttgagcgtagttcatgggagaaaaagaaactgcctttgacatgctgcttccaaatctgacattgccccatagaggcaaatgctctagttgtacttagtttttgtgtattgataaataatatttctatacatttatagggcagatgtgatattttgttacatgcattgaacgtgtaacaatccagtcagggtatttagggtatccattacctcgagtatttatcatttctatgtgatgggaacatttcaagtcctgtcttctagctattttgaaatataaaatacatttaactatagtcaccctactctcctatcaaacattagaatatatttcttctatctaactgtatgtttgctcagtcatttctctgtggggtatattcatttgtaaataataagtttagactattgcctctaattcatttcaatctctaacataaaatgggtttaaaggctctctatatttccaaaatttatataaaattccctttgcaaaagctgagctgaaagaacattataaatgaatattattttgcctacctaaataaaacaacacttatgcctaaaaatcacattgtaaataagaaatttatgttactattatgttttcttttattatcattaaagttctacaatgaaactatagtgaactttgtggccggcttcccagcacccattccaactcatttccattgagaaaaaaagtaaagtttgggtgagacctcagtttaagatgtggactgcattggtctacaggtaaccatatcctttgctggcttagatttggatatgtgacacaattctgtccaaagtgattaaaggagacagttgctgaagacttctaagagacagaagaaatctagacgtcatttctatcacccagtggaagtgaaaaatgaattacatggttcctgttgctgctggtagttatatttaccactaaaggaaccagaagtctactctgttaaaagccaagtgtaaagctgcaaagaactgagtacattatgaaatcgttgagttgctaactcaaccagtcctgaagtctgccttacctctggacttcttgttccacaagacgataaatatccttactataacaggattttggttgtggttgaaatggtaaatatatagaggataacaaaagtttagggccaaaggtccttatgtgtcattttgtccctctgttcctgaccactttatcttacagagcaagagcccaggtggcatgagactccctaatttaacccagccacacaggcagtagcagtggataaagagagtcctctcctgatgcccatccagctgcyatcttcaccacacatctgacctagatggcattcagttttgtccaccctttaagcatacatatgcacctactgaatgaacaaacaggatatgcacaatacccccaaatgccacaaaatttaagttctgctaatcttaaatgttatgtcattggacattacctaaattcccccaaaacttggccttaccctgactattgttcaaattggggtacttttttggtcataatgataataatccccaaaacaacatgtgtcagatactgtgctgaatactctactcgctttcctcattcatttgatagtaagaggttggtattgtaacaagacgcgttttgcagatgaggaaatgaaagctcaaataggttgagacactggcccatgattgctctgctggtgagtgacagagtgagtattcaaaccaggttctagggtctgcaggttctagggattcagctacagacccactaccatcccctccagctctgaaagcccatggatctaagatgcccatattcaccaatgcacaggccaacctgagacttaaaactggaattaatttatcaaggcacaaactaataatcaacggaatacatctattgccaaatcatctccatggctgcttccagattgttggtaatagctatactgtaaggttcagaccaaggggaccaacgtcagaatttgttatctaaggtccagtactgcagtttactaatccaggtactggatttacagctattaaatacttaacacttgaggatatcacatgtgattaatattcttaatttatttgtactttttatttgagctggagatacagtagtgaacaagaaagaaaataccttctggagcctgcattttaacaagcgggacaattaaattcaatagtgatttagcaagtacttctataccaagttctgtttggcactacagataaaaagaaaaaagatgctatcctctcactgccaagtgtgcctggacaacccaactgttagcgaataattctacttctgtttggtaactgctctttatgttggaaagtttagttacattattctattaaataaccttccaattaaaagcaggagcacaatcccacatacgcgtctgtcaaagtaagcacccatttctcagctgtaactcattactggttccctgccgcaggcactgtgctgcttttaaccttacttgtaaactattacctaacttccccggtaaaggtgctcgcttatccagtaagacggacagacgtctatggtagatccacgtttcatttatcccaactcactggaactggctgaagcttctccagacttgtgccggaccttggtgcagccaaagttgctttctccgcggccacctaagctgccaggtgcacattaactaagtggcagaaggccatcggcttggcaattgcctgaggcctttccgggactcgctggtttttaggttccatgaagggcatccagatctaggatgatacgaaaagtgcgtggtgggagagtggaatcaacctctactcttaggtccgatacaacccctccaagcacctgtctaaccaatcggaaagaaagttacattcaacgctggttctagcatccaatccaaggacgtgtttcagactctgctgcccggtcccagccagccctgagctggcgccttagacgctcgcctggcagctgcgcacactcggagcgccccgagcggcgcagatagggasgttggggctgwgccccgcggcgcggcgcctgccactgcgcaggcgcctcaggaagagctcggcatcgcccctcttcctccaggtcccccttccccgcaacttcccacgagtgccaggtgccgcgagcgccgagttccgcgcattggaaagaagcgaccgcggcggctggtgagtacgcgcctcgcgcgctcggcgttctggggggcaatgtcaccccctctccagtcccctaggggctttgaaaatagagatggtgagaccagaccctatgacccactctcccccactacacgcacatcccctggggcgcggcggggacgtccacgaagggactcaaagagccagggaggtggcgggccgaggcggaggccaggaagggaagaggaaagaaaaattagcaggtgctggggaaggcaacctgtggtgttaagtgtgaagggagggaagtcagccgaacggtagtggaggaacctaaggtgggtctggggtaaaattgaggggagctggggcggggtcgccaggcttttggttttaaaggagaaccacccatggcatcgacatccgtctgtctgaatattagattagagtttatgttaattatagataatgatatttaagaactaatttcctggaaaacaagccaaccaaacaataaaaggtacatttaagtgcctttttaaagggctggattaaaagcacgtaaggacttaaaaacaatgcttccttttcttgtcacaaccaccctatgagatcatagcattcccattttacagatgacgaaagtcaggctcagagaagtgaagggacgcgtccaaccaagattgtacaactagtgacaggcagattcaggtttacaccagatctgactccagaagggctttgcttaatcaggcaatcttgtggacccaagtctgaaggaagatttgccaactactgtgaaatatcaactgctggtttcagtattatgagcttctatttcttcttttttcccctcagagattgtttcaatctgttttaaggaaattaagaggcctgctgcacttgtgcgtcttccccccacctccacttaaattagttacaggatataatttggaagacattttttttatggtctcaggtcttagatttatttatttattaattattattattataccttaagttttagggtacatgtgcacaatgtgcaggttagttacatatgtatatatgtgccatgctggtgcgctgcacccactaacccatcatctagcattaggtatatctcccaatgccatccctcccccttccccccaccccacaamagtccccagagtgtgatgttccccttcctgtgtccatgtgttctcattgttcaattcccacctatgagtgagaatatgcagtgtttggttttttgttcttgcgatagtttactgagaatggatttccaatttcrtccatgtccctacaaaggacatgaactcatcattttttatggctgcatagtattccatggtgtatatgtgccacattttcttaatccagtctatcattgttggacatttggcttggttccaagtctttgctattgtgaataatgctgcaatgaacatatgtgtgcatgtgtctttatagcagcatgatttatagtcctttgggtatatacccagtaatgggatggctgggtcaaatggtatttctagttctagatccctgaggaatcgccacactgacttccacaabggttgaactagtttacagtcccaccaacagtgtaaaagtgttcctatttctccacatcctctccagcacctgttgtgtcctgactttttaatgattgccattctaactggtgtgagatgatatctcattgtggttttgatttgcacttctctgatggccagtgatggtgagcattttttcatgtgttttttggctgcataaatgtcttcttttgagaagtgtctgttcatgtccttcgcccactttttgatggggttgtttttttcttgtaaatttgtttgaattcattktagattctggatattagccctttttcagatgagtagattgtgaaaattttctcccattttgtaggttgcctgttcactctgatggtagtttcttttgctgtgcagaagctctttagtttaattagatcccatttgtcaattttggcttttgttgccgttgcttttggtgttttagacatgaagtccttgcccatgcctatgtcctgaatggtaatgcctaggttttcttctagggtttttatggttttaggtctarcrtttaagtctttaatccatcttgaattgattgttgtataaggtgtaaggaagggatccagtttcagctttctacatatggctagccagttttcccagcaccatttatgaaatagggaatactttccccattgcttgtttttctcaggtttrtcaaagattagatagttgtagatatgcggcgttatttctgagggctctgttctgttccattgatctatatctctgttttggtaccagtaccatgctgttttggttactgtggacttgtagtatcgtttgaagtcaggtagtgtgatgcctccagctttgttcttttggctaaggattgacttggcgatgcgggctcttttttggttccatatgaactttaaagtagttttttccaattctgtgaagaaagtcattggtagcttgatggggatggcattgaatctataaataccttgggcattatggccattttcacgatattgattcttcctacccatgagcatggaatgttcttccatttgtttgtatcctcttttatttccttgagcagtggtttgtagttctccttgaagaggtccttcacatcccttgtaagttggattcctaggtattttattctctttgaagcaattgtgaatgggagttcactcatgatttggctgtttgtctgttgttgrtgtataagaatgcttgtgatttttgcacattgattttgtatcctgagactttgctgaagttgcttatcagcttaaggagattctgggctgagacaatggggttttctagatatacaatcatgtcgtctgcaaacagggacaatttgacttaatttggaagaaattttgatgaaaggacaaggagtaatrgaggtattttactatgtagaaagtaagataagtgtaagtgttttgaagctgctagaaaactttgtgtatgctagaaatttctgtgtattttacaaaattggagaataatttagaatcctacgatttttaagactaaggaatttttaaggagtatatttttttccttagactataagaaagcaactgataataatctaaagataactgccttatttatagtcatagaataaagtttttaaaggtgtatgagagtttcattgtattacagagcagatggcgtgctaatagtgacaaatatctttcaccatatcctgtaatggtttatactctcttggcttcacatgggctaggaatgccagtgagagttgactgcattccatccagggaagaacgtcttcccagagaaattagaaggtagtttgtcccctgaattgaagactaactcatacttccatttgttgtagggatatttggttgcagtccagagaggtctgctttttttcttctctttgacatctttttggtgtgaaaaattacagaatttctctcaatgttttatactgtaacagtttcattccctgcaaactttattttcattccttggaaactgcttgagaacttctcattgttggtttgtctgtagcttaacactccctattagaatgagacagaatgtggcagacatggatccggcactgctaataaaaggtgttctatcaggaagagttctgttaatagtttggagattattatcagacttgttaacttgctattactggacttgtaaacttattgaggacatgaaattagtaagaacacagtgaagcaactgattgctttctgagcccggctaatcactggactttagcttcatcataagcaaagtcatatgcaaggtcatcatatgcgaagagatgagactaaattattcctaatgtattttatagtttcacaataatattctgcctatcatagtacagtcttgttttttttcccaacatctttgtaactagaatgataaagggaaactaattttgagggcctattctgtaacctttacacatcctcattttacacacaaggaaacagaagccaagaaaagttggatctacccaagatcacccatctactaattgtgagttcaggttctgggacccttctgacttcagtctatagtctttccactttgtctgtactacttatcctgagaacaaggactgggacgcttggatcccagcagtgtgctgagggattactgagccacaggattaacagcatgtgttcctggagcatccttttaactcaagatttgaggaagaagcattttgatttgtgttttgtgggagaggacggacacaggtttttggtctgttttgcacatgggaagtggtataaaactttcacattaaaacactcaagtgtgtattttggagtataaaattcacttttttgaggtaaaatgagatmaaaaatgtttcctgttttgtggcaggacatttcagattacaatttcacttccctctgctcttttttaaaaaataatattttattgagatataaatcacacaccattcaattcactcattttaagagtactgctttatggagctgtgcaactgtcatcacaatcaatttgaaaacattttcataaccccaaaaataaactttatacttactggcatttattacccatttcccccccaacccctggccctagatagttactatagttacttttagtctctatagatttgcctgttctagacattttatctaaatggaatcatataataagtgattttttgtgactgcgttcttacatttagcgtatttatccaggttataaaatgtgttagcacttccttcctttttgtgtcaaataatatttcattatatggatatattacattttatttatccattcataagttagtgcacattgagatgtttccacttgattcttacaaataatgctgctgtgaacatttgtgtacaagtttttgtgtggacatatgttttcatttctcttgagcacatacctaatagtagaattgctgggttatatggtagccctatgtttaaccctttgaagactgccagaatattttccaaagtggctgtaccatttcacatttccagtagcagtttataaaggtttcaatttctctatcaacacttgttgttatctattttatttactcatccttcggggtgtgaaatggtaccttattgtgggtttgattgcatttctctgatgactaatgctgttgagcatcttttcatgtgctaatttgtcatttgtgtcttctttggagaaatatctttttcagctcatgctcattttttgactggattatctgacttttattattgagttgtagcaattctttatatagtctagatacaaatctcttcagatatatgatttgcaaatattttcttccattctctgggttgtcttttcactttcttgatggtatcctttgaggcacgagactttttaattttgaagtccagtttatttctcttttttggtcacttgtgctcttggtgtggtatctaagaaggctctgttgaacccagggttacaaaaatgtactcccacatttactcctacattttcttttaagagttttacagttttagctattaatctaggtctgtgatctactttgaatgagtttttgtgtatggtatgaggcagggcttcaatttcttttgcatgtggatatccagttgtccctctaccatttgttgaattgtcttggcacccctctgctcttagaggtaaatctactggaaaatttttggacatactgtgatattccatttgtagtaatttctctaacaccttagcttttaaaataatacattatggtgtatgaatctcaaacacactgttacaaatatgtactcataaatttatgagtatttttccccgtgagaagatactgtgccacctatttgctgatttaagtctattctgttatttggtgttgtagaacaaaattgattaaagtgtaaagcctgtctttctttttccagttggcagcctgatttattattttggttctttatgctcctgttttgattattatatatttgaaaagtataagttctttgtcccctaatacatggcacatacatatacttttgtgttatggaattagtgatagtagatatttgttgaatgattttttacaaaatgaccyaggtgtctgctgagttaaccttcatatgtaggaactaattttaggatattctggaagtgcaaactaacactgaagagctattataggccaccaagatgaacgatgattatactttacatgttgttgtaatacatttcagaaagaccatggcaatgaagtatggtgaatggaaattcaagttggcagttatttctgtatttatttcacagtaatttgcatgcaagttggacctggatattggaggggcttcaatgtgagactgaggcatttgggctttttgtataggcaggggggccttttgaatatattttaaattaarggaacatgaacagagctgtgcccagagagactgagtaggcagcaggtgtgaggtaagaaagtggaaggtggttgaggtagaaaggtgaattaagagacaaaagtgctctggacaagaggtattgaggactaaaaaatatagcagtagtagagatggatgagtgggtagctgttaaaaatgcttgtttcaaatgcaggtttctggcctctactgtggactgactgaatcagaatctcctagttatagtgacttgacagctgcacttttaacaagctcccttcagtgattcttttgtctgatatgctgtattagatgatacgaagatagaattgactagactggcaactgatcatatactcaggggatctctttgttactgagagaatggcgaagctgttttaaagggttgggaactaaggaagggggaaaagatttggaggtatagagaatgcattccatctgacacatatcagattggatttggcagcagaacagctgtgcagtgggataggattggttgggaatataaaatagttacacagggaaagagccagagcagtaaatagtgtttttcaaaaattaagtttatgagtatgttttccctgtgagaagatactgtgccgccgtatttrctgatttaaaagtctactctgtgattggaaagaaatatttggatatggggaactatacccagagagaaaccagggaatctactcaatccaagctttcatggagacctgcatgcccttgacacaagttctaaaattgtagcaacccacatgatactgtcatctgattgaacccagttaaaactctctgagggaggagttaagtcatacataaacactgtgttgagggcataaaatattgaatgaacgggtaagtaccattgtctagattcttgatagctgaaattgctgtgctatgactagggctgtgtctgtggaaatacccatatgcctcctctaccactcattaggtttgttactctgtcytttggagaggtggttttgttactctgcattagttttggttattagggagcaccaggaacaaatgttccatgcaccacwttcagaaggcaacctgtctccgattaaaatagtagagattttgtagaccccaagatcctcataaatcagattctgtgcctttggtcttcctaattttaagtcagtttttcagaggatcacagcctctgtcagtatttgaccacaagtacgcagatcctccaggtggcatgtttgaaagaaagagagaaagtgtttccagtctacttgagagaatacacaataaatgactcctgaacttcataatcatattagttaacttgctgctcttcatacctgggacctcaacatgcatacccgttaccatgttcagggtcttcttagtctgaaataatgcattcacttgttgcattctaactgcaatcccagatctttgtaactttcactaaaagttactcttaactaawcttcattagttctttgacttcaccagaacctctagttgaaaaacttctctacttcttacttacatctgtcagtttcagcttagatgctgcagccccaatttcagctgctctttagttagcatcttcagcttcctttgtcttccttcagtttctggcagaatctcaaatccaggtaggatcagctgcctgttttgttcatgcctgtgccaggtttactgagttgctagagaaaaccagtcaactgtgtcactatgaaaattcatgacagctgtcaacattgactccagttctactgtttactcacactttctcccatcttccacattaactatttcagacattctttctgttcctcaaacctctgaaccttttaccattctactccctgtcaataattgaccctacctccggcaactctcttcacctccagccctcaaatctgtcagctcccctacctttgctccttctctcctgttacaatggaagaggcatcctgtccatctraagtgaatcattttacctmactcacatgtcctattttcttagagaccaaagaagatagagagcaaaggcagggagatttattagggaaaagctgtttttgtcatcagtgaattgatttaaagaaagaacaaaaaatcagagatagctttaagcctagggtattagtgaaaatagttgttgatagctaaaaggaagtttaagagggatgtggtaataaaactcatttcaatagctattggatttcttcataagttactggagcatccatgtycatgtaggctttgcatgtttgttaatcaacttcatgtgactattggggcacatacagactgatgggggcttttttctcaatagcatttatttcttattcccccttttttatagcaatattttcaacaagaactggcaataaaccaatatggtagaatttccaccaattatttctgtgggttaaagaaactataaagtacaatttattaaactggaaaaataatcatcatctctggagcctctgaaagcttggcattaacgttatgttttacaaaagaatcattttagtgtctgcatctatttttattaagcctttmgaagaatttctaatgtggcaaatgagctgacagcctagaaggagtattgatgtggagtataaaaatggcccatatgaaggatagagtagggcatatatataaataggaaattggacaagacaattttttttccaattttagcttttagttatttttaaataaatggtattrtttaagttaatataggtaaagctggcatataaatgttggttctctcctcctgtgggctaaaattctaaaacttaacccaaatgaaatagaattactacttatgagttgtgtttttacattttaggaaccctgattgctgtccttcaayrtgttcattatgaagttattagtaatactttygttttctggacttataactggttttagaagtgactcttcctctagtttgccacctaagttactactagtatcctttgatggcttcagagctgattatctgaagaactatgaatttcctcatctccagaattttatcaaagaaggtgttttggtagagcatgttaaaaatgtttttatcacaaaaacatttccaaaccactacagtattgtgacaggcttgtatgaagaaagccatggcattgtggctaattccatgtatgatgcagtcacaaagaaacacttttctgactctaatgacaaggatcctttttggtggaatgaggcagtacctatttgggtgaccaatcagcttcaggaaaacagatcaagtgctgctgctatgtggcctggtactgatgtacccattcasgataccatctcttcctattttatgaattacaactcctcagtgtcatttgaggaaagactaaataatattactatgtggctaaacaattcgaacccaccagtcacctttgcaacactatattgggaagaaccagatgcaagtggccacaaatacggacctgaagataaagaaaacatgagcagagtgttgaaaaaaatagatgatcttatcggtgacttagtccaaagactcaagatgttagggctatgggaaaatcttaatgtgatcattacaagtgatcatgggatgacccagtgttctcaggacagactgataaacctggattcctgcatcgatcattcatactacactcttatagatttgagcccagttgctgcaatacttcccaaaataagtaagtaaacattcaactgagggatactattattcgaatggggcaattgattgaggggggtgggttgtataaaagaatgaagctctagctttttgtagtttagaaccatatactcagagtgggattatatgtttttttcctcttgtttacaagttgagagcagttggcctatggtttagttatatggcttatggtttagtttcaaagtgagtatttctttgcttttgatatatctaattatttgcactagaaaaaggaaatttttatccttaaacatcttagattttagtgtgtgatatttagtggtgaggtactttcttctactgatcatagaagtagtagttagtagtaacatgtaattagtttatgtttacttaggaagatacacctgaaaaatgtcccctatctgtaaaagtccaccatggtaatccacaaagtgaaacagatttgttaatgtttgagaaaggtgtgtgtttgtgtgtatcagtccccaacactctcacattattattgctctgtttttttaagaagtgatttaatagatgacattatctataatttacttccaattattctagttagacatattttttccttatcaatcataacttgtttcctttgctgtttctttttttttctcagatagaacagaggtttataacaaactgaaaaactgtagccctcatatgaatgtttatctcaaagaagacattcctaacagattttattaccaacataatgatcgaattcagcccattattttggttgccgatgaaggctggacaattgtgctaaatgaatcatcacaaaaatgtaagtatttagttgagatatttctgttgtatcctaggaacaaatcataccttgtgatactgttgtgttaagagggtacttcgatttaaagaagttcacacagaataattagttcaattttcaaccagataattcccaggtcttcatttaatagcaatttacagtaatcacaatttcacctttaaattagaaagtaaatttaagagtgaaggcaaagtcctactttctttccaaaactgcaattactgtcagtaattttcaagattcattctcttgatttatacaaaatagagaagtaaagaaacagtaaaaggggagagattagctaatccttgttcttttgtgtgttaaaaaaaatttgtctgagtaaccctaagtcttccccagtaacaaaatcatttacctgaatgctacagctatttagaacactgggcaagaaccagaaagtaaccaaacaaatccaccaagtgaacaaaatagatacatcaaaatctctcctaaaaaatatataggggagaaaatgtataggggtgagttacaggcttgcctcaaactgaagcttatttatccatatttcatattcaattcaaatgctttttttaaaatctaattttgtggtctatggtaggggtcagcaaacttttttagtaaagggccaaatagaaaatagtttaggctttgtgggccagctggtctctgtctcagctactctactctgcctttattgtgtaaaagtagccatagacaacctgtaaagaaattgaagtggtgtgcttcggtgaaactctgtttacaaaaaggatggagggctaaccttcgctatgggctgtagtttacagttccctgatatatagcaatttagaagtatcaggcaagcataggacagactcagaatcaatgaagtttgtatattatttacatcaatgttatgttgcatatttgttgttgacaaccgaaagtatagaaaagcataggaaagagaacaaaaactatccataatccctcagtatggatttataggcaaatgttaattgtggrcatttctccccatccaatcttttttcatatatatattcttttctaatatatatctatattatatatattatatgtaatataattatatgtaatatatataatatatataatgtatattatatattatatataatatataattacatataattataatatatattttctacatatatatgtagaatatattatatattatatatagaaaaatatatatttttttctaatatatgtgtgtgtgttttaatattattgaaatctttatatattctgctttttgtcatattggttatttttatgatgaaatatttcaaacataccaccaaagaataatataacaaatatcagtatactcatcacccagtcacccgtacttaatatgaaagtgggagcttattaaatacaacgggtgtacgttaaatggcaacatttgttaaaataaagctaaaaattgggaatttattattggagttgtattagggactatcatatgcttttctttaagtctaacttttactgggatagagtcaccagattagacaacacattcaacgcaagatccctcctgtaacaattgagataggttaggctgcagattttctttttctccatttgttggccttactcacttctgttcttcccagttacacagaaccctcagcctgaccactgtctttataactggtactgcttgcagtgagcttttgcaaacagtgctgagattgacargtgaagtaattggtactcgggctgaaagataagtacatcaggttgacaagtggtggtaaagtctgagggtatgaccagttgggaaaaggggcatrtgtgtgtgtttgtgtgtgtatgtgagagagagagagagagagagggaaatatggaacatagctgagttgaagaaatagaaatttttatttctagtccctttctgaaagaattgaatgtttatatactagaagcaagttattttgtcctaaaaagtctgatcttattgactgatgttgttttgttctttttcagtaggtgaccatggttatgataattctttgcctagtatgcatccatttctagctgcccacggacctgcatttcacaaaggctacaagcatagcacaattaacattgtggatatttatccaatgatgtgccacatcctgggattaaaaccacatcccaataatgggacctttggtcatactaagtgcttgttagttgaccagtggtgcattaatctcccagaagccatcgcgattgttatcggttcactcttggtgttaaccatgctaacatgcctcataataatcatgcagaatagactttctgtacctcgtccattttctcgacttcagctacaagaagatgatgatgatcctttaattgggtgacatgtgctagggcttatacaaagtgtctttgattaatcacaaaactaagaatacatccaaagaatagtgttgtaactatgaaaaagaatactttgaaagacaaagaacttagactaagcatgttaaaattattactttgttttccttgkgttttgtttcggtgcatttgctaataagataacgctgaccatagtaaaattgttagtaaatcattaggtaacatcttgtggtaggaaatcattaggtaacatcaatcctaactagaaatactaaaaatggcttttgagaaaaatactwcctstgcwtgtattttgcgatgaagatgtgatacatctttaaatgaaaatataccaaaatttagtaggcatgtttttctaataaatttatatatttgtaaagaaaacaacagaaatctttatgcaatttgtgaattttgtatattagggaggaaaagcttcctatatttttatatttacctttaattagtttgtatctcaagtaccctcttgaggtaggaaatgctctgtgatggtaaataaaattggagcagacagaaaagatatagcaaatgaagaaatattttaaggaaacctatttgaaaaaaaaagcaaagaccatttgataaaagcctgagttgtcaccattatgtcttaagctgttagtcttaaagattattgttaaaaaattcagaagaaaagagagacaagtgctcttctctctatctatgcttaatgcctttatgtaagttacttagttgtttgcgtgtgcctgtgcaagtgtgtttgtgtgtggttgtgtggacattatgtgatttactatataaggaggtcagagatggactgtggccaggcttccacattcctgaagcacacagatctcaggaaaggttatttttgcacttcatatttgtttactttctcctaactcacaagttaaaatcataacttaatttcattaacttttatcatttaactctctcatgtttgttgtaaccygaggtatccaaatgctrcagaaaaatttatgacccaaatacaaatctcaatwtgactgggacagaatgaggaatggagatttttgtatttatctttgggactttatgccttactttttaggctatagaatagttaagaaattttaaacaaaatttagtatcttttggtctttcacaccattcatatgttaagtggcagaatagccttagtgctacctccacttttttctccagtatttgcatcacagaaataatccctctgtttaacatgtttgttcagagccaagggtttattgtgaagaactgtcatcctgcctttgctagctggtaccttctagtaatcaaaattaatatgaagaaactaggttgtgacagactagattatatttagtaggggaaaaattgggctcaagaaccattcatcagtacgtgagacaagcagttaatagtatgatctttaaagttttgacaatataaaataaacttggtaactgttttacaaatataaaagtatartaaatatgcagcccagttaaatattgattatctgtgatggtaaagaacaacagtggtgccagtcatcaaacatacagtgcgtcctattgagtcactgctaatttcttgagcctggtatttgctgcctattgtatttgtggttgttgagaggcattttcaaaccctgtataaataatccatgctgttggtcataagttaactgtattaagaacagtaaaataaataaaaaccaatagtactaattttgctttaaaaaaatttctaatttttttcacataaaacaattatcctaaaggttaatagttgatcgaaacagaataatagaaaaattctwctttaatttccattaaaaagcaaatagcattgacacatttaaagcttttcatttaaagtagtggatgtttttgaagtatctaaaatagtagcagaatattttatacttggtccttgcawtggtgtgagttttaatgattgcattatcgtgattggtggttatgagtttcagaaatctatacttggcatccaactcatgagtggattttatataggatggaacaggaaggtatgtcctgtcagtatcttaaccctttcaacaagacatttacctatttgtctttccttacgttctcaaaatattaactcgaattgtaaattaagcaaaaatktaaaaagtatatgttgatgggacaagaagaatagtatttatttaataaaacatatattatattgaactatgtgttaattcatttgtatcttttaaaaaattatcactgttaaagccattgactcctttagtacactgagaaaaatcttatagtaaaactagcctttcacattaaggttttggtgtgtattttgttaaataactaacatgctgctctattttctgggtgtagaaagtatttggctctaggaaacatttacttgtttgtgaaaacaataccccaaggtaataggaaaagtttgarttaagtgtttttaattcagtcagtgaattcagaataagtacattcatgtataacatagggacagttctgctgctgttatttatatgcaattcttctggtaaatagcaatagaataaaacatatttcaatgtttgtgtataggttttatattattattccactaggaatggcataagaatttatagataaattcttgtaacattaaaggattaaaatgtttttacattgtttwtgggtgtctccttcttgtgcccatatctgataagctttatggattattgcatttaattccttttatttggagggttttacttccttgttaacatataaagttataaatgaaggacaaggaggagatggaaaatgtgtatttattgttaattcttaaaatagtgtgtaaataaaataacatcagtgtgctttaaagaaatgtgtatgtagtgccttaatttaaattaaaatatttttgactgttacttgagttcagaattaatgactttgttcatgatttttaaaatgtgtgtgaataaaatctaccaaaaaattcttactgtaattattaaatataaagttcagtgtcactggtgatttttacatttgttaccttcttgcaaaatatacttactgtgctagatgttgacatgacttagtaatattatagaagcccacataggtrtttattaggattttttaactctttaacaaaaagtttaaaacagtgtgtaagtatacaatccagcataagaacatcattggaaagaaagccaagataagttttatagaacctccagagctatgatttattggcttatggtagaagagaagaggtttgaaaaaaaccgattataaaatagtggggatggtaggggaagcattataatgtttaaactttgtacatagccataggcatttaatgacttgtccaattgaatatagattcaagaattctcctattagagcagtgattaattcatttcctatttttgtattaaaagaactctgctaagaattgtaggaaaacaaaagaataaatggaacattttttactctgaaagagaattatttcaaaagtggtaaaactttatttataccaacaaattacctatgtgtactcatgggttaactcttgctgctgagagccttgtatctagaatcattttccagaccttgtgcttcctgaggttcagatgctaattttgcctcttcccccaactcccagcctccttagtgcctatgtttggttattattacatccttctcaccccatcctccactagtgtactcacacacacattcacaaccattgcttgaaagaatatgtgagaatctaaatgatccatctgggctctggagtcctgtaacagacatgctgatcacaacatatatgtgtatgtgtgtatgtaagtatatgtgtaagtgtatatatatatgtatgtgtgtgtgtatactatacatatatgtatgtatatactaatatatatatgtacaggcacatgtgtgtatagttctatattcttatgtaataactatgtgtatatgttgaaatgactagatcctctgactcctgtcccatggtcaaaattacctgggaggtaaatgcagagtctatacctaaagagtaagccaaactgctatgcaggctttctgtgtccacgtatcttttttttatccttttgacctctgaaatctcatttccaccgtcaatacacaacctggtgagctcttccactgacagctccatgatgatgatttacagacatgtgtctccagtctagaccttcctcttctgttaaagatacaaattgctattaatttaatcagcattacattcatatcaaccatgctcaatctcactttcgtaggcgagtggtggaaaggagcaatagaaattaaccccaaaacaaatctagaaaatttcactatataaataaccattttataaaggggcttctataggttagacagagtactattgatttacaaaatgtttgaaatatccactgaggagagtgaatatgttttttacactcgaaatttctgtgaagattctccctcactccccctttttttgtaatcttaaaaagacatgttgggttctgtatccagtaatggtagactgtgtaattcaaaccagtgctcttactgaggactagaaaatctggacaaataaaagatttgtgcttatgcattgaggaatttccagaaagtgaagaatgaagaggctaggatttagaaggaaaaaaaaaacccaataaacatgagtccctaatggcatctatgaattgtggaagaggcagctgaaaggctgagaagctaacctaatcagaagagactaggagcgggtgattgaaggagagaaggcacagatgtaaatatatctattaaaatcatgcatctgcactatttggcacaaatttgaaaatataaatgaataatttcctaggaaaaaaattattggataaaactgactccagtaaagaaagagaaaacaaaaacataccagtttctgtatttaggaaaaggttgaggcagttatagtgtataaaaaagtatcaggcctcaaagacaataatcctttttttttagtgactctgtcaggcttggatatcagtttatatttgcctcaaaaaactaacattttagaaaatgaagtatattatttttaaggtgaataaaactgatactgaacttgaaaaaatagcacacaaaaaaactatggaccaatcttgaatgaaagaaacatttttcaaaaatgaaaattaaaccacatctgtaattagatgtaaatagactgaacattccagtgaaaaggcagagattatcaaagtagatgaaaaagcaatatccaactacatgtagtctacaagagaatcactttaaatacaaagacacaaattgaattttaaaaaaggatagaaaataacatgccatggaaactgtattagtccattatcactctgctaataaagacatacctgggactgggtaatttatacaagaaagaggtttaattgactcacagttccacaaggctgaggaggcctcaggaaacttacaatcatggcggaaggggaagcaaatatgtcctcttcacatggtggcagtaaggagaagtgcagagcaaagcagcgaaaaacccttataaaaccatcagatctgatgagaactcactatcacgagaacagcatggaggtaactgcccccatgattcaattacctcccaccagatcccttccacaacatgtgggaattgtgggaactacaattcaagatgagatttgggtgcagacacagcaaaaccatatcagaaactaaccataataaatatatacatattgatatcagaaaaagtagtcttcaagacaataattttcaggaacagagagatttcattaatgtacaaggaccaatatgtaaggaaagcatgacaattctaaaagtgttcatacctaaaaacagcttaaaaacacattaatcaaaaactgatggaactaaagagaattcgtaaacataattgaagaatttagcactcctctctaagtcgttgatacaccaaccacaccaagaaaaaaagacaataaagatacagaagacttgagtgattttattaaccaccttgacttaaatgagatttagaggagattacagctccaaactgcaaaatatattatttttataagtatacattgaagaattaccaagtttggccatacacaggaccagaaaacaagtctcagtaaataatctcaaagaactgcaattttacaaagtatgttttctgaccacaatggaacgagggtcaataacaatacaattcagaaaatccttaaatatttggaaattaaacaatacaatacacttctaaataacttatgagaaaaataaaaataaggcaaataaaatatttggaaatgaatgatcataaatatgtagcactaaaatctatagtatgcaactaaagcattagaggaaaatttgcagctttgaatgcctatcttaagagaggctgaagggttcagaatcaatgattacagccttcgctttaggaaaacagtaaaaggaggaaataatccaaagtcagtgggaggaaggatataataaaaataagatccaaattaatgaaatcgtgaagagaaaaaataataaagtgaaaatttattttttaaaaacatactagtaaaattggtaagatgacctaagaaaaaagggagatagcagaaactggcaatatcagtaataacagaagcgccatcactgcagatcctacatatgtcaaaaagataatacagaatattatgccaatggatttgacaatttacataataatggataaattcaccgaaaaatgcaacttaccaaacaaataaaaaatgtgaatagctttatatctatcagacattaatttataaaaaaatccttataaagaaaacttcaagtccaggtgtttcactgattagttcatcacacatttgatgaagaaatgataccagttttacataaattcttatggaaaatagaagacgaaggaacacgttttatttatttgtttgtttgtttatttatttatttatttatttatttatttatttatttgacagagtctctctctgtcaccaggctagagtgcattggtgcgatctcggctcactgctacctccgccttcccgtttcaagcaattctcctgcttcagcctcctgagtagctggaactacaggcacgtgccaccacgcccagctaatttttgtatttttagtggagacggggtttcaccatgttggccaggatggtctccatctcctgacgtcgtgatctgcccacctcggcctgccaaagtgctgggattacaggtgtgagccacctcgcccagccaacatattctttttataaggccagtataacactggtacaaaaacgtgaaaaaatatattaaaagaccagtattcttatgaacaaaaatacttaactaaatattatctaattgaattcagtggtaattcaaaaggataatgcacatgaataagtggagtttactacagggcacagaattgttttgatcattgaaaatcaatcaatgttatgctgtatactaatagaaaaaaaggaacacattatcaagtcaatgaatgtggaaaagtatttggcaaaattcaacacctatttattagttgaacaaactgattaaatttggaatagaaggaaacttccaccagctgatgaatgccatctattaaaaaaaaacaaaaacaaagccaaagctaatatactgaatgatgaaatagcaaatgttcctctcctgggatcaggaacagggcaaggatgtccactctcaccacttatatttaacattgtactgcaggtcctagcaagtgcaataaggaaagcaaaagaagtaagtattggaaaataaaactcatattcacaaatgcatgatagtatacataagaaatccaacaatctacagataaactctgagtttaaaaaatggctagatatcaggtcaatatacaaaaatcaagtgtattcctatatctcagcagaaaacaattagaaaaggaaaattttaaactcatattatttacattgctatcaataagcatggaatatttgggaataagtctaacaaaatacatgcagaatctttgcacagaaaattataaaggagttaagggagaccaaaataaatagagggctatatcatgtttgtaggttggaaggttaaatattataaagatggcaattcttcccaaactgataattgcatccaagtaatttcagcagggttttatttgtttttttatggaactgcagaagctgactgtaaaatttgtgtagaaatgcgaagagccaagacaattttgaaaaaaataaaatggtaggacatactctatcaggtgtcaggaataattctaaaaatataataagagagtatagtattgacccaaggattaaaaaatagataaacagaattaatcacctttgttaaaatcaagaatccatacatctgtgggtgtattagacttctcttgtataccctcaaacgcagtcaatatactcttactccagttttattttggctttggctagcttcccacagatgcaacctgacaatgcttagcctctttcttcttggcccagacatgactggcctgaacactaaagtggtgagtgcctctaagatcatacttggcacttgggcatgcacttttcaagaaatatagggagttgatgcccatggggccatgtaaaggtacaatgagaaggcagctgtctgcaacccaggaagagagccctcaccaggaaacaaatctgctggaatcttaatcttggactgtccagtctcctggaactgtgcgaaataaacgtctattgtttaaaccatatttggtattttgttacggcaaccacagctaatataataaatagttccaataccataagaatctcttgcgttgctgttttataatcaccttccatttcaaattttgtcatttaaaaaatagtacataaatggaattttacagtatgtaactctttagcattggtttttccacccagcataattccctggagatccatcc
